United States Patent Application Publication US 2026/0256945 A1 - sequence listing, part 4

SEQ ID NO: 3217 - protein, 2021 aa, synthetic construct
MPAAKRVKLDGGDKKYSIGLDIGTNSVGWAVITDEYKVPSKKFKVLGNTDRHSIKKNLIGALLFDSGETAEATRLKRTARRRYTRRKNRICYLQEIFSNEMAKVDDSFFHRLEESFLVEEDKKHERHPIFGNIVDEVAYHEKYPTIYHLRKKLVDSTDKADLRLIYLALAHMIKFRGHFLIEGDLNPDNSDVDKLFIQLVQTYNQLFEENPINASGVDAKAILSARLSKSRRLENLIAQLPGEKKNGLFGNLIALSLGLTPNFKSNFDLAEDAKLQLSKDTYDDDLDNLLAQIGDQYADLFLAAKNLSDAILLSDILRVNTEITKAPLSASMIKRYDEHHQDLTLLKALVRQQLPEKYKEIFFDQSKNGYAGYIDGGASQEEFYKFIKPILEKMDGTEELLVKLNREDLLRKQRTFDNGSIPHQIHLGELHAILRRQEDFYPFLKDNREKIEKILTFRIPYYVGPLARGNSRFAWMTRKSEETITPWNFEEVVDKGASAQSFIERMTNFDKNLPNEKVLPKHSLLYEYFTVYNELTKVKYVTEGMRKPAFLSGEQKKAIVDLLFKTNRKVTVKQLKEDYFKKIECFDSVEISGVEDRFNASLGTYHDLLKIIKDKDFLDNEENEDILEDIVLTLTLFEDREMIEERLKTYAHLFDDKVMKQLKRRRYTGWGRLSRKLINGIRDKQSGKTILDFLKSDGFANRNFMQLIHDDSLTFKEDIQKAQVSGQGDSLHEHIANLAGSPAIKKGILQTVKVVDELVKVMGRHKPENIVIEMARENQTTQKGQKNSRERMKRIEEGIKELGSQILKEHPVENTQLQNEKLYLYYLQNGRDMYVDQELDINRLSDYDVDHIVPQSFLKDDSIDNKVLTRSDKARGKSDNVPSEEVVKKMKNYWRQLLNAKLITQRKFDNLTKAERGGLSELDKAGFIKRQLVETRQITKHVAQILDSRMNTKYDENDKLIREVKVITLKSKLVSDFRKDFQFYKVREINNYHHAHDAYLNAVVGTALIKKYPKLESEFVYGDYKVYDVRKMIAKSEQEIGKATAKYFFYSNIMNFFKTEITLANGEIRKRPLIETNGETGEIVWDKGRDFATVRKVLSMPQVNIVKKTEVQTGGFSKESILPKRNSDKLIARKKDWDPKKYGGFDSPTVAYSVLVVAKVEKGKSKKLKSVKELLGITIMERSSFEKNPIDFLEAKGYKEVKKDLIIKLPKYSLFELENGRKRMLASAGELQKGNELALPSKYVNFLYLASHYEKLKGSPEDNEQKQLFVEQHKHYLDEIIEQISEFSKRVILADANLDKVLSAYNKHRDKPIREQAENIIHLFTLTNLGAPAAFKYFDTTIDRKRYTSTKEVLDATLIHQSITGLYETRIDLSQLGGDGGPAPEAAAKGGGRDIMKDIKVRLMTDSPDDSQDLMIGAIESNLFADQISWKSDQPVWLNQWPLKQEKLQALQQLVTEQLQLGHLEESNSPWNTPVFVIKKKSGKWRLLQDLRAVNATMHDMGALQPGLPSPVAVPKGWEIIIIDLQDCFFNIKLHPEDCKRFAFSVPSPNFKRPYQRFQWKVLPQGMKNSPTLCQKFVDKAILTVRDKYQDSYIVHYMDDILLAHPSRSIVDEILTSMIQALNKHGLVVSTEKIQKYDNLKYLGTHIQGDSVSYQKLQIRTDKLRTLNDFQKLLGNINWIRPFLKLTTGELKPLFEILNGDSNPISTRKLTPEACKALQLMNERLSTARVKRLDLSQPWSLCILKTEYTPTACLWQDGVVEWIHLPHISPKVITPYDIFCTQLIIKGRHRSKELFSKDPDYIVVPYTKVQFDLLLQEKEDWPISLLGFLGEVHFHLPKDPLLTFTLQTAIIFPHMTSTTPLEKGIVIFTDGSANGRSVTYIQGREPIIKENTQNTAQQAEIVAVITAFEEVSQPFNLYTDSKYVTGLFPEIETATLSPRTKIYTELKHLQRLIHKRQEKFYIGHIRGHTGLPGPLAQGNAYADSLTRILTAGKRTADGSEFEKRTADGSEFESPKKKAKVE

SEQ ID NO: 3218 - protein, 2018 aa, synthetic construct
MPAAKRVKLDGGDKKYSIGLDIGTNSVGWAVITDEYKVPSKKFKVLGNTDRHSIKKNLIGALLFDSGETAEATRLKRTARRRYTRRKNRICYLQEIFSNEMAKVDDSFFHRLEESFLVEEDKKHERHPIFGNIVDEVAYHEKYPTIYHLRKKLVDSTDKADLRLIYLALAHMIKFRGHFLIEGDLNPDNSDVDKLFIQLVQTYNQLFEENPINASGVDAKAILSARLSKSRRLENLIAQLPGEKKNGLFGNLIALSLGLTPNFKSNFDLAEDAKLQLSKDTYDDDLDNLLAQIGDQYADLFLAAKNLSDAILLSDILRVNTEITKAPLSASMIKRYDEHHQDLTLLKALVRQQLPEKYKEIFFDQSKNGYAGYIDGGASQEEFYKFIKPILEKMDGTEELLVKLNREDLLRKQRTFDNGSIPHQIHLGELHAILRRQEDFYPFLKDNREKIEKILTFRIPYYVGPLARGNSRFAWMTRKSEETITPWNFEEVVDKGASAQSFIERMTNFDKNLPNEKVLPKHSLLYEYFTVYNELTKVKYVTEGMRKPAFLSGEQKKAIVDLLFKTNRKVTVKQLKEDYFKKIECFDSVEISGVEDRFNASLGTYHDLLKIIKDKDFLDNEENEDILEDIVLTLTLFEDREMIEERLKTYAHLFDDKVMKQLKRRRYTGWGRLSRKLINGIRDKQSGKTILDFLKSDGFANRNFMQLIHDDSLTFKEDIQKAQVSGQGDSLHEHIANLAGSPAIKKGILQTVKVVDELVKVMGRHKPENIVIEMARENQTTQKGQKNSRERMKRIEEGIKELGSQILKEHPVENTQLQNEKLYLYYLQNGRDMYVDQELDINRLSDYDVDHIVPQSFLKDDSIDNKVLTRSDKARGKSDNVPSEEVVKKMKNYWRQLLNAKLITQRKFDNLTKAERGGLSELDKAGFIKRQLVETRQITKHVAQILDSRMNTKYDENDKLIREVKVITLKSKLVSDFRKDFQFYKVREINNYHHAHDAYLNAVVGTALIKKYPKLESEFVYGDYKVYDVRKMIAKSEQEIGKATAKYFFYSNIMNFFKTEITLANGEIRKRPLIETNGETGEIVWDKGRDFATVRKVLSMPQVNIVKKTEVQTGGFSKESILPKRNSDKLIARKKDWDPKKYGGFDSPTVAYSVLVVAKVEKGKSKKLKSVKELLGITIMERSSFEKNPIDFLEAKGYKEVKKDLIIKLPKYSLFELENGRKRMLASAGELQKGNELALPSKYVNFLYLASHYEKLKGSPEDNEQKQLFVEQHKHYLDEIIEQISEFSKRVILADANLDKVLSAYNKHRDKPIREQAENIIHLFTLTNLGAPAAFKYFDTTIDRKRYTSTKEVLDATLIHQSITGLYETRIDLSQLGGDGGPAPAPGGGRDIMKDIKVRLMTDSPDDSQDLMIGAIESNLFADQISWKSDQPVWLNQWPLKQEKLQALQQLVTEQLQLGHLEESNSPWNTPVFVIKKKSGKWRLLQDLRAVNATMHDMGALQPGLPSPVAVPKGWEIIIIDLQDCFFNIKLHPEDCKRFAFSVPSPNFKRPYQRFQWKVLPQGMKNSPTLCQKFVDKAILTVRDKYQDSYIVHYMDDILLAHPSRSIVDEILTSMIQALNKHGLVVSTEKIQKYDNLKYLGTHIQGDSVSYQKLQIRTDKLRTLNDFQKLLGNINWIRPFLKLTTGELKPLFEILNGDSNPISTRKLTPEACKALQLMNERLSTARVKRLDLSQPWSLCILKTEYTPTACLWQDGVVEWIHLPHISPKVITPYDIFCTQLIIKGRHRSKELFSKDPDYIVVPYTKVQFDLLLQEKEDWPISLLGFLGEVHFHLPKDPLLTFTLQTAIIFPHMTSTTPLEKGIVIFTDGSANGRSVTYIQGREPIIKENTQNTAQQAEIVAVITAFEEVSQPFNLYTDSKYVTGLFPEIETATLSPRTKIYTELKHLQRLIHKRQEKFYIGHIRGHTGLPGPLAQGNAYADSLTRILTAGKRTADGSEFEKRTADGSEFESPKKKAKVE

SEQ ID NO: 3219 - protein, 2025 aa, synthetic construct
MPAAKRVKLDGGDKKYSIGLDIGTNSVGWAVITDEYKVPSKKFKVLGNTDRHSIKKNLIGALLFDSGETAEATRLKRTARRRYTRRKNRICYLQEIFSNEMAKVDDSFFHRLEESFLVEEDKKHERHPIFGNIVDEVAYHEKYPTIYHLRKKLVDSTDKADLRLIYLALAHMIKFRGHFLIEGDLNPDNSDVDKLFIQLVQTYNQLFEENPINASGVDAKAILSARLSKSRRLENLIAQLPGEKKNGLFGNLIALSLGLTPNFKSNFDLAEDAKLQLSKDTYDDDLDNLLAQIGDQYADLFLAAKNLSDAILLSDILRVNTEITKAPLSASMIKRYDEHHQDLTLLKALVRQQLPEKYKEIFFDQSKNGYAGYIDGGASQEEFYKFIKPILEKMDGTEELLVKLNREDLLRKQRTFDNGSIPHQIHLGELHAILRRQEDFYPFLKDNREKIEKILTFRIPYYVGPLARGNSRFAWMTRKSEETITPWNFEEVVDKGASAQSFIERMTNFDKNLPNEKVLPKHSLLYEYFTVYNELTKVKYVTEGMRKPAFLSGEQKKAIVDLLFKTNRKVTVKQLKEDYFKKIECFDSVEISGVEDRFNASLGTYHDLLKIIKDKDFLDNEENEDILEDIVLTLTLFEDREMIEERLKTYAHLFDDKVMKQLKRRRYTGWGRLSRKLINGIRDKQSGKTILDFLKSDGFANRNFMQLIHDDSLTFKEDIQKAQVSGQGDSLHEHIANLAGSPAIKKGILQTVKVVDELVKVMGRHKPENIVIEMARENQTTQKGQKNSRERMKRIEEGIKELGSQILKEHPVENTQLQNEKLYLYYLQNGRDMYVDQELDINRLSDYDVDHIVPQSFLKDDSIDNKVLTRSDKARGKSDNVPSEEVVKKMKNYWRQLLNAKLITQRKFDNLTKAERGGLSELDKAGFIKRQLVETRQITKHVAQILDSRMNTKYDENDKLIREVKVITLKSKLVSDFRKDFQFYKVREINNYHHAHDAYLNAVVGTALIKKYPKLESEFVYGDYKVYDVRKMIAKSEQEIGKATAKYFFYSNIMNFFKTEITLANGEIRKRPLIETNGETGEIVWDKGRDFATVRKVLSMPQVNIVKKTEVQTGGFSKESILPKRNSDKLIARKKDWDPKKYGGFDSPTVAYSVLVVAKVEKGKSKKLKSVKELLGITIMERSSFEKNPIDFLEAKGYKEVKKDLIIKLPKYSLFELENGRKRMLASAGELQKGNELALPSKYVNFLYLASHYEKLKGSPEDNEQKQLFVEQHKHYLDEIIEQISEFSKRVILADANLDKVLSAYNKHRDKPIREQAENIIHLFTLTNLGAPAAFKYFDTTIDRKRYTSTKEVLDATLIHQSITGLYETRIDLSQLGGDGGGSAGSAAGSGEFGGGRDIMKDIKVRLMTDSPDDSQDLMIGAIESNLFADQISWKSDQPVWLNQWPLKQEKLQALQQLVTEQLQLGHLEESNSPWNTPVFVIKKKSGKWRLLQDLRAVNATMHDMGALQPGLPSPVAVPKGWEIIIIDLQDCFFNIKLHPEDCKRFAFSVPSPNFKRPYQRFQWKVLPQGMKNSPTLCQKFVDKAILTVRDKYQDSYIVHYMDDILLAHPSRSIVDEILTSMIQALNKHGLVVSTEKIQKYDNLKYLGTHIQGDSVSYQKLQIRTDKLRTLNDFQKLLGNINWIRPFLKLTTGELKPLFEILNGDSNPISTRKLTPEACKALQLMNERLSTARVKRLDLSQPWSLCILKTEYTPTACLWQDGVVEWIHLPHISPKVITPYDIFCTQLIIKGRHRSKELFSKDPDYIVVPYTKVQFDLLLQEKEDWPISLLGFLGEVHFHLPKDPLLTFTLQTAIIFPHMTSTTPLEKGIVIFTDGSANGRSVTYIQGREPIIKENTQNTAQQAEIVAVITAFEEVSQPFNLYTDSKYVTGLFPEIETATLSPRTKIYTELKHLQRLIHKRQEKFYIGHIRGHTGLPGPLAQGNAYADSLTRILTAGKRTADGSEFEKRTADGSEFESPKKKAKVE

SEQ ID NO: 3220 - protein, 2022 aa, synthetic construct
MPAAKRVKLDGGDKKYSIGLDIGTNSVGWAVITDEYKVPSKKFKVLGNTDRHSIKKNLIGALLFDSGETAEATRLKRTARRRYTRRKNRICYLQEIFSNEMAKVDDSFFHRLEESFLVEEDKKHERHPIFGNIVDEVAYHEKYPTIYHLRKKLVDSTDKADLRLIYLALAHMIKFRGHFLIEGDLNPDNSDVDKLFIQLVQTYNQLFEENPINASGVDAKAILSARLSKSRRLENLIAQLPGEKKNGLFGNLIALSLGLTPNFKSNFDLAEDAKLQLSKDTYDDDLDNLLAQIGDQYADLFLAAKNLSDAILLSDILRVNTEITKAPLSASMIKRYDEHHQDLTLLKALVRQQLPEKYKEIFFDQSKNGYAGYIDGGASQEEFYKFIKPILEKMDGTEELLVKLNREDLLRKQRTFDNGSIPHQIHLGELHAILRRQEDFYPFLKDNREKIEKILTFRIPYYVGPLARGNSRFAWMTRKSEETITPWNFEEVVDKGASAQSFIERMTNFDKNLPNEKVLPKHSLLYEYFTVYNELTKVKYVTEGMRKPAFLSGEQKKAIVDLLFKTNRKVTVKQLKEDYFKKIECFDSVEISGVEDRFNASLGTYHDLLKIIKDKDFLDNEENEDILEDIVLTLTLFEDREMIEERLKTYAHLFDDKVMKQLKRRRYTGWGRLSRKLINGIRDKQSGKTILDFLKSDGFANRNFMQLIHDDSLTFKEDIQKAQVSGQGDSLHEHIANLAGSPAIKKGILQTVKVVDELVKVMGRHKPENIVIEMARENQTTQKGQKNSRERMKRIEEGIKELGSQILKEHPVENTQLQNEKLYLYYLQNGRDMYVDQELDINRLSDYDVDHIVPQSFLKDDSIDNKVLTRSDKARGKSDNVPSEEVVKKMKNYWRQLLNAKLITQRKFDNLTKAERGGLSELDKAGFIKRQLVETRQITKHVAQILDSRMNTKYDENDKLIREVKVITLKSKLVSDFRKDFQFYKVREINNYHHAHDAYLNAVVGTALIKKYPKLESEFVYGDYKVYDVRKMIAKSEQEIGKATAKYFFYSNIMNFFKTEITLANGEIRKRPLIETNGETGEIVWDKGRDFATVRKVLSMPQVNIVKKTEVQTGGFSKESILPKRNSDKLIARKKDWDPKKYGGFDSPTVAYSVLVVAKVEKGKSKKLKSVKELLGITIMERSSFEKNPIDFLEAKGYKEVKKDLIIKLPKYSLFELENGRKRMLASAGELQKGNELALPSKYVNFLYLASHYEKLKGSPEDNEQKQLFVEQHKHYLDEIIEQISEFSKRVILADANLDKVLSAYNKHRDKPIREQAENIIHLFTLTNLGAPAAFKYFDTTIDRKRYTSTKEVLDATLIHQSITGLYETRIDLSQLGGDGGPAPGGGGGSGGGRDIMKDIKVRLMTDSPDDSQDLMIGAIESNLFADQISWKSDQPVWLNQWPLKQEKLQALQQLVTEQLQLGHLEESNSPWNTPVFVIKKKSGKWRLLQDLRAVNATMHDMGALQPGLPSPVAVPKGWEIIIIDLQDCFFNIKLHPEDCKRFAFSVPSPNFKRPYQRFQWKVLPQGMKNSPTLCQKFVDKAILTVRDKYQDSYIVHYMDDILLAHPSRSIVDEILTSMIQALNKHGLVVSTEKIQKYDNLKYLGTHIQGDSVSYQKLQIRTDKLRTLNDFQKLLGNINWIRPFLKLTTGELKPLFEILNGDSNPISTRKLTPEACKALQLMNERLSTARVKRLDLSQPWSLCILKTEYTPTACLWQDGVVEWIHLPHISPKVITPYDIFCTQLIIKGRHRSKELFSKDPDYIVVPYTKVQFDLLLQEKEDWPISLLGFLGEVHFHLPKDPLLTFTLQTAIIFPHMTSTTPLEKGIVIFTDGSANGRSVTYIQGREPIIKENTQNTAQQAEIVAVITAFEEVSQPFNLYTDSKYVTGLFPEIETATLSPRTKIYTELKHLQRLIHKRQEKFYIGHIRGHTGLPGPLAQGNAYADSLTRILTAGKRTADGSEFEKRTADGSEFESPKKKAKVE

SEQ ID NO: 3221 - protein, 2022 aa, synthetic construct
MPAAKRVKLDGGDKKYSIGLDIGTNSVGWAVITDEYKVPSKKFKVLGNTDRHSIKKNLIGALLFDSGETAEATRLKRTARRRYTRRKNRICYLQEIFSNEMAKVDDSFFHRLEESFLVEEDKKHERHPIFGNIVDEVAYHEKYPTIYHLRKKLVDSTDKADLRLIYLALAHMIKFRGHFLIEGDLNPDNSDVDKLFIQLVQTYNQLFEENPINASGVDAKAILSARLSKSRRLENLIAQLPGEKKNGLFGNLIALSLGLTPNFKSNFDLAEDAKLQLSKDTYDDDLDNLLAQIGDQYADLFLAAKNLSDAILLSDILRVNTEITKAPLSASMIKRYDEHHQDLTLLKALVRQQLPEKYKEIFFDQSKNGYAGYIDGGASQEEFYKFIKPILEKMDGTEELLVKLNREDLLRKQRTFDNGSIPHQIHLGELHAILRRQEDFYPFLKDNREKIEKILTFRIPYYVGPLARGNSRFAWMTRKSEETITPWNFEEVVDKGASAQSFIERMTNFDKNLPNEKVLPKHSLLYEYFTVYNELTKVKYVTEGMRKPAFLSGEQKKAIVDLLFKTNRKVTVKQLKEDYFKKIECFDSVEISGVEDRFNASLGTYHDLLKIIKDKDFLDNEENEDILEDIVLTLTLFEDREMIEERLKTYAHLFDDKVMKQLKRRRYTGWGRLSRKLINGIRDKQSGKTILDFLKSDGFANRNFMQLIHDDSLTFKEDIQKAQVSGQGDSLHEHIANLAGSPAIKKGILQTVKVVDELVKVMGRHKPENIVIEMARENQTTQKGQKNSRERMKRIEEGIKELGSQILKEHPVENTQLQNEKLYLYYLQNGRDMYVDQELDINRLSDYDVDHIVPQSFLKDDSIDNKVLTRSDKARGKSDNVPSEEVVKKMKNYWRQLLNAKLITQRKFDNLTKAERGGLSELDKAGFIKRQLVETRQITKHVAQILDSRMNTKYDENDKLIREVKVITLKSKLVSDFRKDFQFYKVREINNYHHAHDAYLNAVVGTALIKKYPKLESEFVYGDYKVYDVRKMIAKSEQEIGKATAKYFFYSNIMNFFKTEITLANGEIRKRPLIETNGETGEIVWDKGRDFATVRKVLSMPQVNIVKKTEVQTGGFSKESILPKRNSDKLIARKKDWDPKKYGGFDSPTVAYSVLVVAKVEKGKSKKLKSVKELLGITIMERSSFEKNPIDFLEAKGYKEVKKDLIIKLPKYSLFELENGRKRMLASAGELQKGNELALPSKYVNFLYLASHYEKLKGSPEDNEQKQLFVEQHKHYLDEIIEQISEFSKRVILADANLDKVLSAYNKHRDKPIREQAENIIHLFTLTNLGAPAAFKYFDTTIDRKRYTSTKEVLDATLIHQSITGLYETRIDLSQLGGDGGPAPAPAPAPGGGRDIMKDIKVRLMTDSPDDSQDLMIGAIESNLFADQISWKSDQPVWLNQWPLKQEKLQALQQLVTEQLQLGHLEESNSPWNTPVFVIKKKSGKWRLLQDLRAVNATMHDMGALQPGLPSPVAVPKGWEIIIIDLQDCFFNIKLHPEDCKRFAFSVPSPNFKRPYQRFQWKVLPQGMKNSPTLCQKFVDKAILTVRDKYQDSYIVHYMDDILLAHPSRSIVDEILTSMIQALNKHGLVVSTEKIQKYDNLKYLGTHIQGDSVSYQKLQIRTDKLRTLNDFQKLLGNINWIRPFLKLTTGELKPLFEILNGDSNPISTRKLTPEACKALQLMNERLSTARVKRLDLSQPWSLCILKTEYTPTACLWQDGVVEWIHLPHISPKVITPYDIFCTQLIIKGRHRSKELFSKDPDYIVVPYTKVQFDLLLQEKEDWPISLLGFLGEVHFHLPKDPLLTFTLQTAIIFPHMTSTTPLEKGIVIFTDGSANGRSVTYIQGREPIIKENTQNTAQQAEIVAVITAFEEVSQPFNLYTDSKYVTGLFPEIETATLSPRTKIYTELKHLQRLIHKRQEKFYIGHIRGHTGLPGPLAQGNAYADSLTRILTAGKRTADGSEFEKRTADGSEFESPKKKAKVE

SEQ ID NO: 3222 - protein, 2024 aa, synthetic construct
MPAAKRVKLDGGDKKYSIGLDIGTNSVGWAVITDEYKVPSKKFKVLGNTDRHSIKKNLIGALLFDSGETAEATRLKRTARRRYTRRKNRICYLQEIFSNEMAKVDDSFFHRLEESFLVEEDKKHERHPIFGNIVDEVAYHEKYPTIYHLRKKLVDSTDKADLRLIYLALAHMIKFRGHFLIEGDLNPDNSDVDKLFIQLVQTYNQLFEENPINASGVDAKAILSARLSKSRRLENLIAQLPGEKKNGLFGNLIALSLGLTPNFKSNFDLAEDAKLQLSKDTYDDDLDNLLAQIGDQYADLFLAAKNLSDAILLSDILRVNTEITKAPLSASMIKRYDEHHQDLTLLKALVRQQLPEKYKEIFFDQSKNGYAGYIDGGASQEEFYKFIKPILEKMDGTEELLVKLNREDLLRKQRTFDNGSIPHQIHLGELHAILRRQEDFYPFLKDNREKIEKILTFRIPYYVGPLARGNSRFAWMTRKSEETITPWNFEEVVDKGASAQSFIERMTNFDKNLPNEKVLPKHSLLYEYFTVYNELTKVKYVTEGMRKPAFLSGEQKKAIVDLLFKTNRKVTVKQLKEDYFKKIECFDSVEISGVEDRFNASLGTYHDLLKIIKDKDFLDNEENEDILEDIVLTLTLFEDREMIEERLKTYAHLFDDKVMKQLKRRRYTGWGRLSRKLINGIRDKQSGKTILDFLKSDGFANRNFMQLIHDDSLTFKEDIQKAQVSGQGDSLHEHIANLAGSPAIKKGILQTVKVVDELVKVMGRHKPENIVIEMARENQTTQKGQKNSRERMKRIEEGIKELGSQILKEHPVENTQLQNEKLYLYYLQNGRDMYVDQELDINRLSDYDVDHIVPQSFLKDDSIDNKVLTRSDKARGKSDNVPSEEVVKKMKNYWRQLLNAKLITQRKFDNLTKAERGGLSELDKAGFIKRQLVETRQITKHVAQILDSRMNTKYDENDKLIREVKVITLKSKLVSDFRKDFQFYKVREINNYHHAHDAYLNAVVGTALIKKYPKLESEFVYGDYKVYDVRKMIAKSEQEIGKATAKYFFYSNIMNFFKTEITLANGEIRKRPLIETNGETGEIVWDKGRDFATVRKVLSMPQVNIVKKTEVQTGGFSKESILPKRNSDKLIARKKDWDPKKYGGFDSPTVAYSVLVVAKVEKGKSKKLKSVKELLGITIMERSSFEKNPIDFLEAKGYKEVKKDLIIKLPKYSLFELENGRKRMLASAGELQKGNELALPSKYVNFLYLASHYEKLKGSPEDNEQKQLFVEQHKHYLDEIIEQISEFSKRVILADANLDKVLSAYNKHRDKPIREQAENIIHLFTLTNLGAPAAFKYFDTTIDRKRYTSTKEVLDATLIHQSITGLYETRIDLSQLGGDGGPAPEAAAKGGSGGGRDIMKDIKVRLMTDSPDDSQDLMIGAIESNLFADQISWKSDQPVWLNQWPLKQEKLQALQQLVTEQLQLGHLEESNSPWNTPVFVIKKKSGKWRLLQDLRAVNATMHDMGALQPGLPSPVAVPKGWEIIIIDLQDCFFNIKLHPEDCKRFAFSVPSPNFKRPYQRFQWKVLPQGMKNSPTLCQKFVDKAILTVRDKYQDSYIVHYMDDILLAHPSRSIVDEILTSMIQALNKHGLVVSTEKIQKYDNLKYLGTHIQGDSVSYQKLQIRTDKLRTLNDFQKLLGNINWIRPFLKLTTGELKPLFEILNGDSNPISTRKLTPEACKALQLMNERLSTARVKRLDLSQPWSLCILKTEYTPTACLWQDGVVEWIHLPHISPKVITPYDIFCTQLIIKGRHRSKELFSKDPDYIVVPYTKVQFDLLLQEKEDWPISLLGFLGEVHFHLPKDPLLTFTLQTAIIFPHMTSTTPLEKGIVIFTDGSANGRSVTYIQGREPIIKENTQNTAQQAEIVAVITAFEEVSQPFNLYTDSKYVTGLFPEIETATLSPRTKIYTELKHLQRLIHKRQEKFYIGHIRGHTGLPGPLAQGNAYADSLTRILTAGKRTADGSEFEKRTADGSEFESPKKKAKVE

SEQ ID NO: 3223 - protein, 2022 aa, synthetic construct
MPAAKRVKLDGGDKKYSIGLDIGTNSVGWAVITDEYKVPSKKFKVLGNTDRHSIKKNLIGALLFDSGETAEATRLKRTARRRYTRRKNRICYLQEIFSNEMAKVDDSFFHRLEESFLVEEDKKHERHPIFGNIVDEVAYHEKYPTIYHLRKKLVDSTDKADLRLIYLALAHMIKFRGHFLIEGDLNPDNSDVDKLFIQLVQTYNQLFEENPINASGVDAKAILSARLSKSRRLENLIAQLPGEKKNGLFGNLIALSLGLTPNFKSNFDLAEDAKLQLSKDTYDDDLDNLLAQIGDQYADLFLAAKNLSDAILLSDILRVNTEITKAPLSASMIKRYDEHHQDLTLLKALVRQQLPEKYKEIFFDQSKNGYAGYIDGGASQEEFYKFIKPILEKMDGTEELLVKLNREDLLRKQRTFDNGSIPHQIHLGELHAILRRQEDFYPFLKDNREKIEKILTFRIPYYVGPLARGNSRFAWMTRKSEETITPWNFEEVVDKGASAQSFIERMTNFDKNLPNEKVLPKHSLLYEYFTVYNELTKVKYVTEGMRKPAFLSGEQKKAIVDLLFKTNRKVTVKQLKEDYFKKIECFDSVEISGVEDRFNASLGTYHDLLKIIKDKDFLDNEENEDILEDIVLTLTLFEDREMIEERLKTYAHLFDDKVMKQLKRRRYTGWGRLSRKLINGIRDKQSGKTILDFLKSDGFANRNFMQLIHDDSLTFKEDIQKAQVSGQGDSLHEHIANLAGSPAIKKGILQTVKVVDELVKVMGRHKPENIVIEMARENQTTQKGQKNSRERMKRIEEGIKELGSQILKEHPVENTQLQNEKLYLYYLQNGRDMYVDQELDINRLSDYDVDHIVPQSFLKDDSIDNKVLTRSDKARGKSDNVPSEEVVKKMKNYWRQLLNAKLITQRKFDNLTKAERGGLSELDKAGFIKRQLVETRQITKHVAQILDSRMNTKYDENDKLIREVKVITLKSKLVSDFRKDFQFYKVREINNYHHAHDAYLNAVVGTALIKKYPKLESEFVYGDYKVYDVRKMIAKSEQEIGKATAKYFFYSNIMNFFKTEITLANGEIRKRPLIETNGETGEIVWDKGRDFATVRKVLSMPQVNIVKKTEVQTGGFSKESILPKRNSDKLIARKKDWDPKKYGGFDSPTVAYSVLVVAKVEKGKSKKLKSVKELLGITIMERSSFEKNPIDFLEAKGYKEVKKDLIIKLPKYSLFELENGRKRMLASAGELQKGNELALPSKYVNFLYLASHYEKLKGSPEDNEQKQLFVEQHKHYLDEIIEQISEFSKRVILADANLDKVLSAYNKHRDKPIREQAENIIHLFTLTNLGAPAAFKYFDTTIDRKRYTSTKEVLDATLIHQSITGLYETRIDLSQLGGDGGGGGPAPGSSGGGRDIMKDIKVRLMTDSPDDSQDLMIGAIESNLFADQISWKSDQPVWLNQWPLKQEKLQALQQLVTEQLQLGHLEESNSPWNTPVFVIKKKSGKWRLLQDLRAVNATMHDMGALQPGLPSPVAVPKGWEIIIIDLQDCFFNIKLHPEDCKRFAFSVPSPNFKRPYQRFQWKVLPQGMKNSPTLCQKFVDKAILTVRDKYQDSYIVHYMDDILLAHPSRSIVDEILTSMIQALNKHGLVVSTEKIQKYDNLKYLGTHIQGDSVSYQKLQIRTDKLRTLNDFQKLLGNINWIRPFLKLTTGELKPLFEILNGDSNPISTRKLTPEACKALQLMNERLSTARVKRLDLSQPWSLCILKTEYTPTACLWQDGVVEWIHLPHISPKVITPYDIFCTQLIIKGRHRSKELFSKDPDYIVVPYTKVQFDLLLQEKEDWPISLLGFLGEVHFHLPKDPLLTFTLQTAIIFPHMTSTTPLEKGIVIFTDGSANGRSVTYIQGREPIIKENTQNTAQQAEIVAVITAFEEVSQPFNLYTDSKYVTGLFPEIETATLSPRTKIYTELKHLQRLIHKRQEKFYIGHIRGHTGLPGPLAQGNAYADSLTRILTAGKRTADGSEFEKRTADGSEFESPKKKAKVE

SEQ ID NO: 3224 - protein, 2022 aa, synthetic construct
MPAAKRVKLDGGDKKYSIGLDIGTNSVGWAVITDEYKVPSKKFKVLGNTDRHSIKKNLIGALLFDSGETAEATRLKRTARRRYTRRKNRICYLQEIFSNEMAKVDDSFFHRLEESFLVEEDKKHERHPIFGNIVDEVAYHEKYPTIYHLRKKLVDSTDKADLRLIYLALAHMIKFRGHFLIEGDLNPDNSDVDKLFIQLVQTYNQLFEENPINASGVDAKAILSARLSKSRRLENLIAQLPGEKKNGLFGNLIALSLGLTPNFKSNFDLAEDAKLQLSKDTYDDDLDNLLAQIGDQYADLFLAAKNLSDAILLSDILRVNTEITKAPLSASMIKRYDEHHQDLTLLKALVRQQLPEKYKEIFFDQSKNGYAGYIDGGASQEEFYKFIKPILEKMDGTEELLVKLNREDLLRKQRTFDNGSIPHQIHLGELHAILRRQEDFYPFLKDNREKIEKILTFRIPYYVGPLARGNSRFAWMTRKSEETITPWNFEEVVDKGASAQSFIERMTNFDKNLPNEKVLPKHSLLYEYFTVYNELTKVKYVTEGMRKPAFLSGEQKKAIVDLLFKTNRKVTVKQLKEDYFKKIECFDSVEISGVEDRFNASLGTYHDLLKIIKDKDFLDNEENEDILEDIVLTLTLFEDREMIEERLKTYAHLFDDKVMKQLKRRRYTGWGRLSRKLINGIRDKQSGKTILDFLKSDGFANRNFMQLIHDDSLTFKEDIQKAQVSGQGDSLHEHIANLAGSPAIKKGILQTVKVVDELVKVMGRHKPENIVIEMARENQTTQKGQKNSRERMKRIEEGIKELGSQILKEHPVENTQLQNEKLYLYYLQNGRDMYVDQELDINRLSDYDVDHIVPQSFLKDDSIDNKVLTRSDKARGKSDNVPSEEVVKKMKNYWRQLLNAKLITQRKFDNLTKAERGGLSELDKAGFIKRQLVETRQITKHVAQILDSRMNTKYDENDKLIREVKVITLKSKLVSDFRKDFQFYKVREINNYHHAHDAYLNAVVGTALIKKYPKLESEFVYGDYKVYDVRKMIAKSEQEIGKATAKYFFYSNIMNFFKTEITLANGEIRKRPLIETNGETGEIVWDKGRDFATVRKVLSMPQVNIVKKTEVQTGGFSKESILPKRNSDKLIARKKDWDPKKYGGFDSPTVAYSVLVVAKVEKGKSKKLKSVKELLGITIMERSSFEKNPIDFLEAKGYKEVKKDLIIKLPKYSLFELENGRKRMLASAGELQKGNELALPSKYVNFLYLASHYEKLKGSPEDNEQKQLFVEQHKHYLDEIIEQISEFSKRVILADANLDKVLSAYNKHRDKPIREQAENIIHLFTLTNLGAPAAFKYFDTTIDRKRYTSTKEVLDATLIHQSITGLYETRIDLSQLGGDGGGGSPAPGGGGGGRDIMKDIKVRLMTDSPDDSQDLMIGAIESNLFADQISWKSDQPVWLNQWPLKQEKLQALQQLVTEQLQLGHLEESNSPWNTPVFVIKKKSGKWRLLQDLRAVNATMHDMGALQPGLPSPVAVPKGWEIIIIDLQDCFFNIKLHPEDCKRFAFSVPSPNFKRPYQRFQWKVLPQGMKNSPTLCQKFVDKAILTVRDKYQDSYIVHYMDDILLAHPSRSIVDEILTSMIQALNKHGLVVSTEKIQKYDNLKYLGTHIQGDSVSYQKLQIRTDKLRTLNDFQKLLGNINWIRPFLKLTTGELKPLFEILNGDSNPISTRKLTPEACKALQLMNERLSTARVKRLDLSQPWSLCILKTEYTPTACLWQDGVVEWIHLPHISPKVITPYDIFCTQLIIKGRHRSKELFSKDPDYIVVPYTKVQFDLLLQEKEDWPISLLGFLGEVHFHLPKDPLLTFTLQTAIIFPHMTSTTPLEKGIVIFTDGSANGRSVTYIQGREPIIKENTQNTAQQAEIVAVITAFEEVSQPFNLYTDSKYVTGLFPEIETATLSPRTKIYTELKHLQRLIHKRQEKFYIGHIRGHTGLPGPLAQGNAYADSLTRILTAGKRTADGSEFEKRTADGSEFESPKKKAKVE

SEQ ID NO: 3225 - protein, 2019 aa, synthetic construct
MPAAKRVKLDGGDKKYSIGLDIGTNSVGWAVITDEYKVPSKKFKVLGNTDRHSIKKNLIGALLFDSGETAEATRLKRTARRRYTRRKNRICYLQEIFSNEMAKVDDSFFHRLEESFLVEEDKKHERHPIFGNIVDEVAYHEKYPTIYHLRKKLVDSTDKADLRLIYLALAHMIKFRGHFLIEGDLNPDNSDVDKLFIQLVQTYNQLFEENPINASGVDAKAILSARLSKSRRLENLIAQLPGEKKNGLFGNLIALSLGLTPNFKSNFDLAEDAKLQLSKDTYDDDLDNLLAQIGDQYADLFLAAKNLSDAILLSDILRVNTEITKAPLSASMIKRYDEHHQDLTLLKALVRQQLPEKYKEIFFDQSKNGYAGYIDGGASQEEFYKFIKPILEKMDGTEELLVKLNREDLLRKQRTFDNGSIPHQIHLGELHAILRRQEDFYPFLKDNREKIEKILTFRIPYYVGPLARGNSRFAWMTRKSEETITPWNFEEVVDKGASAQSFIERMTNFDKNLPNEKVLPKHSLLYEYFTVYNELTKVKYVTEGMRKPAFLSGEQKKAIVDLLFKTNRKVTVKQLKEDYFKKIECFDSVEISGVEDRFNASLGTYHDLLKIIKDKDFLDNEENEDILEDIVLTLTLFEDREMIEERLKTYAHLFDDKVMKQLKRRRYTGWGRLSRKLINGIRDKQSGKTILDFLKSDGFANRNFMQLIHDDSLTFKEDIQKAQVSGQGDSLHEHIANLAGSPAIKKGILQTVKVVDELVKVMGRHKPENIVIEMARENQTTQKGQKNSRERMKRIEEGIKELGSQILKEHPVENTQLQNEKLYLYYLQNGRDMYVDQELDINRLSDYDVDHIVPQSFLKDDSIDNKVLTRSDKARGKSDNVPSEEVVKKMKNYWRQLLNAKLITQRKFDNLTKAERGGLSELDKAGFIKRQLVETRQITKHVAQILDSRMNTKYDENDKLIREVKVITLKSKLVSDFRKDFQFYKVREINNYHHAHDAYLNAVVGTALIKKYPKLESEFVYGDYKVYDVRKMIAKSEQEIGKATAKYFFYSNIMNFFKTEITLANGEIRKRPLIETNGETGEIVWDKGRDFATVRKVLSMPQVNIVKKTEVQTGGFSKESILPKRNSDKLIARKKDWDPKKYGGFDSPTVAYSVLVVAKVEKGKSKKLKSVKELLGITIMERSSFEKNPIDFLEAKGYKEVKKDLIIKLPKYSLFELENGRKRMLASAGELQKGNELALPSKYVNFLYLASHYEKLKGSPEDNEQKQLFVEQHKHYLDEIIEQISEFSKRVILADANLDKVLSAYNKHRDKPIREQAENIIHLFTLTNLGAPAAFKYFDTTIDRKRYTSTKEVLDATLIHQSITGLYETRIDLSQLGGDGGGGGGGSGGGRDIMKDIKVRLMTDSPDDSQDLMIGAIESNLFADQISWKSDQPVWLNQWPLKQEKLQALQQLVTEQLQLGHLEESNSPWNTPVFVIKKKSGKWRLLQDLRAVNATMHDMGALQPGLPSPVAVPKGWEIIIIDLQDCFFNIKLHPEDCKRFAFSVPSPNFKRPYQRFQWKVLPQGMKNSPTLCQKFVDKAILTVRDKYQDSYIVHYMDDILLAHPSRSIVDEILTSMIQALNKHGLVVSTEKIQKYDNLKYLGTHIQGDSVSYQKLQIRTDKLRTLNDFQKLLGNINWIRPFLKLTTGELKPLFEILNGDSNPISTRKLTPEACKALQLMNERLSTARVKRLDLSQPWSLCILKTEYTPTACLWQDGVVEWIHLPHISPKVITPYDIFCTQLIIKGRHRSKELFSKDPDYIVVPYTKVQFDLLLQEKEDWPISLLGFLGEVHFHLPKDPLLTFTLQTAIIFPHMTSTTPLEKGIVIFTDGSANGRSVTYIQGREPIIKENTQNTAQQAEIVAVITAFEEVSQPFNLYTDSKYVTGLFPEIETATLSPRTKIYTELKHLQRLIHKRQEKFYIGHIRGHTGLPGPLAQGNAYADSLTRILTAGKRTADGSEFEKRTADGSEFESPKKKAKVE

SEQ ID NO: 3226 - protein, 2024 aa, synthetic construct
MPAAKRVKLDGGDKKYSIGLDIGTNSVGWAVITDEYKVPSKKFKVLGNTDRHSIKKNLIGALLFDSGETAEATRLKRTARRRYTRRKNRICYLQEIFSNEMAKVDDSFFHRLEESFLVEEDKKHERHPIFGNIVDEVAYHEKYPTIYHLRKKLVDSTDKADLRLIYLALAHMIKFRGHFLIEGDLNPDNSDVDKLFIQLVQTYNQLFEENPINASGVDAKAILSARLSKSRRLENLIAQLPGEKKNGLFGNLIALSLGLTPNFKSNFDLAEDAKLQLSKDTYDDDLDNLLAQIGDQYADLFLAAKNLSDAILLSDILRVNTEITKAPLSASMIKRYDEHHQDLTLLKALVRQQLPEKYKEIFFDQSKNGYAGYIDGGASQEEFYKFIKPILEKMDGTEELLVKLNREDLLRKQRTFDNGSIPHQIHLGELHAILRRQEDFYPFLKDNREKIEKILTFRIPYYVGPLARGNSRFAWMTRKSEETITPWNFEEVVDKGASAQSFIERMTNFDKNLPNEKVLPKHSLLYEYFTVYNELTKVKYVTEGMRKPAFLSGEQKKAIVDLLFKTNRKVTVKQLKEDYFKKIECFDSVEISGVEDRFNASLGTYHDLLKIIKDKDFLDNEENEDILEDIVLTLTLFEDREMIEERLKTYAHLFDDKVMKQLKRRRYTGWGRLSRKLINGIRDKQSGKTILDFLKSDGFANRNFMQLIHDDSLTFKEDIQKAQVSGQGDSLHEHIANLAGSPAIKKGILQTVKVVDELVKVMGRHKPENIVIEMARENQTTQKGQKNSRERMKRIEEGIKELGSQILKEHPVENTQLQNEKLYLYYLQNGRDMYVDQELDINRLSDYDVDHIVPQSFLKDDSIDNKVLTRSDKARGKSDNVPSEEVVKKMKNYWRQLLNAKLITQRKFDNLTKAERGGLSELDKAGFIKRQLVETRQITKHVAQILDSRMNTKYDENDKLIREVKVITLKSKLVSDFRKDFQFYKVREINNYHHAHDAYLNAVVGTALIKKYPKLESEFVYGDYKVYDVRKMIAKSEQEIGKATAKYFFYSNIMNFFKTEITLANGEIRKRPLIETNGETGEIVWDKGRDFATVRKVLSMPQVNIVKKTEVQTGGFSKESILPKRNSDKLIARKKDWDPKKYGGFDSPTVAYSVLVVAKVEKGKSKKLKSVKELLGITIMERSSFEKNPIDFLEAKGYKEVKKDLIIKLPKYSLFELENGRKRMLASAGELQKGNELALPSKYVNFLYLASHYEKLKGSPEDNEQKQLFVEQHKHYLDEIIEQISEFSKRVILADANLDKVLSAYNKHRDKPIREQAENIIHLFTLTNLGAPAAFKYFDTTIDRKRYTSTKEVLDATLIHQSITGLYETRIDLSQLGGDGGEAAAKGGGGGSGGGRDIMKDIKVRLMTDSPDDSQDLMIGAIESNLFADQISWKSDQPVWLNQWPLKQEKLQALQQLVTEQLQLGHLEESNSPWNTPVFVIKKKSGKWRLLQDLRAVNATMHDMGALQPGLPSPVAVPKGWEIIIIDLQDCFFNIKLHPEDCKRFAFSVPSPNFKRPYQRFQWKVLPQGMKNSPTLCQKFVDKAILTVRDKYQDSYIVHYMDDILLAHPSRSIVDEILTSMIQALNKHGLVVSTEKIQKYDNLKYLGTHIQGDSVSYQKLQIRTDKLRTLNDFQKLLGNINWIRPFLKLTTGELKPLFEILNGDSNPISTRKLTPEACKALQLMNERLSTARVKRLDLSQPWSLCILKTEYTPTACLWQDGVVEWIHLPHISPKVITPYDIFCTQLIIKGRHRSKELFSKDPDYIVVPYTKVQFDLLLQEKEDWPISLLGFLGEVHFHLPKDPLLTFTLQTAIIFPHMTSTTPLEKGIVIFTDGSANGRSVTYIQGREPIIKENTQNTAQQAEIVAVITAFEEVSQPFNLYTDSKYVTGLFPEIETATLSPRTKIYTELKHLQRLIHKRQEKFYIGHIRGHTGLPGPLAQGNAYADSLTRILTAGKRTADGSEFEKRTADGSEFESPKKKAKVE

SEQ ID NO: 3227 - protein, 2019 aa, synthetic construct
MPAAKRVKLDGGDKKYSIGLDIGTNSVGWAVITDEYKVPSKKFKVLGNTDRHSIKKNLIGALLFDSGETAEATRLKRTARRRYTRRKNRICYLQEIFSNEMAKVDDSFFHRLEESFLVEEDKKHERHPIFGNIVDEVAYHEKYPTIYHLRKKLVDSTDKADLRLIYLALAHMIKFRGHFLIEGDLNPDNSDVDKLFIQLVQTYNQLFEENPINASGVDAKAILSARLSKSRRLENLIAQLPGEKKNGLFGNLIALSLGLTPNFKSNFDLAEDAKLQLSKDTYDDDLDNLLAQIGDQYADLFLAAKNLSDAILLSDILRVNTEITKAPLSASMIKRYDEHHQDLTLLKALVRQQLPEKYKEIFFDQSKNGYAGYIDGGASQEEFYKFIKPILEKMDGTEELLVKLNREDLLRKQRTFDNGSIPHQIHLGELHAILRRQEDFYPFLKDNREKIEKILTFRIPYYVGPLARGNSRFAWMTRKSEETITPWNFEEVVDKGASAQSFIERMTNFDKNLPNEKVLPKHSLLYEYFTVYNELTKVKYVTEGMRKPAFLSGEQKKAIVDLLFKTNRKVTVKQLKEDYFKKIECFDSVEISGVEDRFNASLGTYHDLLKIIKDKDFLDNEENEDILEDIVLTLTLFEDREMIEERLKTYAHLFDDKVMKQLKRRRYTGWGRLSRKLINGIRDKQSGKTILDFLKSDGFANRNFMQLIHDDSLTFKEDIQKAQVSGQGDSLHEHIANLAGSPAIKKGILQTVKVVDELVKVMGRHKPENIVIEMARENQTTQKGQKNSRERMKRIEEGIKELGSQILKEHPVENTQLQNEKLYLYYLQNGRDMYVDQELDINRLSDYDVDHIVPQSFLKDDSIDNKVLTRSDKARGKSDNVPSEEVVKKMKNYWRQLLNAKLITQRKFDNLTKAERGGLSELDKAGFIKRQLVETRQITKHVAQILDSRMNTKYDENDKLIREVKVITLKSKLVSDFRKDFQFYKVREINNYHHAHDAYLNAVVGTALIKKYPKLESEFVYGDYKVYDVRKMIAKSEQEIGKATAKYFFYSNIMNFFKTEITLANGEIRKRPLIETNGETGEIVWDKGRDFATVRKVLSMPQVNIVKKTEVQTGGFSKESILPKRNSDKLIARKKDWDPKKYGGFDSPTVAYSVLVVAKVEKGKSKKLKSVKELLGITIMERSSFEKNPIDFLEAKGYKEVKKDLIIKLPKYSLFELENGRKRMLASAGELQKGNELALPSKYVNFLYLASHYEKLKGSPEDNEQKQLFVEQHKHYLDEIIEQISEFSKRVILADANLDKVLSAYNKHRDKPIREQAENIIHLFTLTNLGAPAAFKYFDTTIDRKRYTSTKEVLDATLIHQSITGLYETRIDLSQLGGDGGGGSPAPGGGRDIMKDIKVRLMTDSPDDSQDLMIGAIESNLFADQISWKSDQPVWLNQWPLKQEKLQALQQLVTEQLQLGHLEESNSPWNTPVFVIKKKSGKWRLLQDLRAVNATMHDMGALQPGLPSPVAVPKGWEIIIIDLQDCFFNIKLHPEDCKRFAFSVPSPNFKRPYQRFQWKVLPQGMKNSPTLCQKFVDKAILTVRDKYQDSYIVHYMDDILLAHPSRSIVDEILTSMIQALNKHGLVVSTEKIQKYDNLKYLGTHIQGDSVSYQKLQIRTDKLRTLNDFQKLLGNINWIRPFLKLTTGELKPLFEILNGDSNPISTRKLTPEACKALQLMNERLSTARVKRLDLSQPWSLCILKTEYTPTACLWQDGVVEWIHLPHISPKVITPYDIFCTQLIIKGRHRSKELFSKDPDYIVVPYTKVQFDLLLQEKEDWPISLLGFLGEVHFHLPKDPLLTFTLQTAIIFPHMTSTTPLEKGIVIFTDGSANGRSVTYIQGREPIIKENTQNTAQQAEIVAVITAFEEVSQPFNLYTDSKYVTGLFPEIETATLSPRTKIYTELKHLQRLIHKRQEKFYIGHIRGHTGLPGPLAQGNAYADSLTRILTAGKRTADGSEFEKRTADGSEFESPKKKAKVE

SEQ ID NO: 3228 - protein, 2024 aa, synthetic construct
MPAAKRVKLDGGDKKYSIGLDIGTNSVGWAVITDEYKVPSKKFKVLGNTDRHSIKKNLIGALLFDSGETAEATRLKRTARRRYTRRKNRICYLQEIFSNEMAKVDDSFFHRLEESFLVEEDKKHERHPIFGNIVDEVAYHEKYPTIYHLRKKLVDSTDKADLRLIYLALAHMIKFRGHFLIEGDLNPDNSDVDKLFIQLVQTYNQLFEENPINASGVDAKAILSARLSKSRRLENLIAQLPGEKKNGLFGNLIALSLGLTPNFKSNFDLAEDAKLQLSKDTYDDDLDNLLAQIGDQYADLFLAAKNLSDAILLSDILRVNTEITKAPLSASMIKRYDEHHQDLTLLKALVRQQLPEKYKEIFFDQSKNGYAGYIDGGASQEEFYKFIKPILEKMDGTEELLVKLNREDLLRKQRTFDNGSIPHQIHLGELHAILRRQEDFYPFLKDNREKIEKILTFRIPYYVGPLARGNSRFAWMTRKSEETITPWNFEEVVDKGASAQSFIERMTNFDKNLPNEKVLPKHSLLYEYFTVYNELTKVKYVTEGMRKPAFLSGEQKKAIVDLLFKTNRKVTVKQLKEDYFKKIECFDSVEISGVEDRFNASLGTYHDLLKIIKDKDFLDNEENEDILEDIVLTLTLFEDREMIEERLKTYAHLFDDKVMKQLKRRRYTGWGRLSRKLINGIRDKQSGKTILDFLKSDGFANRNFMQLIHDDSLTFKEDIQKAQVSGQGDSLHEHIANLAGSPAIKKGILQTVKVVDELVKVMGRHKPENIVIEMARENQTTQKGQKNSRERMKRIEEGIKELGSQILKEHPVENTQLQNEKLYLYYLQNGRDMYVDQELDINRLSDYDVDHIVPQSFLKDDSIDNKVLTRSDKARGKSDNVPSEEVVKKMKNYWRQLLNAKLITQRKFDNLTKAERGGLSELDKAGFIKRQLVETRQITKHVAQILDSRMNTKYDENDKLIREVKVITLKSKLVSDFRKDFQFYKVREINNYHHAHDAYLNAVVGTALIKKYPKLESEFVYGDYKVYDVRKMIAKSEQEIGKATAKYFFYSNIMNFFKTEITLANGEIRKRPLIETNGETGEIVWDKGRDFATVRKVLSMPQVNIVKKTEVQTGGFSKESILPKRNSDKLIARKKDWDPKKYGGFDSPTVAYSVLVVAKVEKGKSKKLKSVKELLGITIMERSSFEKNPIDFLEAKGYKEVKKDLIIKLPKYSLFELENGRKRMLASAGELQKGNELALPSKYVNFLYLASHYEKLKGSPEDNEQKQLFVEQHKHYLDEIIEQISEFSKRVILADANLDKVLSAYNKHRDKPIREQAENIIHLFTLTNLGAPAAFKYFDTTIDRKRYTSTKEVLDATLIHQSITGLYETRIDLSQLGGDGGEAAAKGGSGGGGGGRDIMKDIKVRLMTDSPDDSQDLMIGAIESNLFADQISWKSDQPVWLNQWPLKQEKLQALQQLVTEQLQLGHLEESNSPWNTPVFVIKKKSGKWRLLQDLRAVNATMHDMGALQPGLPSPVAVPKGWEIIIIDLQDCFFNIKLHPEDCKRFAFSVPSPNFKRPYQRFQWKVLPQGMKNSPTLCQKFVDKAILTVRDKYQDSYIVHYMDDILLAHPSRSIVDEILTSMIQALNKHGLVVSTEKIQKYDNLKYLGTHIQGDSVSYQKLQIRTDKLRTLNDFQKLLGNINWIRPFLKLTTGELKPLFEILNGDSNPISTRKLTPEACKALQLMNERLSTARVKRLDLSQPWSLCILKTEYTPTACLWQDGVVEWIHLPHISPKVITPYDIFCTQLIIKGRHRSKELFSKDPDYIVVPYTKVQFDLLLQEKEDWPISLLGFLGEVHFHLPKDPLLTFTLQTAIIFPHMTSTTPLEKGIVIFTDGSANGRSVTYIQGREPIIKENTQNTAQQAEIVAVITAFEEVSQPFNLYTDSKYVTGLFPEIETATLSPRTKIYTELKHLQRLIHKRQEKFYIGHIRGHTGLPGPLAQGNAYADSLTRILTAGKRTADGSEFEKRTADGSEFESPKKKAKVE

SEQ ID NO: 3229 - protein, 2022 aa, synthetic construct
MPAAKRVKLDGGDKKYSIGLDIGTNSVGWAVITDEYKVPSKKFKVLGNTDRHSIKKNLIGALLFDSGETAEATRLKRTARRRYTRRKNRICYLQEIFSNEMAKVDDSFFHRLEESFLVEEDKKHERHPIFGNIVDEVAYHEKYPTIYHLRKKLVDSTDKADLRLIYLALAHMIKFRGHFLIEGDLNPDNSDVDKLFIQLVQTYNQLFEENPINASGVDAKAILSARLSKSRRLENLIAQLPGEKKNGLFGNLIALSLGLTPNFKSNFDLAEDAKLQLSKDTYDDDLDNLLAQIGDQYADLFLAAKNLSDAILLSDILRVNTEITKAPLSASMIKRYDEHHQDLTLLKALVRQQLPEKYKEIFFDQSKNGYAGYIDGGASQEEFYKFIKPILEKMDGTEELLVKLNREDLLRKQRTFDNGSIPHQIHLGELHAILRRQEDFYPFLKDNREKIEKILTFRIPYYVGPLARGNSRFAWMTRKSEETITPWNFEEVVDKGASAQSFIERMTNFDKNLPNEKVLPKHSLLYEYFTVYNELTKVKYVTEGMRKPAFLSGEQKKAIVDLLFKTNRKVTVKQLKEDYFKKIECFDSVEISGVEDRFNASLGTYHDLLKIIKDKDFLDNEENEDILEDIVLTLTLFEDREMIEERLKTYAHLFDDKVMKQLKRRRYTGWGRLSRKLINGIRDKQSGKTILDFLKSDGFANRNFMQLIHDDSLTFKEDIQKAQVSGQGDSLHEHIANLAGSPAIKKGILQTVKVVDELVKVMGRHKPENIVIEMARENQTTQKGQKNSRERMKRIEEGIKELGSQILKEHPVENTQLQNEKLYLYYLQNGRDMYVDQELDINRLSDYDVDHIVPQSFLKDDSIDNKVLTRSDKARGKSDNVPSEEVVKKMKNYWRQLLNAKLITQRKFDNLTKAERGGLSELDKAGFIKRQLVETRQITKHVAQILDSRMNTKYDENDKLIREVKVITLKSKLVSDFRKDFQFYKVREINNYHHAHDAYLNAVVGTALIKKYPKLESEFVYGDYKVYDVRKMIAKSEQEIGKATAKYFFYSNIMNFFKTEITLANGEIRKRPLIETNGETGEIVWDKGRDFATVRKVLSMPQVNIVKKTEVQTGGFSKESILPKRNSDKLIARKKDWDPKKYGGFDSPTVAYSVLVVAKVEKGKSKKLKSVKELLGITIMERSSFEKNPIDFLEAKGYKEVKKDLIIKLPKYSLFELENGRKRMLASAGELQKGNELALPSKYVNFLYLASHYEKLKGSPEDNEQKQLFVEQHKHYLDEIIEQISEFSKRVILADANLDKVLSAYNKHRDKPIREQAENIIHLFTLTNLGAPAAFKYFDTTIDRKRYTSTKEVLDATLIHQSITGLYETRIDLSQLGGDGGGGSPAPGSSGGGRDIMKDIKVRLMTDSPDDSQDLMIGAIESNLFADQISWKSDQPVWLNQWPLKQEKLQALQQLVTEQLQLGHLEESNSPWNTPVFVIKKKSGKWRLLQDLRAVNATMHDMGALQPGLPSPVAVPKGWEIIIIDLQDCFFNIKLHPEDCKRFAFSVPSPNFKRPYQRFQWKVLPQGMKNSPTLCQKFVDKAILTVRDKYQDSYIVHYMDDILLAHPSRSIVDEILTSMIQALNKHGLVVSTEKIQKYDNLKYLGTHIQGDSVSYQKLQIRTDKLRTLNDFQKLLGNINWIRPFLKLTTGELKPLFEILNGDSNPISTRKLTPEACKALQLMNERLSTARVKRLDLSQPWSLCILKTEYTPTACLWQDGVVEWIHLPHISPKVITPYDIFCTQLIIKGRHRSKELFSKDPDYIVVPYTKVQFDLLLQEKEDWPISLLGFLGEVHFHLPKDPLLTFTLQTAIIFPHMTSTTPLEKGIVIFTDGSANGRSVTYIQGREPIIKENTQNTAQQAEIVAVITAFEEVSQPFNLYTDSKYVTGLFPEIETATLSPRTKIYTELKHLQRLIHKRQEKFYIGHIRGHTGLPGPLAQGNAYADSLTRILTAGKRTADGSEFEKRTADGSEFESPKKKAKVE

SEQ ID NO: 3230 - protein, 2024 aa, synthetic construct
MPAAKRVKLDGGDKKYSIGLDIGTNSVGWAVITDEYKVPSKKFKVLGNTDRHSIKKNLIGALLFDSGETAEATRLKRTARRRYTRRKNRICYLQEIFSNEMAKVDDSFFHRLEESFLVEEDKKHERHPIFGNIVDEVAYHEKYPTIYHLRKKLVDSTDKADLRLIYLALAHMIKFRGHFLIEGDLNPDNSDVDKLFIQLVQTYNQLFEENPINASGVDAKAILSARLSKSRRLENLIAQLPGEKKNGLFGNLIALSLGLTPNFKSNFDLAEDAKLQLSKDTYDDDLDNLLAQIGDQYADLFLAAKNLSDAILLSDILRVNTEITKAPLSASMIKRYDEHHQDLTLLKALVRQQLPEKYKEIFFDQSKNGYAGYIDGGASQEEFYKFIKPILEKMDGTEELLVKLNREDLLRKQRTFDNGSIPHQIHLGELHAILRRQEDFYPFLKDNREKIEKILTFRIPYYVGPLARGNSRFAWMTRKSEETITPWNFEEVVDKGASAQSFIERMTNFDKNLPNEKVLPKHSLLYEYFTVYNELTKVKYVTEGMRKPAFLSGEQKKAIVDLLFKTNRKVTVKQLKEDYFKKIECFDSVEISGVEDRFNASLGTYHDLLKIIKDKDFLDNEENEDILEDIVLTLTLFEDREMIEERLKTYAHLFDDKVMKQLKRRRYTGWGRLSRKLINGIRDKQSGKTILDFLKSDGFANRNFMQLIHDDSLTFKEDIQKAQVSGQGDSLHEHIANLAGSPAIKKGILQTVKVVDELVKVMGRHKPENIVIEMARENQTTQKGQKNSRERMKRIEEGIKELGSQILKEHPVENTQLQNEKLYLYYLQNGRDMYVDQELDINRLSDYDVDHIVPQSFLKDDSIDNKVLTRSDKARGKSDNVPSEEVVKKMKNYWRQLLNAKLITQRKFDNLTKAERGGLSELDKAGFIKRQLVETRQITKHVAQILDSRMNTKYDENDKLIREVKVITLKSKLVSDFRKDFQFYKVREINNYHHAHDAYLNAVVGTALIKKYPKLESEFVYGDYKVYDVRKMIAKSEQEIGKATAKYFFYSNIMNFFKTEITLANGEIRKRPLIETNGETGEIVWDKGRDFATVRKVLSMPQVNIVKKTEVQTGGFSKESILPKRNSDKLIARKKDWDPKKYGGFDSPTVAYSVLVVAKVEKGKSKKLKSVKELLGITIMERSSFEKNPIDFLEAKGYKEVKKDLIIKLPKYSLFELENGRKRMLASAGELQKGNELALPSKYVNFLYLASHYEKLKGSPEDNEQKQLFVEQHKHYLDEIIEQISEFSKRVILADANLDKVLSAYNKHRDKPIREQAENIIHLFTLTNLGAPAAFKYFDTTIDRKRYTSTKEVLDATLIHQSITGLYETRIDLSQLGGDGGEAAAKGGSGSSGGGRDIMKDIKVRLMTDSPDDSQDLMIGAIESNLFADQISWKSDQPVWLNQWPLKQEKLQALQQLVTEQLQLGHLEESNSPWNTPVFVIKKKSGKWRLLQDLRAVNATMHDMGALQPGLPSPVAVPKGWEIIIIDLQDCFFNIKLHPEDCKRFAFSVPSPNFKRPYQRFQWKVLPQGMKNSPTLCQKFVDKAILTVRDKYQDSYIVHYMDDILLAHPSRSIVDEILTSMIQALNKHGLVVSTEKIQKYDNLKYLGTHIQGDSVSYQKLQIRTDKLRTLNDFQKLLGNINWIRPFLKLTTGELKPLFEILNGDSNPISTRKLTPEACKALQLMNERLSTARVKRLDLSQPWSLCILKTEYTPTACLWQDGVVEWIHLPHISPKVITPYDIFCTQLIIKGRHRSKELFSKDPDYIVVPYTKVQFDLLLQEKEDWPISLLGFLGEVHFHLPKDPLLTFTLQTAIIFPHMTSTTPLEKGIVIFTDGSANGRSVTYIQGREPIIKENTQNTAQQAEIVAVITAFEEVSQPFNLYTDSKYVTGLFPEIETATLSPRTKIYTELKHLQRLIHKRQEKFYIGHIRGHTGLPGPLAQGNAYADSLTRILTAGKRTADGSEFEKRTADGSEFESPKKKAKVE

SEQ ID NO: 3231 - protein, 2022 aa, synthetic construct
MPAAKRVKLDGGDKKYSIGLDIGTNSVGWAVITDEYKVPSKKFKVLGNTDRHSIKKNLIGALLFDSGETAEATRLKRTARRRYTRRKNRICYLQEIFSNEMAKVDDSFFHRLEESFLVEEDKKHERHPIFGNIVDEVAYHEKYPTIYHLRKKLVDSTDKADLRLIYLALAHMIKFRGHFLIEGDLNPDNSDVDKLFIQLVQTYNQLFEENPINASGVDAKAILSARLSKSRRLENLIAQLPGEKKNGLFGNLIALSLGLTPNFKSNFDLAEDAKLQLSKDTYDDDLDNLLAQIGDQYADLFLAAKNLSDAILLSDILRVNTEITKAPLSASMIKRYDEHHQDLTLLKALVRQQLPEKYKEIFFDQSKNGYAGYIDGGASQEEFYKFIKPILEKMDGTEELLVKLNREDLLRKQRTFDNGSIPHQIHLGELHAILRRQEDFYPFLKDNREKIEKILTFRIPYYVGPLARGNSRFAWMTRKSEETITPWNFEEVVDKGASAQSFIERMTNFDKNLPNEKVLPKHSLLYEYFTVYNELTKVKYVTEGMRKPAFLSGEQKKAIVDLLFKTNRKVTVKQLKEDYFKKIECFDSVEISGVEDRFNASLGTYHDLLKIIKDKDFLDNEENEDILEDIVLTLTLFEDREMIEERLKTYAHLFDDKVMKQLKRRRYTGWGRLSRKLINGIRDKQSGKTILDFLKSDGFANRNFMQLIHDDSLTFKEDIQKAQVSGQGDSLHEHIANLAGSPAIKKGILQTVKVVDELVKVMGRHKPENIVIEMARENQTTQKGQKNSRERMKRIEEGIKELGSQILKEHPVENTQLQNEKLYLYYLQNGRDMYVDQELDINRLSDYDVDHIVPQSFLKDDSIDNKVLTRSDKARGKSDNVPSEEVVKKMKNYWRQLLNAKLITQRKFDNLTKAERGGLSELDKAGFIKRQLVETRQITKHVAQILDSRMNTKYDENDKLIREVKVITLKSKLVSDFRKDFQFYKVREINNYHHAHDAYLNAVVGTALIKKYPKLESEFVYGDYKVYDVRKMIAKSEQEIGKATAKYFFYSNIMNFFKTEITLANGEIRKRPLIETNGETGEIVWDKGRDFATVRKVLSMPQVNIVKKTEVQTGGFSKESILPKRNSDKLIARKKDWDPKKYGGFDSPTVAYSVLVVAKVEKGKSKKLKSVKELLGITIMERSSFEKNPIDFLEAKGYKEVKKDLIIKLPKYSLFELENGRKRMLASAGELQKGNELALPSKYVNFLYLASHYEKLKGSPEDNEQKQLFVEQHKHYLDEIIEQISEFSKRVILADANLDKVLSAYNKHRDKPIREQAENIIHLFTLTNLGAPAAFKYFDTTIDRKRYTSTKEVLDATLIHQSITGLYETRIDLSQLGGDGGGGGGSSPAPGGGRDIMKDIKVRLMTDSPDDSQDLMIGAIESNLFADQISWKSDQPVWLNQWPLKQEKLQALQQLVTEQLQLGHLEESNSPWNTPVFVIKKKSGKWRLLQDLRAVNATMHDMGALQPGLPSPVAVPKGWEIIIIDLQDCFFNIKLHPEDCKRFAFSVPSPNFKRPYQRFQWKVLPQGMKNSPTLCQKFVDKAILTVRDKYQDSYIVHYMDDILLAHPSRSIVDEILTSMIQALNKHGLVVSTEKIQKYDNLKYLGTHIQGDSVSYQKLQIRTDKLRTLNDFQKLLGNINWIRPFLKLTTGELKPLFEILNGDSNPISTRKLTPEACKALQLMNERLSTARVKRLDLSQPWSLCILKTEYTPTACLWQDGVVEWIHLPHISPKVITPYDIFCTQLIIKGRHRSKELFSKDPDYIVVPYTKVQFDLLLQEKEDWPISLLGFLGEVHFHLPKDPLLTFTLQTAIIFPHMTSTTPLEKGIVIFTDGSANGRSVTYIQGREPIIKENTQNTAQQAEIVAVITAFEEVSQPFNLYTDSKYVTGLFPEIETATLSPRTKIYTELKHLQRLIHKRQEKFYIGHIRGHTGLPGPLAQGNAYADSLTRILTAGKRTADGSEFEKRTADGSEFESPKKKAKVE

SEQ ID NO: 3232 - protein, 2024 aa, synthetic construct
MPAAKRVKLDGGDKKYSIGLDIGTNSVGWAVITDEYKVPSKKFKVLGNTDRHSIKKNLIGALLFDSGETAEATRLKRTARRRYTRRKNRICYLQEIFSNEMAKVDDSFFHRLEESFLVEEDKKHERHPIFGNIVDEVAYHEKYPTIYHLRKKLVDSTDKADLRLIYLALAHMIKFRGHFLIEGDLNPDNSDVDKLFIQLVQTYNQLFEENPINASGVDAKAILSARLSKSRRLENLIAQLPGEKKNGLFGNLIALSLGLTPNFKSNFDLAEDAKLQLSKDTYDDDLDNLLAQIGDQYADLFLAAKNLSDAILLSDILRVNTEITKAPLSASMIKRYDEHHQDLTLLKALVRQQLPEKYKEIFFDQSKNGYAGYIDGGASQEEFYKFIKPILEKMDGTEELLVKLNREDLLRKQRTFDNGSIPHQIHLGELHAILRRQEDFYPFLKDNREKIEKILTFRIPYYVGPLARGNSRFAWMTRKSEETITPWNFEEVVDKGASAQSFIERMTNFDKNLPNEKVLPKHSLLYEYFTVYNELTKVKYVTEGMRKPAFLSGEQKKAIVDLLFKTNRKVTVKQLKEDYFKKIECFDSVEISGVEDRFNASLGTYHDLLKIIKDKDFLDNEENEDILEDIVLTLTLFEDREMIEERLKTYAHLFDDKVMKQLKRRRYTGWGRLSRKLINGIRDKQSGKTILDFLKSDGFANRNFMQLIHDDSLTFKEDIQKAQVSGQGDSLHEHIANLAGSPAIKKGILQTVKVVDELVKVMGRHKPENIVIEMARENQTTQKGQKNSRERMKRIEEGIKELGSQILKEHPVENTQLQNEKLYLYYLQNGRDMYVDQELDINRLSDYDVDHIVPQSFLKDDSIDNKVLTRSDKARGKSDNVPSEEVVKKMKNYWRQLLNAKLITQRKFDNLTKAERGGLSELDKAGFIKRQLVETRQITKHVAQILDSRMNTKYDENDKLIREVKVITLKSKLVSDFRKDFQFYKVREINNYHHAHDAYLNAVVGTALIKKYPKLESEFVYGDYKVYDVRKMIAKSEQEIGKATAKYFFYSNIMNFFKTEITLANGEIRKRPLIETNGETGEIVWDKGRDFATVRKVLSMPQVNIVKKTEVQTGGFSKESILPKRNSDKLIARKKDWDPKKYGGFDSPTVAYSVLVVAKVEKGKSKKLKSVKELLGITIMERSSFEKNPIDFLEAKGYKEVKKDLIIKLPKYSLFELENGRKRMLASAGELQKGNELALPSKYVNFLYLASHYEKLKGSPEDNEQKQLFVEQHKHYLDEIIEQISEFSKRVILADANLDKVLSAYNKHRDKPIREQAENIIHLFTLTNLGAPAAFKYFDTTIDRKRYTSTKEVLDATLIHQSITGLYETRIDLSQLGGDGGGSSPAPEAAAKGGGRDIMKDIKVRLMTDSPDDSQDLMIGAIESNLFADQISWKSDQPVWLNQWPLKQEKLQALQQLVTEQLQLGHLEESNSPWNTPVFVIKKKSGKWRLLQDLRAVNATMHDMGALQPGLPSPVAVPKGWEIIIIDLQDCFFNIKLHPEDCKRFAFSVPSPNFKRPYQRFQWKVLPQGMKNSPTLCQKFVDKAILTVRDKYQDSYIVHYMDDILLAHPSRSIVDEILTSMIQALNKHGLVVSTEKIQKYDNLKYLGTHIQGDSVSYQKLQIRTDKLRTLNDFQKLLGNINWIRPFLKLTTGELKPLFEILNGDSNPISTRKLTPEACKALQLMNERLSTARVKRLDLSQPWSLCILKTEYTPTACLWQDGVVEWIHLPHISPKVITPYDIFCTQLIIKGRHRSKELFSKDPDYIVVPYTKVQFDLLLQEKEDWPISLLGFLGEVHFHLPKDPLLTFTLQTAIIFPHMTSTTPLEKGIVIFTDGSANGRSVTYIQGREPIIKENTQNTAQQAEIVAVITAFEEVSQPFNLYTDSKYVTGLFPEIETATLSPRTKIYTELKHLQRLIHKRQEKFYIGHIRGHTGLPGPLAQGNAYADSLTRILTAGKRTADGSEFEKRTADGSEFESPKKKAKVE

SEQ ID NO: 3233 - protein, 2022 aa, synthetic construct
MPAAKRVKLDGGDKKYSIGLDIGTNSVGWAVITDEYKVPSKKFKVLGNTDRHSIKKNLIGALLFDSGETAEATRLKRTARRRYTRRKNRICYLQEIFSNEMAKVDDSFFHRLEESFLVEEDKKHERHPIFGNIVDEVAYHEKYPTIYHLRKKLVDSTDKADLRLIYLALAHMIKFRGHFLIEGDLNPDNSDVDKLFIQLVQTYNQLFEENPINASGVDAKAILSARLSKSRRLENLIAQLPGEKKNGLFGNLIALSLGLTPNFKSNFDLAEDAKLQLSKDTYDDDLDNLLAQIGDQYADLFLAAKNLSDAILLSDILRVNTEITKAPLSASMIKRYDEHHQDLTLLKALVRQQLPEKYKEIFFDQSKNGYAGYIDGGASQEEFYKFIKPILEKMDGTEELLVKLNREDLLRKQRTFDNGSIPHQIHLGELHAILRRQEDFYPFLKDNREKIEKILTFRIPYYVGPLARGNSRFAWMTRKSEETITPWNFEEVVDKGASAQSFIERMTNFDKNLPNEKVLPKHSLLYEYFTVYNELTKVKYVTEGMRKPAFLSGEQKKAIVDLLFKTNRKVTVKQLKEDYFKKIECFDSVEISGVEDRFNASLGTYHDLLKIIKDKDFLDNEENEDILEDIVLTLTLFEDREMIEERLKTYAHLFDDKVMKQLKRRRYTGWGRLSRKLINGIRDKQSGKTILDFLKSDGFANRNFMQLIHDDSLTFKEDIQKAQVSGQGDSLHEHIANLAGSPAIKKGILQTVKVVDELVKVMGRHKPENIVIEMARENQTTQKGQKNSRERMKRIEEGIKELGSQILKEHPVENTQLQNEKLYLYYLQNGRDMYVDQELDINRLSDYDVDHIVPQSFLKDDSIDNKVLTRSDKARGKSDNVPSEEVVKKMKNYWRQLLNAKLITQRKFDNLTKAERGGLSELDKAGFIKRQLVETRQITKHVAQILDSRMNTKYDENDKLIREVKVITLKSKLVSDFRKDFQFYKVREINNYHHAHDAYLNAVVGTALIKKYPKLESEFVYGDYKVYDVRKMIAKSEQEIGKATAKYFFYSNIMNFFKTEITLANGEIRKRPLIETNGETGEIVWDKGRDFATVRKVLSMPQVNIVKKTEVQTGGFSKESILPKRNSDKLIARKKDWDPKKYGGFDSPTVAYSVLVVAKVEKGKSKKLKSVKELLGITIMERSSFEKNPIDFLEAKGYKEVKKDLIIKLPKYSLFELENGRKRMLASAGELQKGNELALPSKYVNFLYLASHYEKLKGSPEDNEQKQLFVEQHKHYLDEIIEQISEFSKRVILADANLDKVLSAYNKHRDKPIREQAENIIHLFTLTNLGAPAAFKYFDTTIDRKRYTSTKEVLDATLIHQSITGLYETRIDLSQLGGDGGPAPGGGGSSGGGRDIMKDIKVRLMTDSPDDSQDLMIGAIESNLFADQISWKSDQPVWLNQWPLKQEKLQALQQLVTEQLQLGHLEESNSPWNTPVFVIKKKSGKWRLLQDLRAVNATMHDMGALQPGLPSPVAVPKGWEIIIIDLQDCFFNIKLHPEDCKRFAFSVPSPNFKRPYQRFQWKVLPQGMKNSPTLCQKFVDKAILTVRDKYQDSYIVHYMDDILLAHPSRSIVDEILTSMIQALNKHGLVVSTEKIQKYDNLKYLGTHIQGDSVSYQKLQIRTDKLRTLNDFQKLLGNINWIRPFLKLTTGELKPLFEILNGDSNPISTRKLTPEACKALQLMNERLSTARVKRLDLSQPWSLCILKTEYTPTACLWQDGVVEWIHLPHISPKVITPYDIFCTQLIIKGRHRSKELFSKDPDYIVVPYTKVQFDLLLQEKEDWPISLLGFLGEVHFHLPKDPLLTFTLQTAIIFPHMTSTTPLEKGIVIFTDGSANGRSVTYIQGREPIIKENTQNTAQQAEIVAVITAFEEVSQPFNLYTDSKYVTGLFPEIETATLSPRTKIYTELKHLQRLIHKRQEKFYIGHIRGHTGLPGPLAQGNAYADSLTRILTAGKRTADGSEFEKRTADGSEFESPKKKAKVE

SEQ ID NO: 3234 - protein, 2022 aa, synthetic construct
MPAAKRVKLDGGDKKYSIGLDIGTNSVGWAVITDEYKVPSKKFKVLGNTDRHSIKKNLIGALLFDSGETAEATRLKRTARRRYTRRKNRICYLQEIFSNEMAKVDDSFFHRLEESFLVEEDKKHERHPIFGNIVDEVAYHEKYPTIYHLRKKLVDSTDKADLRLIYLALAHMIKFRGHFLIEGDLNPDNSDVDKLFIQLVQTYNQLFEENPINASGVDAKAILSARLSKSRRLENLIAQLPGEKKNGLFGNLIALSLGLTPNFKSNFDLAEDAKLQLSKDTYDDDLDNLLAQIGDQYADLFLAAKNLSDAILLSDILRVNTEITKAPLSASMIKRYDEHHQDLTLLKALVRQQLPEKYKEIFFDQSKNGYAGYIDGGASQEEFYKFIKPILEKMDGTEELLVKLNREDLLRKQRTFDNGSIPHQIHLGELHAILRRQEDFYPFLKDNREKIEKILTFRIPYYVGPLARGNSRFAWMTRKSEETITPWNFEEVVDKGASAQSFIERMTNFDKNLPNEKVLPKHSLLYEYFTVYNELTKVKYVTEGMRKPAFLSGEQKKAIVDLLFKTNRKVTVKQLKEDYFKKIECFDSVEISGVEDRFNASLGTYHDLLKIIKDKDFLDNEENEDILEDIVLTLTLFEDREMIEERLKTYAHLFDDKVMKQLKRRRYTGWGRLSRKLINGIRDKQSGKTILDFLKSDGFANRNFMQLIHDDSLTFKEDIQKAQVSGQGDSLHEHIANLAGSPAIKKGILQTVKVVDELVKVMGRHKPENIVIEMARENQTTQKGQKNSRERMKRIEEGIKELGSQILKEHPVENTQLQNEKLYLYYLQNGRDMYVDQELDINRLSDYDVDHIVPQSFLKDDSIDNKVLTRSDKARGKSDNVPSEEVVKKMKNYWRQLLNAKLITQRKFDNLTKAERGGLSELDKAGFIKRQLVETRQITKHVAQILDSRMNTKYDENDKLIREVKVITLKSKLVSDFRKDFQFYKVREINNYHHAHDAYLNAVVGTALIKKYPKLESEFVYGDYKVYDVRKMIAKSEQEIGKATAKYFFYSNIMNFFKTEITLANGEIRKRPLIETNGETGEIVWDKGRDFATVRKVLSMPQVNIVKKTEVQTGGFSKESILPKRNSDKLIARKKDWDPKKYGGFDSPTVAYSVLVVAKVEKGKSKKLKSVKELLGITIMERSSFEKNPIDFLEAKGYKEVKKDLIIKLPKYSLFELENGRKRMLASAGELQKGNELALPSKYVNFLYLASHYEKLKGSPEDNEQKQLFVEQHKHYLDEIIEQISEFSKRVILADANLDKVLSAYNKHRDKPIREQAENIIHLFTLTNLGAPAAFKYFDTTIDRKRYTSTKEVLDATLIHQSITGLYETRIDLSQLGGDGGPAPGGSGGGGGGRDIMKDIKVRLMTDSPDDSQDLMIGAIESNLFADQISWKSDQPVWLNQWPLKQEKLQALQQLVTEQLQLGHLEESNSPWNTPVFVIKKKSGKWRLLQDLRAVNATMHDMGALQPGLPSPVAVPKGWEIIIIDLQDCFFNIKLHPEDCKRFAFSVPSPNFKRPYQRFQWKVLPQGMKNSPTLCQKFVDKAILTVRDKYQDSYIVHYMDDILLAHPSRSIVDEILTSMIQALNKHGLVVSTEKIQKYDNLKYLGTHIQGDSVSYQKLQIRTDKLRTLNDFQKLLGNINWIRPFLKLTTGELKPLFEILNGDSNPISTRKLTPEACKALQLMNERLSTARVKRLDLSQPWSLCILKTEYTPTACLWQDGVVEWIHLPHISPKVITPYDIFCTQLIIKGRHRSKELFSKDPDYIVVPYTKVQFDLLLQEKEDWPISLLGFLGEVHFHLPKDPLLTFTLQTAIIFPHMTSTTPLEKGIVIFTDGSANGRSVTYIQGREPIIKENTQNTAQQAEIVAVITAFEEVSQPFNLYTDSKYVTGLFPEIETATLSPRTKIYTELKHLQRLIHKRQEKFYIGHIRGHTGLPGPLAQGNAYADSLTRILTAGKRTADGSEFEKRTADGSEFESPKKKAKVE

SEQ ID NO: 3235 - protein, 2024 aa, synthetic construct
MPAAKRVKLDGGDKKYSIGLDIGTNSVGWAVITDEYKVPSKKFKVLGNTDRHSIKKNLIGALLFDSGETAEATRLKRTARRRYTRRKNRICYLQEIFSNEMAKVDDSFFHRLEESFLVEEDKKHERHPIFGNIVDEVAYHEKYPTIYHLRKKLVDSTDKADLRLIYLALAHMIKFRGHFLIEGDLNPDNSDVDKLFIQLVQTYNQLFEENPINASGVDAKAILSARLSKSRRLENLIAQLPGEKKNGLFGNLIALSLGLTPNFKSNFDLAEDAKLQLSKDTYDDDLDNLLAQIGDQYADLFLAAKNLSDAILLSDILRVNTEITKAPLSASMIKRYDEHHQDLTLLKALVRQQLPEKYKEIFFDQSKNGYAGYIDGGASQEEFYKFIKPILEKMDGTEELLVKLNREDLLRKQRTFDNGSIPHQIHLGELHAILRRQEDFYPFLKDNREKIEKILTFRIPYYVGPLARGNSRFAWMTRKSEETITPWNFEEVVDKGASAQSFIERMTNFDKNLPNEKVLPKHSLLYEYFTVYNELTKVKYVTEGMRKPAFLSGEQKKAIVDLLFKTNRKVTVKQLKEDYFKKIECFDSVEISGVEDRFNASLGTYHDLLKIIKDKDFLDNEENEDILEDIVLTLTLFEDREMIEERLKTYAHLFDDKVMKQLKRRRYTGWGRLSRKLINGIRDKQSGKTILDFLKSDGFANRNFMQLIHDDSLTFKEDIQKAQVSGQGDSLHEHIANLAGSPAIKKGILQTVKVVDELVKVMGRHKPENIVIEMARENQTTQKGQKNSRERMKRIEEGIKELGSQILKEHPVENTQLQNEKLYLYYLQNGRDMYVDQELDINRLSDYDVDHIVPQSFLKDDSIDNKVLTRSDKARGKSDNVPSEEVVKKMKNYWRQLLNAKLITQRKFDNLTKAERGGLSELDKAGFIKRQLVETRQITKHVAQILDSRMNTKYDENDKLIREVKVITLKSKLVSDFRKDFQFYKVREINNYHHAHDAYLNAVVGTALIKKYPKLESEFVYGDYKVYDVRKMIAKSEQEIGKATAKYFFYSNIMNFFKTEITLANGEIRKRPLIETNGETGEIVWDKGRDFATVRKVLSMPQVNIVKKTEVQTGGFSKESILPKRNSDKLIARKKDWDPKKYGGFDSPTVAYSVLVVAKVEKGKSKKLKSVKELLGITIMERSSFEKNPIDFLEAKGYKEVKKDLIIKLPKYSLFELENGRKRMLASAGELQKGNELALPSKYVNFLYLASHYEKLKGSPEDNEQKQLFVEQHKHYLDEIIEQISEFSKRVILADANLDKVLSAYNKHRDKPIREQAENIIHLFTLTNLGAPAAFKYFDTTIDRKRYTSTKEVLDATLIHQSITGLYETRIDLSQLGGDGGGGSEAAAKGGGGGGRDIMKDIKVRLMTDSPDDSQDLMIGAIESNLFADQISWKSDQPVWLNQWPLKQEKLQALQQLVTEQLQLGHLEESNSPWNTPVFVIKKKSGKWRLLQDLRAVNATMHDMGALQPGLPSPVAVPKGWEIIIIDLQDCFFNIKLHPEDCKRFAFSVPSPNFKRPYQRFQWKVLPQGMKNSPTLCQKFVDKAILTVRDKYQDSYIVHYMDDILLAHPSRSIVDEILTSMIQALNKHGLVVSTEKIQKYDNLKYLGTHIQGDSVSYQKLQIRTDKLRTLNDFQKLLGNINWIRPFLKLTTGELKPLFEILNGDSNPISTRKLTPEACKALQLMNERLSTARVKRLDLSQPWSLCILKTEYTPTACLWQDGVVEWIHLPHISPKVITPYDIFCTQLIIKGRHRSKELFSKDPDYIVVPYTKVQFDLLLQEKEDWPISLLGFLGEVHFHLPKDPLLTFTLQTAIIFPHMTSTTPLEKGIVIFTDGSANGRSVTYIQGREPIIKENTQNTAQQAEIVAVITAFEEVSQPFNLYTDSKYVTGLFPEIETATLSPRTKIYTELKHLQRLIHKRQEKFYIGHIRGHTGLPGPLAQGNAYADSLTRILTAGKRTADGSEFEKRTADGSEFESPKKKAKVE

SEQ ID NO: 3236 - protein, 2024 aa, synthetic construct
MPAAKRVKLDGGDKKYSIGLDIGTNSVGWAVITDEYKVPSKKFKVLGNTDRHSIKKNLIGALLFDSGETAEATRLKRTARRRYTRRKNRICYLQEIFSNEMAKVDDSFFHRLEESFLVEEDKKHERHPIFGNIVDEVAYHEKYPTIYHLRKKLVDSTDKADLRLIYLALAHMIKFRGHFLIEGDLNPDNSDVDKLFIQLVQTYNQLFEENPINASGVDAKAILSARLSKSRRLENLIAQLPGEKKNGLFGNLIALSLGLTPNFKSNFDLAEDAKLQLSKDTYDDDLDNLLAQIGDQYADLFLAAKNLSDAILLSDILRVNTEITKAPLSASMIKRYDEHHQDLTLLKALVRQQLPEKYKEIFFDQSKNGYAGYIDGGASQEEFYKFIKPILEKMDGTEELLVKLNREDLLRKQRTFDNGSIPHQIHLGELHAILRRQEDFYPFLKDNREKIEKILTFRIPYYVGPLARGNSRFAWMTRKSEETITPWNFEEVVDKGASAQSFIERMTNFDKNLPNEKVLPKHSLLYEYFTVYNELTKVKYVTEGMRKPAFLSGEQKKAIVDLLFKTNRKVTVKQLKEDYFKKIECFDSVEISGVEDRFNASLGTYHDLLKIIKDKDFLDNEENEDILEDIVLTLTLFEDREMIEERLKTYAHLFDDKVMKQLKRRRYTGWGRLSRKLINGIRDKQSGKTILDFLKSDGFANRNFMQLIHDDSLTFKEDIQKAQVSGQGDSLHEHIANLAGSPAIKKGILQTVKVVDELVKVMGRHKPENIVIEMARENQTTQKGQKNSRERMKRIEEGIKELGSQILKEHPVENTQLQNEKLYLYYLQNGRDMYVDQELDINRLSDYDVDHIVPQSFLKDDSIDNKVLTRSDKARGKSDNVPSEEVVKKMKNYWRQLLNAKLITQRKFDNLTKAERGGLSELDKAGFIKRQLVETRQITKHVAQILDSRMNTKYDENDKLIREVKVITLKSKLVSDFRKDFQFYKVREINNYHHAHDAYLNAVVGTALIKKYPKLESEFVYGDYKVYDVRKMIAKSEQEIGKATAKYFFYSNIMNFFKTEITLANGEIRKRPLIETNGETGEIVWDKGRDFATVRKVLSMPQVNIVKKTEVQTGGFSKESILPKRNSDKLIARKKDWDPKKYGGFDSPTVAYSVLVVAKVEKGKSKKLKSVKELLGITIMERSSFEKNPIDFLEAKGYKEVKKDLIIKLPKYSLFELENGRKRMLASAGELQKGNELALPSKYVNFLYLASHYEKLKGSPEDNEQKQLFVEQHKHYLDEIIEQISEFSKRVILADANLDKVLSAYNKHRDKPIREQAENIIHLFTLTNLGAPAAFKYFDTTIDRKRYTSTKEVLDATLIHQSITGLYETRIDLSQLGGDGGPAPEAAAKGSSGGGRDIMKDIKVRLMTDSPDDSQDLMIGAIESNLFADQISWKSDQPVWLNQWPLKQEKLQALQQLVTEQLQLGHLEESNSPWNTPVFVIKKKSGKWRLLQDLRAVNATMHDMGALQPGLPSPVAVPKGWEIIIIDLQDCFFNIKLHPEDCKRFAFSVPSPNFKRPYQRFQWKVLPQGMKNSPTLCQKFVDKAILTVRDKYQDSYIVHYMDDILLAHPSRSIVDEILTSMIQALNKHGLVVSTEKIQKYDNLKYLGTHIQGDSVSYQKLQIRTDKLRTLNDFQKLLGNINWIRPFLKLTTGELKPLFEILNGDSNPISTRKLTPEACKALQLMNERLSTARVKRLDLSQPWSLCILKTEYTPTACLWQDGVVEWIHLPHISPKVITPYDIFCTQLIIKGRHRSKELFSKDPDYIVVPYTKVQFDLLLQEKEDWPISLLGFLGEVHFHLPKDPLLTFTLQTAIIFPHMTSTTPLEKGIVIFTDGSANGRSVTYIQGREPIIKENTQNTAQQAEIVAVITAFEEVSQPFNLYTDSKYVTGLFPEIETATLSPRTKIYTELKHLQRLIHKRQEKFYIGHIRGHTGLPGPLAQGNAYADSLTRILTAGKRTADGSEFEKRTADGSEFESPKKKAKVE

SEQ ID NO: 3237 - protein, 2024 aa, synthetic construct
MPAAKRVKLDGGDKKYSIGLDIGTNSVGWAVITDEYKVPSKKFKVLGNTDRHSIKKNLIGALLFDSGETAEATRLKRTARRRYTRRKNRICYLQEIFSNEMAKVDDSFFHRLEESFLVEEDKKHERHPIFGNIVDEVAYHEKYPTIYHLRKKLVDSTDKADLRLIYLALAHMIKFRGHFLIEGDLNPDNSDVDKLFIQLVQTYNQLFEENPINASGVDAKAILSARLSKSRRLENLIAQLPGEKKNGLFGNLIALSLGLTPNFKSNFDLAEDAKLQLSKDTYDDDLDNLLAQIGDQYADLFLAAKNLSDAILLSDILRVNTEITKAPLSASMIKRYDEHHQDLTLLKALVRQQLPEKYKEIFFDQSKNGYAGYIDGGASQEEFYKFIKPILEKMDGTEELLVKLNREDLLRKQRTFDNGSIPHQIHLGELHAILRRQEDFYPFLKDNREKIEKILTFRIPYYVGPLARGNSRFAWMTRKSEETITPWNFEEVVDKGASAQSFIERMTNFDKNLPNEKVLPKHSLLYEYFTVYNELTKVKYVTEGMRKPAFLSGEQKKAIVDLLFKTNRKVTVKQLKEDYFKKIECFDSVEISGVEDRFNASLGTYHDLLKIIKDKDFLDNEENEDILEDIVLTLTLFEDREMIEERLKTYAHLFDDKVMKQLKRRRYTGWGRLSRKLINGIRDKQSGKTILDFLKSDGFANRNFMQLIHDDSLTFKEDIQKAQVSGQGDSLHEHIANLAGSPAIKKGILQTVKVVDELVKVMGRHKPENIVIEMARENQTTQKGQKNSRERMKRIEEGIKELGSQILKEHPVENTQLQNEKLYLYYLQNGRDMYVDQELDINRLSDYDVDHIVPQSFLKDDSIDNKVLTRSDKARGKSDNVPSEEVVKKMKNYWRQLLNAKLITQRKFDNLTKAERGGLSELDKAGFIKRQLVETRQITKHVAQILDSRMNTKYDENDKLIREVKVITLKSKLVSDFRKDFQFYKVREINNYHHAHDAYLNAVVGTALIKKYPKLESEFVYGDYKVYDVRKMIAKSEQEIGKATAKYFFYSNIMNFFKTEITLANGEIRKRPLIETNGETGEIVWDKGRDFATVRKVLSMPQVNIVKKTEVQTGGFSKESILPKRNSDKLIARKKDWDPKKYGGFDSPTVAYSVLVVAKVEKGKSKKLKSVKELLGITIMERSSFEKNPIDFLEAKGYKEVKKDLIIKLPKYSLFELENGRKRMLASAGELQKGNELALPSKYVNFLYLASHYEKLKGSPEDNEQKQLFVEQHKHYLDEIIEQISEFSKRVILADANLDKVLSAYNKHRDKPIREQAENIIHLFTLTNLGAPAAFKYFDTTIDRKRYTSTKEVLDATLIHQSITGLYETRIDLSQLGGDGGGGSEAAAKPAPGGGRDIMKDIKVRLMTDSPDDSQDLMIGAIESNLFADQISWKSDQPVWLNQWPLKQEKLQALQQLVTEQLQLGHLEESNSPWNTPVFVIKKKSGKWRLLQDLRAVNATMHDMGALQPGLPSPVAVPKGWEIIIIDLQDCFFNIKLHPEDCKRFAFSVPSPNFKRPYQRFQWKVLPQGMKNSPTLCQKFVDKAILTVRDKYQDSYIVHYMDDILLAHPSRSIVDEILTSMIQALNKHGLVVSTEKIQKYDNLKYLGTHIQGDSVSYQKLQIRTDKLRTLNDFQKLLGNINWIRPFLKLTTGELKPLFEILNGDSNPISTRKLTPEACKALQLMNERLSTARVKRLDLSQPWSLCILKTEYTPTACLWQDGVVEWIHLPHISPKVITPYDIFCTQLIIKGRHRSKELFSKDPDYIVVPYTKVQFDLLLQEKEDWPISLLGFLGEVHFHLPKDPLLTFTLQTAIIFPHMTSTTPLEKGIVIFTDGSANGRSVTYIQGREPIIKENTQNTAQQAEIVAVITAFEEVSQPFNLYTDSKYVTGLFPEIETATLSPRTKIYTELKHLQRLIHKRQEKFYIGHIRGHTGLPGPLAQGNAYADSLTRILTAGKRTADGSEFEKRTADGSEFESPKKKAKVE

SEQ ID NO: 3238 - protein, 2046 aa, synthetic construct
MPAAKRVKLDGGDKKYSIGLDIGTNSVGWAVITDEYKVPSKKFKVLGNTDRHSIKKNLIGALLFDSGETAEATRLKRTARRRYTRRKNRICYLQEIFSNEMAKVDDSFFHRLEESFLVEEDKKHERHPIFGNIVDEVAYHEKYPTIYHLRKKLVDSTDKADLRLIYLALAHMIKFRGHFLIEGDLNPDNSDVDKLFIQLVQTYNQLFEENPINASGVDAKAILSARLSKSRRLENLIAQLPGEKKNGLFGNLIALSLGLTPNFKSNFDLAEDAKLQLSKDTYDDDLDNLLAQIGDQYADLFLAAKNLSDAILLSDILRVNTEITKAPLSASMIKRYDEHHQDLTLLKALVRQQLPEKYKEIFFDQSKNGYAGYIDGGASQEEFYKFIKPILEKMDGTEELLVKLNREDLLRKQRTFDNGSIPHQIHLGELHAILRRQEDFYPFLKDNREKIEKILTFRIPYYVGPLARGNSRFAWMTRKSEETITPWNFEEVVDKGASAQSFIERMTNFDKNLPNEKVLPKHSLLYEYFTVYNELTKVKYVTEGMRKPAFLSGEQKKAIVDLLFKTNRKVTVKQLKEDYFKKIECFDSVEISGVEDRFNASLGTYHDLLKIIKDKDFLDNEENEDILEDIVLTLTLFEDREMIEERLKTYAHLFDDKVMKQLKRRRYTGWGRLSRKLINGIRDKQSGKTILDFLKSDGFANRNFMQLIHDDSLTFKEDIQKAQVSGQGDSLHEHIANLAGSPAIKKGILQTVKVVDELVKVMGRHKPENIVIEMARENQTTQKGQKNSRERMKRIEEGIKELGSQILKEHPVENTQLQNEKLYLYYLQNGRDMYVDQELDINRLSDYDVDHIVPQSFLKDDSIDNKVLTRSDKARGKSDNVPSEEVVKKMKNYWRQLLNAKLITQRKFDNLTKAERGGLSELDKAGFIKRQLVETRQITKHVAQILDSRMNTKYDENDKLIREVKVITLKSKLVSDFRKDFQFYKVREINNYHHAHDAYLNAVVGTALIKKYPKLESEFVYGDYKVYDVRKMIAKSEQEIGKATAKYFFYSNIMNFFKTEITLANGEIRKRPLIETNGETGEIVWDKGRDFATVRKVLSMPQVNIVKKTEVQTGGFSKESILPKRNSDKLIARKKDWDPKKYGGFDSPTVAYSVLVVAKVEKGKSKKLKSVKELLGITIMERSSFEKNPIDFLEAKGYKEVKKDLIIKLPKYSLFELENGRKRMLASAGELQKGNELALPSKYVNFLYLASHYEKLKGSPEDNEQKQLFVEQHKHYLDEIIEQISEFSKRVILADANLDKVLSAYNKHRDKPIREQAENIIHLFTLTNLGAPAAFKYFDTTIDRKRYTSTKEVLDATLIHQSITGLYETRIDLSQLGGDGGSGGSSGGSSGSETPGTSESATPESSGGSSGGSSGGGRDIMKDIKVRLMTDSPDDSQDLMIGAIESNLFADQISWKSDQPVWLNQWPLKQEKLQALQQLVTEQLQLGHLEESNSPWNTPVFVIKKKSGKWRLLQDLRAVNATMHDMGALQPGLPSPVAVPKGWEIIIIDLQDCFFNIKLHPEDCKRFAFSVPSPNFKRPYQRFQWKVLPQGMKNSPTLCQKFVDKAILTVRDKYQDSYIVHYMDDILLAHPSRSIVDEILTSMIQALNKHGLVVSTEKIQKYDNLKYLGTHIQGDSVSYQKLQIRTDKLRTLNDFQKLLGNINWIRPFLKLTTGELKPLFEILNGDSNPISTRKLTPEACKALQLMNERLSTARVKRLDLSQPWSLCILKTEYTPTACLWQDGVVEWIHLPHISPKVITPYDIFCTQLIIKGRHRSKELFSKDPDYIVVPYTKVQFDLLLQEKEDWPISLLGFLGEVHFHLPKDPLLTFTLQTAIIFPHMTSTTPLEKGIVIFTDGSANGRSVTYIQGREPIIKENTQNTAQQAEIVAVITAFEEVSQPFNLYTDSKYVTGLFPEIETATLSPRTKIYTELKHLQRLIHKRQEKFYIGHIRGHTGLPGPLAQGNAYADSLTRILTAGKRTADGSEFEKRTADGSEFESPKKKAKVE

SEQ ID NO: 3239 - protein, 2025 aa, synthetic construct
MPAAKRVKLDGGDKKYSIGLDIGTNSVGWAVITDEYKVPSKKFKVLGNTDRHSIKKNLIGALLFDSGETAEATRLKRTARRRYTRRKNRICYLQEIFSNEMAKVDDSFFHRLEESFLVEEDKKHERHPIFGNIVDEVAYHEKYPTIYHLRKKLVDSTDKADLRLIYLALAHMIKFRGHFLIEGDLNPDNSDVDKLFIQLVQTYNQLFEENPINASGVDAKAILSARLSKSRRLENLIAQLPGEKKNGLFGNLIALSLGLTPNFKSNFDLAEDAKLQLSKDTYDDDLDNLLAQIGDQYADLFLAAKNLSDAILLSDILRVNTEITKAPLSASMIKRYDEHHQDLTLLKALVRQQLPEKYKEIFFDQSKNGYAGYIDGGASQEEFYKFIKPILEKMDGTEELLVKLNREDLLRKQRTFDNGSIPHQIHLGELHAILRRQEDFYPFLKDNREKIEKILTFRIPYYVGPLARGNSRFAWMTRKSEETITPWNFEEVVDKGASAQSFIERMTNFDKNLPNEKVLPKHSLLYEYFTVYNELTKVKYVTEGMRKPAFLSGEQKKAIVDLLFKTNRKVTVKQLKEDYFKKIECFDSVEISGVEDRFNASLGTYHDLLKIIKDKDFLDNEENEDILEDIVLTLTLFEDREMIEERLKTYAHLFDDKVMKQLKRRRYTGWGRLSRKLINGIRDKQSGKTILDFLKSDGFANRNFMQLIHDDSLTFKEDIQKAQVSGQGDSLHEHIANLAGSPAIKKGILQTVKVVDELVKVMGRHKPENIVIEMARENQTTQKGQKNSRERMKRIEEGIKELGSQILKEHPVENTQLQNEKLYLYYLQNGRDMYVDQELDINRLSDYDVDHIVPQSFLKDDSIDNKVLTRSDKARGKSDNVPSEEVVKKMKNYWRQLLNAKLITQRKFDNLTKAERGGLSELDKAGFIKRQLVETRQITKHVAQILDSRMNTKYDENDKLIREVKVITLKSKLVSDFRKDFQFYKVREINNYHHAHDAYLNAVVGTALIKKYPKLESEFVYGDYKVYDVRKMIAKSEQEIGKATAKYFFYSNIMNFFKTEITLANGEIRKRPLIETNGETGEIVWDKGRDFATVRKVLSMPQVNIVKKTEVQTGGFSKESILPKRNSDKLIARKKDWDPKKYGGFDSPTVAYSVLVVAKVEKGKSKKLKSVKELLGITIMERSSFEKNPIDFLEAKGYKEVKKDLIIKLPKYSLFELENGRKRMLASAGELQKGNELALPSKYVNFLYLASHYEKLKGSPEDNEQKQLFVEQHKHYLDEIIEQISEFSKRVILADANLDKVLSAYNKHRDKPIREQAENIIHLFTLTNLGAPAAFKYFDTTIDRKRYTSTKEVLDATLIHQSITGLYETRIDLSQLGGDGGGSSGSSGSSGSSGGGRDIMKDIKVRLMTDSPDDSQDLMIGAIESNLFADQISWKSDQPVWLNQWPLKQEKLQALQQLVTEQLQLGHLEESNSPWNTPVFVIKKKSGKWRLLQDLRAVNATMHDMGALQPGLPSPVAVPKGWEIIIIDLQDCFFNIKLHPEDCKRFAFSVPSPNFKRPYQRFQWKVLPQGMKNSPTLCQKFVDKAILTVRDKYQDSYIVHYMDDILLAHPSRSIVDEILTSMIQALNKHGLVVSTEKIQKYDNLKYLGTHIQGDSVSYQKLQIRTDKLRTLNDFQKLLGNINWIRPFLKLTTGELKPLFEILNGDSNPISTRKLTPEACKALQLMNERLSTARVKRLDLSQPWSLCILKTEYTPTACLWQDGVVEWIHLPHISPKVITPYDIFCTQLIIKGRHRSKELFSKDPDYIVVPYTKVQFDLLLQEKEDWPISLLGFLGEVHFHLPKDPLLTFTLQTAIIFPHMTSTTPLEKGIVIFTDGSANGRSVTYIQGREPIIKENTQNTAQQAEIVAVITAFEEVSQPFNLYTDSKYVTGLFPEIETATLSPRTKIYTELKHLQRLIHKRQEKFYIGHIRGHTGLPGPLAQGNAYADSLTRILTAGKRTADGSEFEKRTADGSEFESPKKKAKVE

SEQ ID NO: 3240 - protein, 2022 aa, synthetic construct
MPAAKRVKLDGGDKKYSIGLDIGTNSVGWAVITDEYKVPSKKFKVLGNTDRHSIKKNLIGALLFDSGETAEATRLKRTARRRYTRRKNRICYLQEIFSNEMAKVDDSFFHRLEESFLVEEDKKHERHPIFGNIVDEVAYHEKYPTIYHLRKKLVDSTDKADLRLIYLALAHMIKFRGHFLIEGDLNPDNSDVDKLFIQLVQTYNQLFEENPINASGVDAKAILSARLSKSRRLENLIAQLPGEKKNGLFGNLIALSLGLTPNFKSNFDLAEDAKLQLSKDTYDDDLDNLLAQIGDQYADLFLAAKNLSDAILLSDILRVNTEITKAPLSASMIKRYDEHHQDLTLLKALVRQQLPEKYKEIFFDQSKNGYAGYIDGGASQEEFYKFIKPILEKMDGTEELLVKLNREDLLRKQRTFDNGSIPHQIHLGELHAILRRQEDFYPFLKDNREKIEKILTFRIPYYVGPLARGNSRFAWMTRKSEETITPWNFEEVVDKGASAQSFIERMTNFDKNLPNEKVLPKHSLLYEYFTVYNELTKVKYVTEGMRKPAFLSGEQKKAIVDLLFKTNRKVTVKQLKEDYFKKIECFDSVEISGVEDRFNASLGTYHDLLKIIKDKDFLDNEENEDILEDIVLTLTLFEDREMIEERLKTYAHLFDDKVMKQLKRRRYTGWGRLSRKLINGIRDKQSGKTILDFLKSDGFANRNFMQLIHDDSLTFKEDIQKAQVSGQGDSLHEHIANLAGSPAIKKGILQTVKVVDELVKVMGRHKPENIVIEMARENQTTQKGQKNSRERMKRIEEGIKELGSQILKEHPVENTQLQNEKLYLYYLQNGRDMYVDQELDINRLSDYDVDHIVPQSFLKDDSIDNKVLTRSDKARGKSDNVPSEEVVKKMKNYWRQLLNAKLITQRKFDNLTKAERGGLSELDKAGFIKRQLVETRQITKHVAQILDSRMNTKYDENDKLIREVKVITLKSKLVSDFRKDFQFYKVREINNYHHAHDAYLNAVVGTALIKKYPKLESEFVYGDYKVYDVRKMIAKSEQEIGKATAKYFFYSNIMNFFKTEITLANGEIRKRPLIETNGETGEIVWDKGRDFATVRKVLSMPQVNIVKKTEVQTGGFSKESILPKRNSDKLIARKKDWDPKKYGGFDSPTVAYSVLVVAKVEKGKSKKLKSVKELLGITIMERSSFEKNPIDFLEAKGYKEVKKDLIIKLPKYSLFELENGRKRMLASAGELQKGNELALPSKYVNFLYLASHYEKLKGSPEDNEQKQLFVEQHKHYLDEIIEQISEFSKRVILADANLDKVLSAYNKHRDKPIREQAENIIHLFTLTNLGAPAAFKYFDTTIDRKRYTSTKEVLDATLIHQSITGLYETRIDLSQLGGDGGGGGGGSGSSGGGRDIMKDIKVRLMTDSPDDSQDLMIGAIESNLFADQISWKSDQPVWLNQWPLKQEKLQALQQLVTEQLQLGHLEESNSPWNTPVFVIKKKSGKWRLLQDLRAVNATMHDMGALQPGLPSPVAVPKGWEIIIIDLQDCFFNIKLHPEDCKRFAFSVPSPNFKRPYQRFQWKVLPQGMKNSPTLCQKFVDKAILTVRDKYQDSYIVHYMDDILLAHPSRSIVDEILTSMIQALNKHGLVVSTEKIQKYDNLKYLGTHIQGDSVSYQKLQIRTDKLRTLNDFQKLLGNINWIRPFLKLTTGELKPLFEILNGDSNPISTRKLTPEACKALQLMNERLSTARVKRLDLSQPWSLCILKTEYTPTACLWQDGVVEWIHLPHISPKVITPYDIFCTQLIIKGRHRSKELFSKDPDYIVVPYTKVQFDLLLQEKEDWPISLLGFLGEVHFHLPKDPLLTFTLQTAIIFPHMTSTTPLEKGIVIFTDGSANGRSVTYIQGREPIIKENTQNTAQQAEIVAVITAFEEVSQPFNLYTDSKYVTGLFPEIETATLSPRTKIYTELKHLQRLIHKRQEKFYIGHIRGHTGLPGPLAQGNAYADSLTRILTAGKRTADGSEFEKRTADGSEFESPKKKAKVE

SEQ ID NO: 3241 - protein, 2022 aa, synthetic construct
MPAAKRVKLDGGDKKYSIGLDIGTNSVGWAVITDEYKVPSKKFKVLGNTDRHSIKKNLIGALLFDSGETAEATRLKRTARRRYTRRKNRICYLQEIFSNEMAKVDDSFFHRLEESFLVEEDKKHERHPIFGNIVDEVAYHEKYPTIYHLRKKLVDSTDKADLRLIYLALAHMIKFRGHFLIEGDLNPDNSDVDKLFIQLVQTYNQLFEENPINASGVDAKAILSARLSKSRRLENLIAQLPGEKKNGLFGNLIALSLGLTPNFKSNFDLAEDAKLQLSKDTYDDDLDNLLAQIGDQYADLFLAAKNLSDAILLSDILRVNTEITKAPLSASMIKRYDEHHQDLTLLKALVRQQLPEKYKEIFFDQSKNGYAGYIDGGASQEEFYKFIKPILEKMDGTEELLVKLNREDLLRKQRTFDNGSIPHQIHLGELHAILRRQEDFYPFLKDNREKIEKILTFRIPYYVGPLARGNSRFAWMTRKSEETITPWNFEEVVDKGASAQSFIERMTNFDKNLPNEKVLPKHSLLYEYFTVYNELTKVKYVTEGMRKPAFLSGEQKKAIVDLLFKTNRKVTVKQLKEDYFKKIECFDSVEISGVEDRFNASLGTYHDLLKIIKDKDFLDNEENEDILEDIVLTLTLFEDREMIEERLKTYAHLFDDKVMKQLKRRRYTGWGRLSRKLINGIRDKQSGKTILDFLKSDGFANRNFMQLIHDDSLTFKEDIQKAQVSGQGDSLHEHIANLAGSPAIKKGILQTVKVVDELVKVMGRHKPENIVIEMARENQTTQKGQKNSRERMKRIEEGIKELGSQILKEHPVENTQLQNEKLYLYYLQNGRDMYVDQELDINRLSDYDVDHIVPQSFLKDDSIDNKVLTRSDKARGKSDNVPSEEVVKKMKNYWRQLLNAKLITQRKFDNLTKAERGGLSELDKAGFIKRQLVETRQITKHVAQILDSRMNTKYDENDKLIREVKVITLKSKLVSDFRKDFQFYKVREINNYHHAHDAYLNAVVGTALIKKYPKLESEFVYGDYKVYDVRKMIAKSEQEIGKATAKYFFYSNIMNFFKTEITLANGEIRKRPLIETNGETGEIVWDKGRDFATVRKVLSMPQVNIVKKTEVQTGGFSKESILPKRNSDKLIARKKDWDPKKYGGFDSPTVAYSVLVVAKVEKGKSKKLKSVKELLGITIMERSSFEKNPIDFLEAKGYKEVKKDLIIKLPKYSLFELENGRKRMLASAGELQKGNELALPSKYVNFLYLASHYEKLKGSPEDNEQKQLFVEQHKHYLDEIIEQISEFSKRVILADANLDKVLSAYNKHRDKPIREQAENIIHLFTLTNLGAPAAFKYFDTTIDRKRYTSTKEVLDATLIHQSITGLYETRIDLSQLGGDGGGGGGSSGGSGGGRDIMKDIKVRLMTDSPDDSQDLMIGAIESNLFADQISWKSDQPVWLNQWPLKQEKLQALQQLVTEQLQLGHLEESNSPWNTPVFVIKKKSGKWRLLQDLRAVNATMHDMGALQPGLPSPVAVPKGWEIIIIDLQDCFFNIKLHPEDCKRFAFSVPSPNFKRPYQRFQWKVLPQGMKNSPTLCQKFVDKAILTVRDKYQDSYIVHYMDDILLAHPSRSIVDEILTSMIQALNKHGLVVSTEKIQKYDNLKYLGTHIQGDSVSYQKLQIRTDKLRTLNDFQKLLGNINWIRPFLKLTTGELKPLFEILNGDSNPISTRKLTPEACKALQLMNERLSTARVKRLDLSQPWSLCILKTEYTPTACLWQDGVVEWIHLPHISPKVITPYDIFCTQLIIKGRHRSKELFSKDPDYIVVPYTKVQFDLLLQEKEDWPISLLGFLGEVHFHLPKDPLLTFTLQTAIIFPHMTSTTPLEKGIVIFTDGSANGRSVTYIQGREPIIKENTQNTAQQAEIVAVITAFEEVSQPFNLYTDSKYVTGLFPEIETATLSPRTKIYTELKHLQRLIHKRQEKFYIGHIRGHTGLPGPLAQGNAYADSLTRILTAGKRTADGSEFEKRTADGSEFESPKKKAKVE

SEQ ID NO: 3242 - protein, 2019 aa, synthetic construct
MPAAKRVKLDGGDKKYSIGLDIGTNSVGWAVITDEYKVPSKKFKVLGNTDRHSIKKNLIGALLFDSGETAEATRLKRTARRRYTRRKNRICYLQEIFSNEMAKVDDSFFHRLEESFLVEEDKKHERHPIFGNIVDEVAYHEKYPTIYHLRKKLVDSTDKADLRLIYLALAHMIKFRGHFLIEGDLNPDNSDVDKLFIQLVQTYNQLFEENPINASGVDAKAILSARLSKSRRLENLIAQLPGEKKNGLFGNLIALSLGLTPNFKSNFDLAEDAKLQLSKDTYDDDLDNLLAQIGDQYADLFLAAKNLSDAILLSDILRVNTEITKAPLSASMIKRYDEHHQDLTLLKALVRQQLPEKYKEIFFDQSKNGYAGYIDGGASQEEFYKFIKPILEKMDGTEELLVKLNREDLLRKQRTFDNGSIPHQIHLGELHAILRRQEDFYPFLKDNREKIEKILTFRIPYYVGPLARGNSRFAWMTRKSEETITPWNFEEVVDKGASAQSFIERMTNFDKNLPNEKVLPKHSLLYEYFTVYNELTKVKYVTEGMRKPAFLSGEQKKAIVDLLFKTNRKVTVKQLKEDYFKKIECFDSVEISGVEDRFNASLGTYHDLLKIIKDKDFLDNEENEDILEDIVLTLTLFEDREMIEERLKTYAHLFDDKVMKQLKRRRYTGWGRLSRKLINGIRDKQSGKTILDFLKSDGFANRNFMQLIHDDSLTFKEDIQKAQVSGQGDSLHEHIANLAGSPAIKKGILQTVKVVDELVKVMGRHKPENIVIEMARENQTTQKGQKNSRERMKRIEEGIKELGSQILKEHPVENTQLQNEKLYLYYLQNGRDMYVDQELDINRLSDYDVDHIVPQSFLKDDSIDNKVLTRSDKARGKSDNVPSEEVVKKMKNYWRQLLNAKLITQRKFDNLTKAERGGLSELDKAGFIKRQLVETRQITKHVAQILDSRMNTKYDENDKLIREVKVITLKSKLVSDFRKDFQFYKVREINNYHHAHDAYLNAVVGTALIKKYPKLESEFVYGDYKVYDVRKMIAKSEQEIGKATAKYFFYSNIMNFFKTEITLANGEIRKRPLIETNGETGEIVWDKGRDFATVRKVLSMPQVNIVKKTEVQTGGFSKESILPKRNSDKLIARKKDWDPKKYGGFDSPTVAYSVLVVAKVEKGKSKKLKSVKELLGITIMERSSFEKNPIDFLEAKGYKEVKKDLIIKLPKYSLFELENGRKRMLASAGELQKGNELALPSKYVNFLYLASHYEKLKGSPEDNEQKQLFVEQHKHYLDEIIEQISEFSKRVILADANLDKVLSAYNKHRDKPIREQAENIIHLFTLTNLGAPAAFKYFDTTIDRKRYTSTKEVLDATLIHQSITGLYETRIDLSQLGGDGGGGSGSSGGGRDIMKDIKVRLMTDSPDDSQDLMIGAIESNLFADQISWKSDQPVWLNQWPLKQEKLQALQQLVTEQLQLGHLEESNSPWNTPVFVIKKKSGKWRLLQDLRAVNATMHDMGALQPGLPSPVAVPKGWEIIIIDLQDCFFNIKLHPEDCKRFAFSVPSPNFKRPYQRFQWKVLPQGMKNSPTLCQKFVDKAILTVRDKYQDSYIVHYMDDILLAHPSRSIVDEILTSMIQALNKHGLVVSTEKIQKYDNLKYLGTHIQGDSVSYQKLQIRTDKLRTLNDFQKLLGNINWIRPFLKLTTGELKPLFEILNPDSNPISTRKLTPEACKALQLMNERLSTARVKRLDLSQPWSLCILKTEYTPTACLWQDGVVEWIHLPHISPKVITPYDIFCTQLIIKGRHRSKELFSKDPDYIVVPYTKVQFDLLLQEKEDWPISLLGFLGEVHFHLPKDPLLTFTLQTAIIFPHMTSTTPLEKGIVIFTDGSANGRSVTYIQGREPIIKENTQNTAQQAEIVAVITAFEEVSQPFNLYTDSKYVTGLFPEIETATLSPRTKIYTELKHLQRLIHKRQEKFYIGHIRGHTGLPGPLAQGNAYADSLTRILTAGKRTADGSEFEKRTADGSEFESPKKKAKVE

SEQ ID NO: 3243 - protein, 2022 aa, synthetic construct
MPAAKRVKLDGGDKKYSIGLDIGTNSVGWAVITDEYKVPSKKFKVLGNTDRHSIKKNLIGALLFDSGETAEATRLKRTARRRYTRRKNRICYLQEIFSNEMAKVDDSFFHRLEESFLVEEDKKHERHPIFGNIVDEVAYHEKYPTIYHLRKKLVDSTDKADLRLIYLALAHMIKFRGHFLIEGDLNPDNSDVDKLFIQLVQTYNQLFEENPINASGVDAKAILSARLSKSRRLENLIAQLPGEKKNGLFGNLIALSLGLTPNFKSNFDLAEDAKLQLSKDTYDDDLDNLLAQIGDQYADLFLAAKNLSDAILLSDILRVNTEITKAPLSASMIKRYDEHHQDLTLLKALVRQQLPEKYKEIFFDQSKNGYAGYIDGGASQEEFYKFIKPILEKMDGTEELLVKLNREDLLRKQRTFDNGSIPHQIHLGELHAILRRQEDFYPFLKDNREKIEKILTFRIPYYVGPLARGNSRFAWMTRKSEETITPWNFEEVVDKGASAQSFIERMTNFDKNLPNEKVLPKHSLLYEYFTVYNELTKVKYVTEGMRKPAFLSGEQKKAIVDLLFKTNRKVTVKQLKEDYFKKIECFDSVEISGVEDRFNASLGTYHDLLKIIKDKDFLDNEENEDILEDIVLTLTLFEDREMIEERLKTYAHLFDDKVMKQLKRRRYTGWGRLSRKLINGIRDKQSGKTILDFLKSDGFANRNFMQLIHDDSLTFKEDIQKAQVSGQGDSLHEHIANLAGSPAIKKGILQTVKVVDELVKVMGRHKPENIVIEMARENQTTQKGQKNSRERMKRIEEGIKELGSQILKEHPVENTQLQNEKLYLYYLQNGRDMYVDQELDINRLSDYDVDHIVPQSFLKDDSIDNKVLTRSDKARGKSDNVPSEEVVKKMKNYWRQLLNAKLITQRKFDNLTKAERGGLSELDKAGFIKRQLVETRQITKHVAQILDSRMNTKYDENDKLIREVKVITLKSKLVSDFRKDFQFYKVREINNYHHAHDAYLNAVVGTALIKKYPKLESEFVYGDYKVYDVRKMIAKSEQEIGKATAKYFFYSNIMNFFKTEITLANGEIRKRPLIETNGETGEIVWDKGRDFATVRKVLSMPQVNIVKKTEVQTGGFSKESILPKRNSDKLIARKKDWDPKKYGGFDSPTVAYSVLVVAKVEKGKSKKLKSVKELLGITIMERSSFEKNPIDFLEAKGYKEVKKDLIIKLPKYSLFELENGRKRMLASAGELQKGNELALPSKYVNFLYLASHYEKLKGSPEDNEQKQLFVEQHKHYLDEIIEQISEFSKRVILADANLDKVLSAYNKHRDKPIREQAENIIHLFTLTNLGAPAAFKYFDTTIDRKRYTSTKEVLDATLIHQSITGLYETRIDLSQLGGDGGGGGGGSGSSGGGRDIMKDIKVRLMTDSPDDSQDLMIGAIESNLFADQISWKSDQPVWLNQWPLKQEKLQALQQLVTEQLQLGHLEESNSPWNTPVFVIKKKSGKWRLLQDLRAVNATMHDMGALQPGLPSPVAVPKGWEIIIIDLQDCFFNIKLHPEDCKRFAFSVPSPNFKRPYQRFQWKVLPQGMKNSPTLCQKFVDKAILTVRDKYQDSYIVHYMDDILLAHPSRSIVDEILTSMIQALNKHGLVVSTEKIQKYDNLKYLGTHIQGDSVSYQKLQIRTDKLRTLNDFQKLLGNINWIRPFLKLTTGELKPLFEILNPDSNPISTRKLTPEACKALQLMNERLSTARVKRLDLSQPWSLCILKTEYTPTACLWQDGVVEWIHLPHISPKVITPYDIFCTQLIIKGRHRSKELFSKDPDYIVVPYTKVQFDLLLQEKEDWPISLLGFLGEVHFHLPKDPLLTFTLQTAIIFPHMTSTTPLEKGIVIFTDGSANGRSVTYIQGREPIIKENTQNTAQQAEIVAVITAFEEVSQPFNLYTDSKYVTGLFPEIETATLSPRTKIYTELKHLQRLIHKRQEKFYIGHIRGHTGLPGPLAQGNAYADSLTRILTAGKRTADGSEFEKRTADGSEFESPKKKAKVE

SEQ ID NO: 3244 - protein, 2024 aa, synthetic construct
MPAAKRVKLDGGDKKYSIGLDIGTNSVGWAVITDEYKVPSKKFKVLGNTDRHSIKKNLIGALLFDSGETAEATRLKRTARRRYTRRKNRICYLQEIFSNEMAKVDDSFFHRLEESFLVEEDKKHERHPIFGNIVDEVAYHEKYPTIYHLRKKLVDSTDKADLRLIYLALAHMIKFRGHFLIEGDLNPDNSDVDKLFIQLVQTYNQLFEENPINASGVDAKAILSARLSKSRRLENLIAQLPGEKKNGLFGNLIALSLGLTPNFKSNFDLAEDAKLQLSKDTYDDDLDNLLAQIGDQYADLFLAAKNLSDAILLSDILRVNTEITKAPLSASMIKRYDEHHQDLTLLKALVRQQLPEKYKEIFFDQSKNGYAGYIDGGASQEEFYKFIKPILEKMDGTEELLVKLNREDLLRKQRTFDNGSIPHQIHLGELHAILRRQEDFYPFLKDNREKIEKILTFRIPYYVGPLARGNSRFAWMTRKSEETITPWNFEEVVDKGASAQSFIERMTNFDKNLPNEKVLPKHSLLYEYFTVYNELTKVKYVTEGMRKPAFLSGEQKKAIVDLLFKTNRKVTVKQLKEDYFKKIECFDSVEISGVEDRFNASLGTYHDLLKIIKDKDFLDNEENEDILEDIVLTLTLFEDREMIEERLKTYAHLFDDKVMKQLKRRRYTGWGRLSRKLINGIRDKQSGKTILDFLKSDGFANRNFMQLIHDDSLTFKEDIQKAQVSGQGDSLHEHIANLAGSPAIKKGILQTVKVVDELVKVMGRHKPENIVIEMARENQTTQKGQKNSRERMKRIEEGIKELGSQILKEHPVENTQLQNEKLYLYYLQNGRDMYVDQELDINRLSDYDVDHIVPQSFLKDDSIDNKVLTRSDKARGKSDNVPSEEVVKKMKNYWRQLLNAKLITQRKFDNLTKAERGGLSELDKAGFIKRQLVETRQITKHVAQILDSRMNTKYDENDKLIREVKVITLKSKLVSDFRKDFQFYKVREINNYHHAHDAYLNAVVGTALIKKYPKLESEFVYGDYKVYDVRKMIAKSEQEIGKATAKYFFYSNIMNFFKTEITLANGEIRKRPLIETNGETGEIVWDKGRDFATVRKVLSMPQVNIVKKTEVQTGGFSKESILPKRNSDKLIARKKDWDPKKYGGFDSPTVAYSVLVVAKVEKGKSKKLKSVKELLGITIMERSSFEKNPIDFLEAKGYKEVKKDLIIKLPKYSLFELENGRKRMLASAGELQKGNELALPSKYVNFLYLASHYEKLKGSPEDNEQKQLFVEQHKHYLDEIIEQISEFSKRVILADANLDKVLSAYNKHRDKPIREQAENIIHLFTLTNLGAPAAFKYFDTTIDRKRYTSTKEVLDATLIHQSITGLYETRIDLSQLGGDGGGSSEAAAKGGSGGGRDIMKDIKVRLMTDSPDDSQDLMIGAIESNLFADQISWKSDQPVWLNQWPLKQEKLQALQQLVTEQLQLGHLEESNSPWNTPVFVIKKKSGKWRLLQDLRAVNATMHDMGALQPGLPSPVAPPKGWEIIIIDLQDCFFNIKLHPEDCKRFAFSVPSPNFKRPYQRFQWKVLPQGMKNSPTLCQKFVDKAILTVRDKYQDSYIVHYMDDILLAHPSRSIVDEILTSMIQALNKHGLVVSTEKIQKYDNLKYLGTHIQGDSVSYQKLQIRTDKLRTLNDFQKLLGNINWIRPFLKLTTGELKPLFEILNPDSNPISTRKLTPEACKALQLMNERLSTARVKRLDLSQPWSLCILKTEYTPTACLWQDGVVEWIHLPHISPKVITPYDIFCTQLIIKGRHRSKELFSKDPDYIVVPYTKVQFDLLLQEKEDWPISLLGFLGEVHFHLPKDPLLTFTLQTAIIFPHMTSTTPLEKGIVIFTDGSANGRSVTYIQGREPIIKENTQNTAQQAEIVAVITAFEEVSQPFNLYTDSKYVTGLFPEIETATLSPRTKIYTELKHLQRLIHKRQEKFYIGHIRGHTGLPGPLAQGNAYADSLTRILTAGKRTADGSEFEKRTADGSEFESPKKKAKVE

SEQ ID NO: 3245 - protein, 2125 aa, synthetic construct
MPAAKRVKLDGGDKKYSIGLDIGTNSVGWAVITDEYKVPSKKFKVLGNTDRHSIKKNLIGALLFDSGETAEATRLKRTARRRYTRRKNRICYLQEIFSNEMAKVDDSFFHRLEESFLVEEDKKHERHPIFGNIVDEVAYHEKYPTIYHLRKKLVDSTDKADLRLIYLALAHMIKFRGHFLIEGDLNPDNSDVDKLFIQLVQTYNQLFEENPINASGVDAKAILSARLSKSRRLENLIAQLPGEKKNGLFGNLIALSLGLTPNFKSNFDLAEDAKLQLSKDTYDDDLDNLLAQIGDQYADLFLAAKNLSDAILLSDILRVNTEITKAPLSASMIKRYDEHHQDLTLLKALVRQQLPEKYKEIFFDQSKNGYAGYIDGGASQEEFYKFIKPILEKMDGTEELLVKLNREDLLRKQRTFDNGSIPHQIHLGELHAILRRQEDFYPFLKDNREKIEKILTFRIPYYVGPLARGNSRFAWMTRKSEETITPWNFEEVVDKGASAQSFIERMTNFDKNLPNEKVLPKHSLLYEYFTVYNELTKVKYVTEGMRKPAFLSGEQKKAIVDLLFKTNRKVTVKQLKEDYFKKIECFDSVEISGVEDRFNASLGTYHDLLKIIKDKDFLDNEENEDILEDIVLTLTLFEDREMIEERLKTYAHLFDDKVMKQLKRRRYTGWGRLSRKLINGIRDKQSGKTILDFLKSDGFANRNFMQLIHDDSLTFKEDIQKAQVSGQGDSLHEHIANLAGSPAIKKGILQTVKVVDELVKVMGRHKPENIVIEMARENQTTQKGQKNSRERMKRIEEGIKELGSQILKEHPVENTQLQNEKLYLYYLQNGRDMYVDQELDINRLSDYDVDHIVPQSFLKDDSIDNKVLTRSDKARGKSDNVPSEEVVKKMKNYWRQLLNAKLITQRKFDNLTKAERGGLSELDKAGFIKRQLVETRQITKHVAQILDSRMNTKYDENDKLIREVKVITLKSKLVSDFRKDFQFYKVREINNYHHAHDAYLNAVVGTALIKKYPKLESEFVYGDYKVYDVRKMIAKSEQEIGKATAKYFFYSNIMNFFKTEITLANGEIRKRPLIETNGETGEIVWDKGRDFATVRKVLSMPQVNIVKKTEVQTGGFSKESILPKRNSDKLIARKKDWDPKKYGGFDSPTVAYSVLVVAKVEKGKSKKLKSVKELLGITIMERSSFEKNPIDFLEAKGYKEVKKDLIIKLPKYSLFELENGRKRMLASAGELQKGNELALPSKYVNFLYLASHYEKLKGSPEDNEQKQLFVEQHKHYLDEIIEQISEFSKRVILADANLDKVLSAYNKHRDKPIREQAENIIHLFTLTNLGAPAAFKYFDTTIDRKRYTSTKEVLDATLIHQSITGLYETRIDLSQLGGDGGEAAAKEAAAKEAAAKEAAAKGGWVQEISDSRPMLHIYLNGRRFLGLLNTGADKTCIAGRDWPANWPIHQTESSLQGLGMACGVARSSQPLRWQHEDKSGIIHPFVIPTLPFTLWGRDIMKDIKVRLMTDSPDDSQDLMIGAIESNLFADQISWKSDQPVWLNQWPLKQEKLQALQQLVTEQLQLGHLEESNSPWNTPVFVIKKKSGKWRLLQDLRAVNATMHDMGALQPGLPSPVAVPKGWEIIIIDLQDCFFNIKLHPEDCKRFAFSVPSPNFKRPYQRFQWKVLPQGMKNSPTLCQKFVDKAILTVRDKYQDSYIVHYMDDILLAHPSRSIVDEILTSMIQALNKHGLVVSTEKIQKYDNLKYLGTHIQGDSVSYQKLQIRTDKLRTLNDFQKLLGNINWIRPFLKLTTGELKPLFEILNPDSNPISTRKLTPEACKALQLMNERLSTARVKRLDLSQPWSLCILKTEYTPTACLWQDGVVEWIHLPHISPKVITPYDIFCTQLIIKGRHRSKELFSKDPDYIVVPYTKVQFDLLLQEKEDWPISLLGFLGEVHFHLPKDPLLTFTLQTAIIFPHMTSTTPLEKGIVIFTDGSANGRSVTYIQGREPIIKENTQNTAQQAEIVAVITAFEEVSQPFNLYTDSKYVTGLFPEIETATLSPRTKIYTELKHLQRLIHKRQEKFYIGHIRGHTGLPGPLAQGNAYADSLTRILTAGKRTADGSEFEKRTADGSEFESPKKKAKVE

SEQ ID NO: 3246 - protein, 2116 aa, synthetic construct
MPAAKRVKLDGGDKKYSIGLDIGTNSVGWAVITDEYKVPSKKFKVLGNTDRHSIKKNLIGALLFDSGETAEATRLKRTARRRYTRRKNRICYLQEIFSNEMAKVDDSFFHRLEESFLVEEDKKHERHPIFGNIVDEVAYHEKYPTIYHLRKKLVDSTDKADLRLIYLALAHMIKFRGHFLIEGDLNPDNSDVDKLFIQLVQTYNQLFEENPINASGVDAKAILSARLSKSRRLENLIAQLPGEKKNGLFGNLIALSLGLTPNFKSNFDLAEDAKLQLSKDTYDDDLDNLLAQIGDQYADLFLAAKNLSDAILLSDILRVNTEITKAPLSASMIKRYDEHHQDLTLLKALVRQQLPEKYKEIFFDQSKNGYAGYIDGGASQEEFYKFIKPILEKMDGTEELLVKLNREDLLRKQRTFDNGSIPHQIHLGELHAILRRQEDFYPFLKDNREKIEKILTFRIPYYVGPLARGNSRFAWMTRKSEETITPWNFEEVVDKGASAQSFIERMTNFDKNLPNEKVLPKHSLLYEYFTVYNELTKVKYVTEGMRKPAFLSGEQKKAIVDLLFKTNRKVTVKQLKEDYFKKIECFDSVEISGVEDRFNASLGTYHDLLKIIKDKDFLDNEENEDILEDIVLTLTLFEDREMIEERLKTYAHLFDDKVMKQLKRRRYTGWGRLSRKLINGIRDKQSGKTILDFLKSDGFANRNFMQLIHDDSLTFKEDIQKAQVSGQGDSLHEHIANLAGSPAIKKGILQTVKVVDELVKVMGRHKPENIVIEMARENQTTQKGQKNSRERMKRIEEGIKELGSQILKEHPVENTQLQNEKLYLYYLQNGRDMYVDQELDINRLSDYDVDHIVPQSFLKDDSIDNKVLTRSDKARGKSDNVPSEEVVKKMKNYWRQLLNAKLITQRKFDNLTKAERGGLSELDKAGFIKRQLVETRQITKHVAQILDSRMNTKYDENDKLIREVKVITLKSKLVSDFRKDFQFYKVREINNYHHAHDAYLNAVVGTALIKKYPKLESEFVYGDYKVYDVRKMIAKSEQEIGKATAKYFFYSNIMNFFKTEITLANGEIRKRPLIETNGETGEIVWDKGRDFATVRKVLSMPQVNIVKKTEVQTGGFSKESILPKRNSDKLIARKKDWDPKKYGGFDSPTVAYSVLVVAKVEKGKSKKLKSVKELLGITIMERSSFEKNPIDFLEAKGYKEVKKDLIIKLPKYSLFELENGRKRMLASAGELQKGNELALPSKYVNFLYLASHYEKLKGSPEDNEQKQLFVEQHKHYLDEIIEQISEFSKRVILADANLDKVLSAYNKHRDKPIREQAENIIHLFTLTNLGAPAAFKYFDTTIDRKRYTSTKEVLDATLIHQSITGLYETRIDLSQLGGDGGGSSGGSEAAAKGGWVQEISDSRPMLHIYLNGRRFLGLLNTGADKTCIAGRDWPANWPIHQTESSLQGLGMACGVARSSQPLRWQHEDKSGIIHPFVIPTLPFTLWGRDIMKDIKVRLMTDSPDDSQDLMIGAIESNLFADQISWKSDQPVWLNQWPLKQEKLQALQQLVTEQLQLGHLEESNSPWNTPVFVIKKKSGKWRLLQDLRAVNATMHDMGALQPGLPSPVAVPKGWEIIIIDLQDCFFNIKLHPEDCKRFAFSVPSPNFKRPYQRFQWKVLPQGMKNSPTLCQKFVDKAILTVRDKYQDSYIVHYMDDILLAHPSRSIVDEILTSMIQALNKHGLVVSTEKIQKYDNLKYLGTHIQGDSVSYQKLQIRTDKLRTLNDFQKLLGNINWIRPFLKLTTGELKPLFEILNPDSNPISTRKLTPEACKALQLMNERLSTARVKRLDLSQPWSLCILKTEYTPTACLWQDGVVEWIHLPHISPKVITPYDIFCTQLIIKGRHRSKELFSKDPDYIVVPYTKVQFDLLLQEKEDWPISLLGFLGEVHFHLPKDPLLTFTLQTAIIFPHMTSTTPLEKGIVIFTDGSANGRSVTYIQGREPIIKENTQNTAQQAEIVAVITAFEEVSQPFNLYTDSKYVTGLFPEIETATLSPRTKIYTELKHLQRLIHKRQEKFYIGHIRGHTGLPGPLAQGNAYADSLTRILTAGKRTADGSEFEKRTADGSEFESPKKKAKVE

SEQ ID NO: 3247 - protein, 2114 aa, synthetic construct
MPAAKRVKLDGGDKKYSIGLDIGTNSVGWAVITDEYKVPSKKFKVLGNTDRHSIKKNLIGALLFDSGETAEATRLKRTARRRYTRRKNRICYLQEIFSNEMAKVDDSFFHRLEESFLVEEDKKHERHPIFGNIVDEVAYHEKYPTIYHLRKKLVDSTDKADLRLIYLALAHMIKFRGHFLIEGDLNPDNSDVDKLFIQLVQTYNQLFEENPINASGVDAKAILSARLSKSRRLENLIAQLPGEKKNGLFGNLIALSLGLTPNFKSNFDLAEDAKLQLSKDTYDDDLDNLLAQIGDQYADLFLAAKNLSDAILLSDILRVNTEITKAPLSASMIKRYDEHHQDLTLLKALVRQQLPEKYKEIFFDQSKNGYAGYIDGGASQEEFYKFIKPILEKMDGTEELLVKLNREDLLRKQRTFDNGSIPHQIHLGELHAILRRQEDFYPFLKDNREKIEKILTFRIPYYVGPLARGNSRFAWMTRKSEETITPWNFEEVVDKGASAQSFIERMTNFDKNLPNEKVLPKHSLLYEYFTVYNELTKVKYVTEGMRKPAFLSGEQKKAIVDLLFKTNRKVTVKQLKEDYFKKIECFDSVEISGVEDRFNASLGTYHDLLKIIKDKDFLDNEENEDILEDIVLTLTLFEDREMIEERLKTYAHLFDDKVMKQLKRRRYTGWGRLSRKLINGIRDKQSGKTILDFLKSDGFANRNFMQLIHDDSLTFKEDIQKAQVSGQGDSLHEHIANLAGSPAIKKGILQTVKVVDELVKVMGRHKPENIVIEMARENQTTQKGQKNSRERMKRIEEGIKELGSQILKEHPVENTQLQNEKLYLYYLQNGRDMYVDQELDINRLSDYDVDHIVPQSFLKDDSIDNKVLTRSDKARGKSDNVPSEEVVKKMKNYWRQLLNAKLITQRKFDNLTKAERGGLSELDKAGFIKRQLVETRQITKHVAQILDSRMNTKYDENDKLIREVKVITLKSKLVSDFRKDFQFYKVREINNYHHAHDAYLNAVVGTALIKKYPKLESEFVYGDYKVYDVRKMIAKSEQEIGKATAKYFFYSNIMNFFKTEITLANGEIRKRPLIETNGETGEIVWDKGRDFATVRKVLSMPQVNIVKKTEVQTGGFSKESILPKRNSDKLIARKKDWDPKKYGGFDSPTVAYSVLVVAKVEKGKSKKLKSVKELLGITIMERSSFEKNPIDFLEAKGYKEVKKDLIIKLPKYSLFELENGRKRMLASAGELQKGNELALPSKYVNFLYLASHYEKLKGSPEDNEQKQLFVEQHKHYLDEIIEQISEFSKRVILADANLDKVLSAYNKHRDKPIREQAENIIHLFTLTNLGAPAAFKYFDTTIDRKRYTSTKEVLDATLIHQSITGLYETRIDLSQLGGDGGGGGGGSGSSGGWVQEISDSRPMLHIYLNGRRFLGLLNTGADKTCIAGRDWPANWPIHQTESSLQGLGMACGVARSSQPLRWQHEDKSGIIHPFVIPTLPFTLWGRDIMKDIKVRLMTDSPDDSQDLMIGAIESNLFADQISWKSDQPVWLNQWPLKQEKLQALQQLVTEQLQLGHLEESNSPWNTPVFVIKKKSGKWRLLQDLRAVNATMHDMGALQPGLPSPVAVPKGWEIIIIDLQDCFFNIKLHPEDCKRFAFSVPSPNFKRPYQRFQWKVLPQGMKNSPTLCQKFVDKAILTVRDKYQDSYIVHYMDDILLAHPSRSIVDEILTSMIQALNKHGLVVSTEKIQKYDNLKYLGTHIQGDSVSYQKLQIRTDKLRTLNDFQKLLGNINWIRPFLKLTTGELKPLFEILNPDSNPISTRKLTPEACKALQLMNERLSTARVKRLDLSQPWSLCILKTEYTPTACLWQDGVVEWIHLPHISPKVITPYDIFCTQLIIKGRHRSKELFSKDPDYIVVPYTKVQFDLLLQEKEDWPISLLGFLGEVHFHLPKDPLLTFTLQTAIIFPHMTSTTPLEKGIVIFTDGSANGRSVTYIQGREPIIKENTQNTAQQAEIVAVITAFEEVSQPFNLYTDSKYVTGLFPEIETATLSPRTKIYTELKHLQRLIHKRQEKFYIGHIRGHTGLPGPLAQGNAYADSLTRILTAGKRTADGSEFEKRTADGSEFESPKKKAKVE

SEQ ID NO: 3248 - protein, 2116 aa, synthetic construct
MPAAKRVKLDGGDKKYSIGLDIGTNSVGWAVITDEYKVPSKKFKVLGNTDRHSIKKNLIGALLFDSGETAEATRLKRTARRRYTRRKNRICYLQEIFSNEMAKVDDSFFHRLEESFLVEEDKKHERHPIFGNIVDEVAYHEKYPTIYHLRKKLVDSTDKADLRLIYLALAHMIKFRGHFLIEGDLNPDNSDVDKLFIQLVQTYNQLFEENPINASGVDAKAILSARLSKSRRLENLIAQLPGEKKNGLFGNLIALSLGLTPNFKSNFDLAEDAKLQLSKDTYDDDLDNLLAQIGDQYADLFLAAKNLSDAILLSDILRVNTEITKAPLSASMIKRYDEHHQDLTLLKALVRQQLPEKYKEIFFDQSKNGYAGYIDGGASQEEFYKFIKPILEKMDGTEELLVKLNREDLLRKQRTFDNGSIPHQIHLGELHAILRRQEDFYPFLKDNREKIEKILTFRIPYYVGPLARGNSRFAWMTRKSEETITPWNFEEVVDKGASAQSFIERMTNFDKNLPNEKVLPKHSLLYEYFTVYNELTKVKYVTEGMRKPAFLSGEQKKAIVDLLFKTNRKVTVKQLKEDYFKKIECFDSVEISGVEDRFNASLGTYHDLLKIIKDKDFLDNEENEDILEDIVLTLTLFEDREMIEERLKTYAHLFDDKVMKQLKRRRYTGWGRLSRKLINGIRDKQSGKTILDFLKSDGFANRNFMQLIHDDSLTFKEDIQKAQVSGQGDSLHEHIANLAGSPAIKKGILQTVKVVDELVKVMGRHKPENIVIEMARENQTTQKGQKNSRERMKRIEEGIKELGSQILKEHPVENTQLQNEKLYLYYLQNGRDMYVDQELDINRLSDYDVDHIVPQSFLKDDSIDNKVLTRSDKARGKSDNVPSEEVVKKMKNYWRQLLNAKLITQRKFDNLTKAERGGLSELDKAGFIKRQLVETRQITKHVAQILDSRMNTKYDENDKLIREVKVITLKSKLVSDFRKDFQFYKVREINNYHHAHDAYLNAVVGTALIKKYPKLESEFVYGDYKVYDVRKMIAKSEQEIGKATAKYFFYSNIMNFFKTEITLANGEIRKRPLIETNGETGEIVWDKGRDFATVRKVLSMPQVNIVKKTEVQTGGFSKESILPKRNSDKLIARKKDWDPKKYGGFDSPTVAYSVLVVAKVEKGKSKKLKSVKELLGITIMERSSFEKNPIDFLEAKGYKEVKKDLIIKLPKYSLFELENGRKRMLASAGELQKGNELALPSKYVNFLYLASHYEKLKGSPEDNEQKQLFVEQHKHYLDEIIEQISEFSKRVILADANLDKVLSAYNKHRDKPIREQAENIIHLFTLTNLGAPAAFKYFDTTIDRKRYTSTKEVLDATLIHQSITGLYETRIDLSQLGGDGGGGGEAAAKGSSGGWVQEISDSRPMLHIYLNGRRFLGLLNTGADKTCIAGRDWPANWPIHQTESSLQGLGMACGVARSSQPLRWQHEDKSGIIHPFVIPTLPFTLWGRDIMKDIKVRLMTDSPDDSQDLMIGAIESNLFADQISWKSDQPVWLNQWPLKQEKLQALQQLVTEQLQLGHLEESNSPWNTPVFVIKKKSGKWRLLQDLRAVNATMHDMGALQPGLPSPVAPPKGWEIIIIDLQDCFFNIKLHPEDCKRFAFSVPSPNFKRPYQRFQWKVLPQGMKNSPTLCQKFVDKAILTVRDKYQDSYIVHYMDDILLAHPSRSIVDEILTSMIQALNKHGLVVSTEKIQKYDNLKYLGTHIQGDSVSYQKLQIRTDKLRTLNDFQKLLGNINWIRPFLKLTTGELKPLFEILNPDSNPISTRKLTPEACKALQLMNERLSTARVKRLDLSQPWSLCILKTEYTPTACLWQDGVVEWIHLPHISPKVITPYDIFCTQLIIKGRHRSKELFSKDPDYIVVPYTKVQFDLLLQEKEDWPISLLGFLGEVHFHLPKDPLLTFTLQTAIIFPHMTSTTPLEKGIVIFTDGSANGRSVTYIQGREPIIKENTQNTAQQAEIVAVITAFEEVSQPFNLYTDSKYVTGLFPEIETATLSPRTKIYTELKHLQRLIHKRQEKFYIGHIRGHTGLPGPLAQGNAYADSLTRILTAGKRTADGSEFEKRTADGSEFESPKKKAKVE

SEQ ID NO: 3249 - protein, 2116 aa, synthetic construct
MPAAKRVKLDGGDKKYSIGLDIGTNSVGWAVITDEYKVPSKKFKVLGNTDRHSIKKNLIGALLFDSGETAEATRLKRTARRRYTRRKNRICYLQEIFSNEMAKVDDSFFHRLEESFLVEEDKKHERHPIFGNIVDEVAYHEKYPTIYHLRKKLVDSTDKADLRLIYLALAHMIKFRGHFLIEGDLNPDNSDVDKLFIQLVQTYNQLFEENPINASGVDAKAILSARLSKSRRLENLIAQLPGEKKNGLFGNLIALSLGLTPNFKSNFDLAEDAKLQLSKDTYDDDLDNLLAQIGDQYADLFLAAKNLSDAILLSDILRVNTEITKAPLSASMIKRYDEHHQDLTLLKALVRQQLPEKYKEIFFDQSKNGYAGYIDGGASQEEFYKFIKPILEKMDGTEELLVKLNREDLLRKQRTFDNGSIPHQIHLGELHAILRRQEDFYPFLKDNREKIEKILTFRIPYYVGPLARGNSRFAWMTRKSEETITPWNFEEVVDKGASAQSFIERMTNFDKNLPNEKVLPKHSLLYEYFTVYNELTKVKYVTEGMRKPAFLSGEQKKAIVDLLFKTNRKVTVKQLKEDYFKKIECFDSVEISGVEDRFNASLGTYHDLLKIIKDKDFLDNEENEDILEDIVLTLTLFEDREMIEERLKTYAHLFDDKVMKQLKRRRYTGWGRLSRKLINGIRDKQSGKTILDFLKSDGFANRNFMQLIHDDSLTFKEDIQKAQVSGQGDSLHEHIANLAGSPAIKKGILQTVKVVDELVKVMGRHKPENIVIEMARENQTTQKGQKNSRERMKRIEEGIKELGSQILKEHPVENTQLQNEKLYLYYLQNGRDMYVDQELDINRLSDYDVDHIVPQSFLKDDSIDNKVLTRSDKARGKSDNVPSEEVVKKMKNYWRQLLNAKLITQRKFDNLTKAERGGLSELDKAGFIKRQLVETRQITKHVAQILDSRMNTKYDENDKLIREVKVITLKSKLVSDFRKDFQFYKVREINNYHHAHDAYLNAVVGTALIKKYPKLESEFVYGDYKVYDVRKMIAKSEQEIGKATAKYFFYSNIMNFFKTEITLANGEIRKRPLIETNGETGEIVWDKGRDFATVRKVLSMPQVNIVKKTEVQTGGFSKESILPKRNSDKLIARKKDWDPKKYGGFDSPTVAYSVLVVAKVEKGKSKKLKSVKELLGITIMERSSFEKNPIDFLEAKGYKEVKKDLIIKLPKYSLFELENGRKRMLASAGELQKGNELALPSKYVNFLYLASHYEKLKGSPEDNEQKQLFVEQHKHYLDEIIEQISEFSKRVILADANLDKVLSAYNKHRDKPIREQAENIIHLFTLTNLGAPAAFKYFDTTIDRKRYTSTKEVLDATLIHQSITGLYETRIDLSQLGGDGGEAAAKGGGGSSGGWVQEISDSRPMLHIYLNGRRFLGLLNTGADKTCIAGRDWPANWPIHQTESSLQGLGMACGVARSSQPLRWQHEDKSGIIHPFVIPTLPFTLWGRDIMKDIKVRLMTDSPDDSQDLMIGAIESNLFADQISWKSDQPVWLNQWPLKQEKLQALQQLVTEQLQLGHLEESNSPWNTPVFVIKKKSGKWRLLQDLRAVNATMHDMGALQPGLPSPVAPPKGWEIIIIDLQDCFFNIKLHPEDCKRFAFSVPSPNFKRPYQRFQWKVLPQGMKNSPTLCQKFVDKAILTVRDKYQDSYIVHYMDDILLAHPSRSIVDEILTSMIQALNKHGLVVSTEKIQKYDNLKYLGTHIQGDSVSYQKLQIRTDKLRTLNDFQKLLGNINWIRPFLKLTTGELKPLFEILNPDSNPISTRKLTPEACKALQLMNERLSTARVKRLDLSQPWSLCILKTEYTPTACLWQDGVVEWIHLPHISPKVITPYDIFCTQLIIKGRHRSKELFSKDPDYIVVPYTKVQFDLLLQEKEDWPISLLGFLGEVHFHLPKDPLLTFTLQTAIIFPHMTSTTPLEKGIVIFTDGSANGRSVTYIQGREPIIKENTQNTAQQAEIVAVITAFEEVSQPFNLYTDSKYVTGLFPEIETATLSPRTKIYTELKHLQRLIHKRQEKFYIGHIRGHTGLPGPLAQGNAYADSLTRILTAGKRTADGSEFEKRTADGSEFESPKKKAKVE

SEQ ID NO: 3250 - protein, 2116 aa, synthetic construct
MPAAKRVKLDGGDKKYSIGLDIGTNSVGWAVITDEYKVPSKKFKVLGNTDRHSIKKNLIGALLFDSGETAEATRLKRTARRRYTRRKNRICYLQEIFSNEMAKVDDSFFHRLEESFLVEEDKKHERHPIFGNIVDEVAYHEKYPTIYHLRKKLVDSTDKADLRLIYLALAHMIKFRGHFLIEGDLNPDNSDVDKLFIQLVQTYNQLFEENPINASGVDAKAILSARLSKSRRLENLIAQLPGEKKNGLFGNLIALSLGLTPNFKSNFDLAEDAKLQLSKDTYDDDLDNLLAQIGDQYADLFLAAKNLSDAILLSDILRVNTEITKAPLSASMIKRYDEHHQDLTLLKALVRQQLPEKYKEIFFDQSKNGYAGYIDGGASQEEFYKFIKPILEKMDGTEELLVKLNREDLLRKQRTFDNGSIPHQIHLGELHAILRRQEDFYPFLKDNREKIEKILTFRIPYYVGPLARGNSRFAWMTRKSEETITPWNFEEVVDKGASAQSFIERMTNFDKNLPNEKVLPKHSLLYEYFTVYNELTKVKYVTEGMRKPAFLSGEQKKAIVDLLFKTNRKVTVKQLKEDYFKKIECFDSVEISGVEDRFNASLGTYHDLLKIIKDKDFLDNEENEDILEDIVLTLTLFEDREMIEERLKTYAHLFDDKVMKQLKRRRYTGWGRLSRKLINGIRDKQSGKTILDFLKSDGFANRNFMQLIHDDSLTFKEDIQKAQVSGQGDSLHEHIANLAGSPAIKKGILQTVKVVDELVKVMGRHKPENIVIEMARENQTTQKGQKNSRERMKRIEEGIKELGSQILKEHPVENTQLQNEKLYLYYLQNGRDMYVDQELDINRLSDYDVDHIVPQSFLKDDSIDNKVLTRSDKARGKSDNVPSEEVVKKMKNYWRQLLNAKLITQRKFDNLTKAERGGLSELDKAGFIKRQLVETRQITKHVAQILDSRMNTKYDENDKLIREVKVITLKSKLVSDFRKDFQFYKVREINNYHHAHDAYLNAVVGTALIKKYPKLESEFVYGDYKVYDVRKMIAKSEQEIGKATAKYFFYSNIMNFFKTEITLANGEIRKRPLIETNGETGEIVWDKGRDFATVRKVLSMPQVNIVKKTEVQTGGFSKESILPKRNSDKLIARKKDWDPKKYGGFDSPTVAYSVLVVAKVEKGKSKKLKSVKELLGITIMERSSFEKNPIDFLEAKGYKEVKKDLIIKLPKYSLFELENGRKRMLASAGELQKGNELALPSKYVNFLYLASHYEKLKGSPEDNEQKQLFVEQHKHYLDEIIEQISEFSKRVILADANLDKVLSAYNKHRDKPIREQAENIIHLFTLTNLGAPAAFKYFDTTIDRKRYTSTKEVLDATLIHQSITGLYETRIDLSQLGGDGGEAAAKGSSGGSGGVQEISDSRPMLHIYLNGRRFLGLLDTGADKTCIAGRDWPANWPIHQTESSLQGLGMACGVARSSQPLRWQHEDKSGIIHPFVIPTLPFTLWGRDIMKDIKVRLMTDSPDDSQDLMIGAIESNLFADQISWKSDQPVWLNQWPLKQEKLQALQQLVTEQLQLGHLEESNSPWNTPVFVIKKKSGKWRLLQDLRAVNATMHDMGALQPGLPSPPAVPKGWEIIIIDLQDCFFNIKLHPEDCKRFAFSVPSPNFKRPYQRFQWKVLPQGMKNSPTLCQKFVDKAILTVRDKYQDSYIVHYMDDILLAHPSRSIVDEILTSMIQALNKHGLVVSTEKIQKYDNLKYLGTHIQGDSVSYQKLQIRTDKLRTLNDFQKLLGNINWIRPFLKLTTGELKPLFEILNPDSNPISTRKLTPEACKALQLMNERLSTARVKRLDLSQPWSLCILKTEYTPTACLWQDGVVEWIHLPHISPKVITPYDIFCTQLIIKGRHRSKELFSKDPDYIVVPYTKVQFDLLLQEKEDWPISLLGFLGEVHFHLPKDPLLTFTLQTAIIFPHMTSTTPLEKGIVIFTDGSANGRSVTYIQGREPIIKENTQNTAQQAEIVAVITAFEEVSQPFNLYTDSKYVTGLFPEIETATLSPRTKIYTELKHLQRLIHKRQEKFYIGHIRGHTGLPGPLAQGNAYADSLTRILTAAGKRTADGSEFEKRTADGSEFESPKKKAKVE

SEQ ID NO: 3251 - protein, 2116 aa, synthetic construct
MPAAKRVKLDGGDKKYSIGLDIGTNSVGWAVITDEYKVPSKKFKVLGNTDRHSIKKNLIGALLFDSGETAEATRLKRTARRRYTRRKNRICYLQEIFSNEMAKVDDSFFHRLEESFLVEEDKKHERHPIFGNIVDEVAYHEKYPTIYHLRKKLVDSTDKADLRLIYLALAHMIKFRGHFLIEGDLNPDNSDVDKLFIQLVQTYNQLFEENPINASGVDAKAILSARLSKSRRLENLIAQLPGEKKNGLFGNLIALSLGLTPNFKSNFDLAEDAKLQLSKDTYDDDLDNLLAQIGDQYADLFLAAKNLSDAILLSDILRVNTEITKAPLSASMIKRYDEHHQDLTLLKALVRQQLPEKYKEIFFDQSKNGYAGYIDGGASQEEFYKFIKPILEKMDGTEELLVKLNREDLLRKQRTFDNGSIPHQIHLGELHAILRRQEDFYPFLKDNREKIEKILTFRIPYYVGPLARGNSRFAWMTRKSEETITPWNFEEVVDKGASAQSFIERMTNFDKNLPNEKVLPKHSLLYEYFTVYNELTKVKYVTEGMRKPAFLSGEQKKAIVDLLFKTNRKVTVKQLKEDYFKKIECFDSVEISGVEDRFNASLGTYHDLLKIIKDKDFLDNEENEDILEDIVLTLTLFEDREMIEERLKTYAHLFDDKVMKQLKRRRYTGWGRLSRKLINGIRDKQSGKTILDFLKSDGFANRNFMQLIHDDSLTFKEDIQKAQVSGQGDSLHEHIANLAGSPAIKKGILQTVKVVDELVKVMGRHKPENIVIEMARENQTTQKGQKNSRERMKRIEEGIKELGSQILKEHPVENTQLQNEKLYLYYLQNGRDMYVDQELDINRLSDYDVDHIVPQSFLKDDSIDNKVLTRSDKARGKSDNVPSEEVVKKMKNYWRQLLNAKLITQRKFDNLTKAERGGLSELDKAGFIKRQLVETRQITKHVAQILDSRMNTKYDENDKLIREVKVITLKSKLVSDFRKDFQFYKVREINNYHHAHDAYLNAVVGTALIKKYPKLESEFVYGDYKVYDVRKMIAKSEQEIGKATAKYFFYSNIMNFFKTEITLANGEIRKRPLIETNGETGEIVWDKGRDFATVRKVLSMPQVNIVKKTEVQTGGFSKESILPKRNSDKLIARKKDWDPKKYGGFDSPTVAYSVLVVAKVEKGKSKKLKSVKELLGITIMERSSFEKNPIDFLEAKGYKEVKKDLIIKLPKYSLFELENGRKRMLASAGELQKGNELALPSKYVNFLYLASHYEKLKGSPEDNEQKQLFVEQHKHYLDEIIEQISEFSKRVILADANLDKVLSAYNKHRDKPIREQAENIIHLFTLTNLGAPAAFKYFDTTIDRKRYTSTKEVLDATLIHQSITGLYETRIDLSQLGGDGGPAPEAAAKGGSGGVQEISDSRPMLHIYLNGRRFLGLLDTGADKTCIAGRDWPANWPIHQTESSLQGLGMACGVARSSQPLRWQHEDKSGIIHPFVIPTLPFTLWGRDIMKDIKVRLMTDSPDDSQDLMIGAIESNLFADQISWKSDQPVWLNQWPLKQEKLQALQQLVTEQLQLGHLEESNSPWNTPVFVIKKKSGKWRLLQDLRAVNATMHDMGALQPGLPSPPAVPKGWEIIIIDLQDCFFNIKLHPEDCKRFAFSVPSPNFKRPYQRFQWKVLPQGMKNSPTLCQKFVDKAILTVRDKYQDSYIVHYMDDILLAHPSRSIVDEILTSMIQALNKHGLVVSTEKIQKYDNLKYLGTHIQGDSVSYQKLQIRTDKLRTLNDFQKLLGNINWIRPFLKLTTGELKPLFEILNPDSNPISTRKLTPEACKALQLMNERLSTARVKRLDLSQPWSLCILKTEYTPTACLWQDGVVEWIHLPHISPKVITPYDIFCTQLIIKGRHRSKELFSKDPDYIVVPYTKVQFDLLLQEKEDWPISLLGFLGEVHFHLPKDPLLTFTLQTAIIFPHMTSTTPLEKGIVIFTDGSANGRSVTYIQGREPIIKENTQNTAQQAEIVAVITAFEEVSQPFNLYTDSKYVTGLFPEIETATLSPRTKIYTELKHLQRLIHKRQEKFYIGHIRGHTGLPGPLAQGNAYADSLTRILTAAGKRTADGSEFEKRTADGSEFESPKKKAKVE

SEQ ID NO: 3252 - protein, 2116 aa, synthetic construct
MPAAKRVKLDGGDKKYSIGLDIGTNSVGWAVITDEYKVPSKKFKVLGNTDRHSIKKNLIGALLFDSGETAEATRLKRTARRRYTRRKNRICYLQEIFSNEMAKVDDSFFHRLEESFLVEEDKKHERHPIFGNIVDEVAYHEKYPTIYHLRKKLVDSTDKADLRLIYLALAHMIKFRGHFLIEGDLNPDNSDVDKLFIQLVQTYNQLFEENPINASGVDAKAILSARLSKSRRLENLIAQLPGEKKNGLFGNLIALSLGLTPNFKSNFDLAEDAKLQLSKDTYDDDLDNLLAQIGDQYADLFLAAKNLSDAILLSDILRVNTEITKAPLSASMIKRYDEHHQDLTLLKALVRQQLPEKYKEIFFDQSKNGYAGYIDGGASQEEFYKFIKPILEKMDGTEELLVKLNREDLLRKQRTFDNGSIPHQIHLGELHAILRRQEDFYPFLKDNREKIEKILTFRIPYYVGPLARGNSRFAWMTRKSEETITPWNFEEVVDKGASAQSFIERMTNFDKNLPNEKVLPKHSLLYEYFTVYNELTKVKYVTEGMRKPAFLSGEQKKAIVDLLFKTNRKVTVKQLKEDYFKKIECFDSVEISGVEDRFNASLGTYHDLLKIIKDKDFLDNEENEDILEDIVLTLTLFEDREMIEERLKTYAHLFDDKVMKQLKRRRYTGWGRLSRKLINGIRDKQSGKTILDFLKSDGFANRNFMQLIHDDSLTFKEDIQKAQVSGQGDSLHEHIANLAGSPAIKKGILQTVKVVDELVKVMGRHKPENIVIEMARENQTTQKGQKNSRERMKRIEEGIKELGSQILKEHPVENTQLQNEKLYLYYLQNGRDMYVDQELDINRLSDYDVDHIVPQSFLKDDSIDNKVLTRSDKARGKSDNVPSEEVVKKMKNYWRQLLNAKLITQRKFDNLTKAERGGLSELDKAGFIKRQLVETRQITKHVAQILDSRMNTKYDENDKLIREVKVITLKSKLVSDFRKDFQFYKVREINNYHHAHDAYLNAVVGTALIKKYPKLESEFVYGDYKVYDVRKMIAKSEQEIGKATAKYFFYSNIMNFFKTEITLANGEIRKRPLIETNGETGEIVWDKGRDFATVRKVLSMPQVNIVKKTEVQTGGFSKESILPKRNSDKLIARKKDWDPKKYGGFDSPTVAYSVLVVAKVEKGKSKKLKSVKELLGITIMERSSFEKNPIDFLEAKGYKEVKKDLIIKLPKYSLFELENGRKRMLASAGELQKGNELALPSKYVNFLYLASHYEKLKGSPEDNEQKQLFVEQHKHYLDEIIEQISEFSKRVILADANLDKVLSAYNKHRDKPIREQAENIIHLFTLTNLGAPAAFKYFDTTIDRKRYTSTKEVLDATLIHQSITGLYETRIDLSQLGGDGGGGGGSSEAAAKGGVQEISDSRPMLHIYLNGRRFLGLLDTGADKTCIAGRDWPANWPIHQTESSLQGLGMACGVARSSQPLRWQHEDKSGIIHPFVIPTLPFTLWGRDIMKDIKVRLMTDSPDDSQDLMIGAIESNLFADQISWKSDQPVWLNQWPLKQEKLQALQQLVTEQLQLGHLEESNSPWNTPVFVIKKKSGKWRLLQDLRAVNATMHDMGALQPGLPSPVAVPKGWEIIIIDLQDCFFNIKLHPEDCKRFAFSVPSPNFKRPYQRFQWKVLPQGMKNSPTLCQKFVDKAILTVRDKYQDSYIVHYMDDILLAHPSRSIVDEILTSMIQALNKHGLVVSTEKIQKYDNLKYLGTHIQGDSVSYQKLQIRTDKLRTLNDFQKLLGNINWIRPFLKLTTGELKPLFEILNPDSNPISTRKLTPEACKALQLMNERLSTARVKRLDLSQPWSLCILKTEYTPTACLWQDGVVEWIHLPHISPKVITPYDIFCTQLIIKGRHRSKELFSKDPDYIVVPYTKVQFDLLLQEKEDWPISLLGFLGEVHFHLPKDPLLTFTLQTAIIFPHMTSTTPLEKGIVIFTDGSANGRSVTYIQGREPIIKENTQNTAQQAEIVAVITAFEEVSQPFNLYTDSKYVTGLFPEIETATLSPRTKIYTELKHLQRLIHKRQEKFYIGHIRGHTGLPGPLAQGNAYADSLTRILTAAGKRTADGSEFEKRTADGSEFESPKKKAKVE

SEQ ID NO: 3253 - protein, 2114 aa, synthetic construct
MPAAKRVKLDGGDKKYSIGLDIGTNSVGWAVITDEYKVPSKKFKVLGNTDRHSIKKNLIGALLFDSGETAEATRLKRTARRRYTRRKNRICYLQEIFSNEMAKVDDSFFHRLEESFLVEEDKKHERHPIFGNIVDEVAYHEKYPTIYHLRKKLVDSTDKADLRLIYLALAHMIKFRGHFLIEGDLNPDNSDVDKLFIQLVQTYNQLFEENPINASGVDAKAILSARLSKSRRLENLIAQLPGEKKNGLFGNLIALSLGLTPNFKSNFDLAEDAKLQLSKDTYDDDLDNLLAQIGDQYADLFLAAKNLSDAILLSDILRVNTEITKAPLSASMIKRYDEHHQDLTLLKALVRQQLPEKYKEIFFDQSKNGYAGYIDGGASQEEFYKFIKPILEKMDGTEELLVKLNREDLLRKQRTFDNGSIPHQIHLGELHAILRRQEDFYPFLKDNREKIEKILTFRIPYYVGPLARGNSRFAWMTRKSEETITPWNFEEVVDKGASAQSFIERMTNFDKNLPNEKVLPKHSLLYEYFTVYNELTKVKYVTEGMRKPAFLSGEQKKAIVDLLFKTNRKVTVKQLKEDYFKKIECFDSVEISGVEDRFNASLGTYHDLLKIIKDKDFLDNEENEDILEDIVLTLTLFEDREMIEERLKTYAHLFDDKVMKQLKRRRYTGWGRLSRKLINGIRDKQSGKTILDFLKSDGFANRNFMQLIHDDSLTFKEDIQKAQVSGQGDSLHEHIANLAGSPAIKKGILQTVKVVDELVKVMGRHKPENIVIEMARENQTTQKGQKNSRERMKRIEEGIKELGSQILKEHPVENTQLQNEKLYLYYLQNGRDMYVDQELDINRLSDYDVDHIVPQSFLKDDSIDNKVLTRSDKARGKSDNVPSEEVVKKMKNYWRQLLNAKLITQRKFDNLTKAERGGLSELDKAGFIKRQLVETRQITKHVAQILDSRMNTKYDENDKLIREVKVITLKSKLVSDFRKDFQFYKVREINNYHHAHDAYLNAVVGTALIKKYPKLESEFVYGDYKVYDVRKMIAKSEQEIGKATAKYFFYSNIMNFFKTEITLANGEIRKRPLIETNGETGEIVWDKGRDFATVRKVLSMPQVNIVKKTEVQTGGFSKESILPKRNSDKLIARKKDWDPKKYGGFDSPTVAYSVLVVAKVEKGKSKKLKSVKELLGITIMERSSFEKNPIDFLEAKGYKEVKKDLIIKLPKYSLFELENGRKRMLASAGELQKGNELALPSKYVNFLYLASHYEKLKGSPEDNEQKQLFVEQHKHYLDEIIEQISEFSKRVILADANLDKVLSAYNKHRDKPIREQAENIIHLFTLTNLGAPAAFKYFDTTIDRKRYTSTKEVLDATLIHQSITGLYETRIDLSQLGGDGGGGGGGSGSSGGVQEISDSRPMLHIYLNGRRFLGLLDTGADKTCIAGRDWPANWPIHQTESSLQGLGMACGVARSSQPLRWQHEDKSGIIHPFVIPTLPFTLWGRDIMKDIKVRLMTDSPDDSQDLMIGAIESNLFADQISWKSDQPVWLNQWPLKQEKLQALQQLVTEQLQLGHLEESNSPWNTPVFVIKKKSGKWRLLQDLRAVNATMHDMGALQPGLPSPVAVPKGWEIIIIDLQDCFFNIKLHPEDCKRFAFSVPSPNFKRPYQRFQWKVLPQGMKNSPTLCQKFVDKAILTVRDKYQDSYIVHYMDDILLAHPSRSIVDEILTSMIQALNKHGLVVSTEKIQKYDNLKYLGTHIQGDSVSYQKLQIRTDKLRTLNDFQKLLGNINWIRPFLKLTTGELKPLFEILNPDSNPISTRKLTPEACKALQLMNERLSTARVKRLDLSQPWSLCILKTEYTPTACLWQDGVVEWIHLPHISPKVITPYDIFCTQLIIKGRHRSKELFSKDPDYIVVPYTKVQFDLLLQEKEDWPISLLGFLGEVHFHLPKDPLLTFTLQTAIIFPHMTSTTPLEKGIVIFTDGSANGRSVTYIQGREPIIKENTQNTAQQAEIVAVITAFEEVSQPFNLYTDSKYVTGLFPEIETATLSPRTKIYTELKHLQRLIHKRQEKFYIGHIRGHTGLPGPLAQGNAYADSLTRILTAAGKRTADGSEFEKRTADGSEFESPKKKAKVE

SEQ ID NO: 3254 - protein, 2125 aa, synthetic construct
MPAAKRVKLDGGDKKYSIGLDIGTNSVGWAVITDEYKVPSKKFKVLGNTDRHSIKKNLIGALLFDSGETAEATRLKRTARRRYTRRKNRICYLQEIFSNEMAKVDDSFFHRLEESFLVEEDKKHERHPIFGNIVDEVAYHEKYPTIYHLRKKLVDSTDKADLRLIYLALAHMIKFRGHFLIEGDLNPDNSDVDKLFIQLVQTYNQLFEENPINASGVDAKAILSARLSKSRRLENLIAQLPGEKKNGLFGNLIALSLGLTPNFKSNFDLAEDAKLQLSKDTYDDDLDNLLAQIGDQYADLFLAAKNLSDAILLSDILRVNTEITKAPLSASMIKRYDEHHQDLTLLKALVRQQLPEKYKEIFFDQSKNGYAGYIDGGASQEEFYKFIKPILEKMDGTEELLVKLNREDLLRKQRTFDNGSIPHQIHLGELHAILRRQEDFYPFLKDNREKIEKILTFRIPYYVGPLARGNSRFAWMTRKSEETITPWNFEEVVDKGASAQSFIERMTNFDKNLPNEKVLPKHSLLYEYFTVYNELTKVKYVTEGMRKPAFLSGEQKKAIVDLLFKTNRKVTVKQLKEDYFKKIECFDSVEISGVEDRFNASLGTYHDLLKIIKDKDFLDNEENEDILEDIVLTLTLFEDREMIEERLKTYAHLFDDKVMKQLKRRRYTGWGRLSRKLINGIRDKQSGKTILDFLKSDGFANRNFMQLIHDDSLTFKEDIQKAQVSGQGDSLHEHIANLAGSPAIKKGILQTVKVVDELVKVMGRHKPENIVIEMARENQTTQKGQKNSRERMKRIEEGIKELGSQILKEHPVENTQLQNEKLYLYYLQNGRDMYVDQELDINRLSDYDVDHIVPQSFLKDDSIDNKVLTRSDKARGKSDNVPSEEVVKKMKNYWRQLLNAKLITQRKFDNLTKAERGGLSELDKAGFIKRQLVETRQITKHVAQILDSRMNTKYDENDKLIREVKVITLKSKLVSDFRKDFQFYKVREINNYHHAHDAYLNAVVGTALIKKYPKLESEFVYGDYKVYDVRKMIAKSEQEIGKATAKYFFYSNIMNFFKTEITLANGEIRKRPLIETNGETGEIVWDKGRDFATVRKVLSMPQVNIVKKTEVQTGGFSKESILPKRNSDKLIARKKDWDPKKYGGFDSPTVAYSVLVVAKVEKGKSKKLKSVKELLGITIMERSSFEKNPIDFLEAKGYKEVKKDLIIKLPKYSLFELENGRKRMLASAGELQKGNELALPSKYVNFLYLASHYEKLKGSPEDNEQKQLFVEQHKHYLDEIIEQISEFSKRVILADANLDKVLSAYNKHRDKPIREQAENIIHLFTLTNLGAPAAFKYFDTTIDRKRYTSTKEVLDATLIHQSITGLYETRIDLSQLGGDGGGGGGSGGGGSGGGGSGGGGSGGVQEISDSRPMLHIYLNGRRFLGLLDTGADKTCIAGRDWPANWPIHQTESSLQGLGMACGVARSSQPLRWQHEDKSGIIHPFVIPTLPFTLWGRDIMKDIKVRLMTDSPDDSQDLMIGAIESNLFADQISWKSDQPVWLNQWPLKQEKLQALQQLVTEQLQLGHLEESNSPWNTPVFVIKKKSGKWRLLQDLRAVNATMHDMGALQPGLPSPVAVPKGWEIIIIDLQDCFFNIKLHPEDCKRFAFSVPSPNFKRPYQRFQWKVLPQGMKNSPTLCQKFVDKAILTVRDKYQDSYIVHYMDDILLAHPSRSIVDEILTSMIQALNKHGLVVSTEKIQKYDNLKYLGTHIQGDSVSYQKLQIRTDKLRTLNDFQKLLGNINWIRPFLKLTTGELKPLFEILNPDSNPISTRKLTPEACKALQLMNERLSTARVKRLDLSQPWSLCILKTEYTPTACLWQDGVVEWIHLPHISPKVITPYDIFCTQLIIKGRHRSKELFSKDPDYIVVPYTKVQFDLLLQEKEDWPISLLGFLGEVHFHLPKDPLLTFTLQTAIIFPHMTSTTPLEKGIVIFTDGSANGRSVTYIQGREPIIKENTQNTAQQAEIVAVITAFEEVSQPFNLYTDSKYVTGLFPEIETATLSPRTKIYTELKHLQRLIHKRQEKFYIGHIRGHTGLPGPLAQGNAYADSLTRILTAAGKRTADGSEFEKRTADGSEFESPKKKAKVE

SEQ ID NO: 3255 - protein, 2116 aa, synthetic construct
MPAAKRVKLDGGDKKYSIGLDIGTNSVGWAVITDEYKVPSKKFKVLGNTDRHSIKKNLIGALLFDSGETAEATRLKRTARRRYTRRKNRICYLQEIFSNEMAKVDDSFFHRLEESFLVEEDKKHERHPIFGNIVDEVAYHEKYPTIYHLRKKLVDSTDKADLRLIYLALAHMIKFRGHFLIEGDLNPDNSDVDKLFIQLVQTYNQLFEENPINASGVDAKAILSARLSKSRRLENLIAQLPGEKKNGLFGNLIALSLGLTPNFKSNFDLAEDAKLQLSKDTYDDDLDNLLAQIGDQYADLFLAAKNLSDAILLSDILRVNTEITKAPLSASMIKRYDEHHQDLTLLKALVRQQLPEKYKEIFFDQSKNGYAGYIDGGASQEEFYKFIKPILEKMDGTEELLVKLNREDLLRKQRTFDNGSIPHQIHLGELHAILRRQEDFYPFLKDNREKIEKILTFRIPYYVGPLARGNSRFAWMTRKSEETITPWNFEEVVDKGASAQSFIERMTNFDKNLPNEKVLPKHSLLYEYFTVYNELTKVKYVTEGMRKPAFLSGEQKKAIVDLLFKTNRKVTVKQLKEDYFKKIECFDSVEISGVEDRFNASLGTYHDLLKIIKDKDFLDNEENEDILEDIVLTLTLFEDREMIEERLKTYAHLFDDKVMKQLKRRRYTGWGRLSRKLINGIRDKQSGKTILDFLKSDGFANRNFMQLIHDDSLTFKEDIQKAQVSGQGDSLHEHIANLAGSPAIKKGILQTVKVVDELVKVMGRHKPENIVIEMARENQTTQKGQKNSRERMKRIEEGIKELGSQILKEHPVENTQLQNEKLYLYYLQNGRDMYVDQELDINRLSDYDVDHIVPQSFLKDDSIDNKVLTRSDKARGKSDNVPSEEVVKKMKNYWRQLLNAKLITQRKFDNLTKAERGGLSELDKAGFIKRQLVETRQITKHVAQILDSRMNTKYDENDKLIREVKVITLKSKLVSDFRKDFQFYKVREINNYHHAHDAYLNAVVGTALIKKYPKLESEFVYGDYKVYDVRKMIAKSEQEIGKATAKYFFYSNIMNFFKTEITLANGEIRKRPLIETNGETGEIVWDKGRDFATVRKVLSMPQVNIVKKTEVQTGGFSKESILPKRNSDKLIARKKDWDPKKYGGFDSPTVAYSVLVVAKVEKGKSKKLKSVKELLGITIMERSSFEKNPIDFLEAKGYKEVKKDLIIKLPKYSLFELENGRKRMLASAGELQKGNELALPSKYVNFLYLASHYEKLKGSPEDNEQKQLFVEQHKHYLDEIIEQISEFSKRVILADANLDKVLSAYNKHRDKPIREQAENIIHLFTLTNLGAPAAFKYFDTTIDRKRYTSTKEVLDATLIHQSITGLYETRIDLSQLGGDGGPAPEAAAKGGGGGVQEISDSRPMLHIYLNGRRFLGLLDTGADKTCIAGRDWPANWPIHQTESSLQGLGMACGVARSSQPLRWQHEDKSGIIHPFVIPTLPFTLWGRDIMKDIKVRLMTDSPDDSQDLMIGAIESNLFADQISWKSDQPVWLNQWPLKQEKLQALQQLVTEQLQLGHLEESNSPWNTPVFVIKKKSGKWRLLQDLRAVNATMHDMGALQPGLPSPVAVPKGWEIIIIDLQDCFFNIKLHPEDCKRFAFSVPSPNFKRPYQRFQWKVLPQGMKNSPTLCQKFVDKAILTVRDKYQDSYIVHYMDDILLAHPSRSIVDEILTSMIQALNKHGLVVSTEKIQKYDNLKYLGTHIQGDSVSYQKLQIRTDKLRTLNDFQKLLGNINWIRPFLKLTTGELKPLFEILNPDSNPISTRKLTPEACKALQLMNERLSTARVKRLDLSQPWSLCILKTEYTPTACLWQDGVVEWIHLPHISPKVITPYDIFCTQLIIKGRHRSKELFSKDPDYIVVPYTKVQFDLLLQEKEDWPISLLGFLGEVHFHLPKDPLLTFTLQTAIIFPHMTSTTPLEKGIVIFTDGSANGRSVTYIQGREPIIKENTQNTAQQAEIVAVITAFEEVSQPFNLYTDSKYVTGLFPEIETATLSPRTKIYTELKHLQRLIHKRQEKFYIGHIRGHTGLPGPLAQGNAYADSLTRILTAAGKRTADGSEFEKRTADGSEFESPKKKAKVE

SEQ ID NO: 3256 - protein, 2112 aa, synthetic construct
MPAAKRVKLDGGDKKYSIGLDIGTNSVGWAVITDEYKVPSKKFKVLGNTDRHSIKKNLIGALLFDSGETAEATRLKRTARRRYTRRKNRICYLQEIFSNEMAKVDDSFFHRLEESFLVEEDKKHERHPIFGNIVDEVAYHEKYPTIYHLRKKLVDSTDKADLRLIYLALAHMIKFRGHFLIEGDLNPDNSDVDKLFIQLVQTYNQLFEENPINASGVDAKAILSARLSKSRRLENLIAQLPGEKKNGLFGNLIALSLGLTPNFKSNFDLAEDAKLQLSKDTYDDDLDNLLAQIGDQYADLFLAAKNLSDAILLSDILRVNTEITKAPLSASMIKRYDEHHQDLTLLKALVRQQLPEKYKEIFFDQSKNGYAGYIDGGASQEEFYKFIKPILEKMDGTEELLVKLNREDLLRKQRTFDNGSIPHQIHLGELHAILRRQEDFYPFLKDNREKIEKILTFRIPYYVGPLARGNSRFAWMTRKSEETITPWNFEEVVDKGASAQSFIERMTNFDKNLPNEKVLPKHSLLYEYFTVYNELTKVKYVTEGMRKPAFLSGEQKKAIVDLLFKTNRKVTVKQLKEDYFKKIECFDSVEISGVEDRFNASLGTYHDLLKIIKDKDFLDNEENEDILEDIVLTLTLFEDREMIEERLKTYAHLFDDKVMKQLKRRRYTGWGRLSRKLINGIRDKQSGKTILDFLKSDGFANRNFMQLIHDDSLTFKEDIQKAQVSGQGDSLHEHIANLAGSPAIKKGILQTVKVVDELVKVMGRHKPENIVIEMARENQTTQKGQKNSRERMKRIEEGIKELGSQILKEHPVENTQLQNEKLYLYYLQNGRDMYVDQELDINRLSDYDVDHIVPQSFLKDDSIDNKVLTRSDKARGKSDNVPSEEVVKKMKNYWRQLLNAKLITQRKFDNLTKAERGGLSELDKAGFIKRQLVETRQITKHVAQILDSRMNTKYDENDKLIREVKVITLKSKLVSDFRKDFQFYKVREINNYHHAHDAYLNAVVGTALIKKYPKLESEFVYGDYKVYDVRKMIAKSEQEIGKATAKYFFYSNIMNFFKTEITLANGEIRKRPLIETNGETGEIVWDKGRDFATVRKVLSMPQVNIVKKTEVQTGGFSKESILPKRNSDKLIARKKDWDPKKYGGFDSPTVAYSVLVVAKVEKGKSKKLKSVKELLGITIMERSSFEKNPIDFLEAKGYKEVKKDLIIKLPKYSLFELENGRKRMLASAGELQKGNELALPSKYVNFLYLASHYEKLKGSPEDNEQKQLFVEQHKHYLDEIIEQISEFSKRVILADANLDKVLSAYNKHRDKPIREQAENIIHLFTLTNLGAPAAFKYFDTTIDRKRYTSTKEVLDATLIHQSITGLYETRIDLSQLGGDGGPAPAPAPGGVQEISDSRPMLHIYLNGRRFLGLLDTGADKTCIAGRDWPANWPIHQTESSLQGLGMACGVARSSQPLRWQHEDKSGIIHPFVIPTLPFTLWGRDIMKDIKVRLMTDSPDDSQDLMIGAIESNLFADQISWKSDQPVWLNQWPLKQEKLQALQQLVTEQLQLGHLEESNSPWNTPVFVIKKKSGKWRLLQDLRAVNATMHDMGALQPGLPSPVAVPKGWEIIIIDLQDCFFNIKLHPEDCKRFAFSVPSPNFKRPYQRFQWKVLPQGMKNSPTLCQKFVDKAILTVRDKYQDSYIVHYMDDILLAHPSRSIVDEILTSMIQALNKHGLVVSTEKIQKYDNLKYLGTHIQGDSVSYQKLQIRTDKLRTLNDFQKLLGNINWIRPFLKLTTGELKPLFEILNPDSNPISTRKLTPEACKALQLMNERLSTARVKRLDLSQPWSLCILKTEYTPTACLWQDGVVEWIHLPHISPKVITPYDIFCTQLIIKGRHRSKELFSKDPDYIVVPYTKVQFDLLLQEKEDWPISLLGFLGEVHFHLPKDPLLTFTLQTAIIFPHMTSTTPLEKGIVIFTDGSANGRSVTYIQGREPIIKENTQNTAQQAEIVAVITAFEEVSQPFNLYTDSKYVTGLFPEIETATLSPRTKIYTELKHLQRLIHKRQEKFYIGHIRGHTGLPGPLAQGNAYADSLTRILTAAGKRTADGSEFEKRTADGSEFESPKKKAKVE

SEQ ID NO: 3257 - protein, 2116 aa, synthetic construct
MPAAKRVKLDGGDKKYSIGLDIGTNSVGWAVITDEYKVPSKKFKVLGNTDRHSIKKNLIGALLFDSGETAEATRLKRTARRRYTRRKNRICYLQEIFSNEMAKVDDSFFHRLEESFLVEEDKKHERHPIFGNIVDEVAYHEKYPTIYHLRKKLVDSTDKADLRLIYLALAHMIKFRGHFLIEGDLNPDNSDVDKLFIQLVQTYNQLFEENPINASGVDAKAILSARLSKSRRLENLIAQLPGEKKNGLFGNLIALSLGLTPNFKSNFDLAEDAKLQLSKDTYDDDLDNLLAQIGDQYADLFLAAKNLSDAILLSDILRVNTEITKAPLSASMIKRYDEHHQDLTLLKALVRQQLPEKYKEIFFDQSKNGYAGYIDGGASQEEFYKFIKPILEKMDGTEELLVKLNREDLLRKQRTFDNGSIPHQIHLGELHAILRRQEDFYPFLKDNREKIEKILTFRIPYYVGPLARGNSRFAWMTRKSEETITPWNFEEVVDKGASAQSFIERMTNFDKNLPNEKVLPKHSLLYEYFTVYNELTKVKYVTEGMRKPAFLSGEQKKAIVDLLFKTNRKVTVKQLKEDYFKKIECFDSVEISGVEDRFNASLGTYHDLLKIIKDKDFLDNEENEDILEDIVLTLTLFEDREMIEERLKTYAHLFDDKVMKQLKRRRYTGWGRLSRKLINGIRDKQSGKTILDFLKSDGFANRNFMQLIHDDSLTFKEDIQKAQVSGQGDSLHEHIANLAGSPAIKKGILQTVKVVDELVKVMGRHKPENIVIEMARENQTTQKGQKNSRERMKRIEEGIKELGSQILKEHPVENTQLQNEKLYLYYLQNGRDMYVDQELDINRLSDYDVDHIVPQSFLKDDSIDNKVLTRSDKARGKSDNVPSEEVVKKMKNYWRQLLNAKLITQRKFDNLTKAERGGLSELDKAGFIKRQLVETRQITKHVAQILDSRMNTKYDENDKLIREVKVITLKSKLVSDFRKDFQFYKVREINNYHHAHDAYLNAVVGTALIKKYPKLESEFVYGDYKVYDVRKMIAKSEQEIGKATAKYFFYSNIMNFFKTEITLANGEIRKRPLIETNGETGEIVWDKGRDFATVRKVLSMPQVNIVKKTEVQTGGFSKESILPKRNSDKLIARKKDWDPKKYGGFDSPTVAYSVLVVAKVEKGKSKKLKSVKELLGITIMERSSFEKNPIDFLEAKGYKEVKKDLIIKLPKYSLFELENGRKRMLASAGELQKGNELALPSKYVNFLYLASHYEKLKGSPEDNEQKQLFVEQHKHYLDEIIEQISEFSKRVILADANLDKVLSAYNKHRDKPIREQAENIIHLFTLTNLGAPAAFKYFDTTIDRKRYTSTKEVLDATLIHQSITGLYETRIDLSQLGGDGGEAAAKPAPGGGGGVQEISDSRPMLHIYLNGRRFLGLLDTGADKTCIAGRDWPANWPIHQTESSLQGLGMACGVARSSQPLRWQHEDKSGIIHPFVIPTLPFTLWGRDIMKDIKVRLMTDSPDDSQDLMIGAIESNLFADQISWKSDQPVWLNQWPLKQEKLQALQQLVTEQLQLGHLEESNSPWNTPVFVIKKKSGKWRLLQDLRAVNATMHDMGALQPGLPSPVAVPKGWEIIIIDLQDCFFNIKLHPEDCKRFAFSVPSPNFKRPYQRFQWKVLPQGMKNSPTLCQKFVDKAILTVRDKYQDSYIVHYMDDILLAHPSRSIVDEILTSMIQALNKHGLVVSTEKIQKYDNLKYLGTHIQGDSVSYQKLQIRTDKLRTLNDFQKLLGNINWIRPFLKLTTGELKPLFEILNPDSNPISTRKLTPEACKALQLMNERLSTARVKRLDLSQPWSLCILKTEYTPTACLWQDGVVEWIHLPHISPKVITPYDIFCTQLIIKGRHRSKELFSKDPDYIVVPYTKVQFDLLLQEKEDWPISLLGFLGEVHFHLPKDPLLTFTLQTAIIFPHMTSTTPLEKGIVIFTDGSANGRSVTYIQGREPIIKENTQNTAQQAEIVAVITAFEEVSQPFNLYTDSKYVTGLFPEIETATLSPRTKIYTELKHLQRLIHKRQEKFYIGHIRGHTGLPGPLAQGNAYADSLTRILTAAGKRTADGSEFEKRTADGSEFESPKKKAKVE

SEQ ID NO: 3258 - protein, 2116 aa, synthetic construct
MPAAKRVKLDGGDKKYSIGLDIGTNSVGWAVITDEYKVPSKKFKVLGNTDRHSIKKNLIGALLFDSGETAEATRLKRTARRRYTRRKNRICYLQEIFSNEMAKVDDSFFHRLEESFLVEEDKKHERHPIFGNIVDEVAYHEKYPTIYHLRKKLVDSTDKADLRLIYLALAHMIKFRGHFLIEGDLNPDNSDVDKLFIQLVQTYNQLFEENPINASGVDAKAILSARLSKSRRLENLIAQLPGEKKNGLFGNLIALSLGLTPNFKSNFDLAEDAKLQLSKDTYDDDLDNLLAQIGDQYADLFLAAKNLSDAILLSDILRVNTEITKAPLSASMIKRYDEHHQDLTLLKALVRQQLPEKYKEIFFDQSKNGYAGYIDGGASQEEFYKFIKPILEKMDGTEELLVKLNREDLLRKQRTFDNGSIPHQIHLGELHAILRRQEDFYPFLKDNREKIEKILTFRIPYYVGPLARGNSRFAWMTRKSEETITPWNFEEVVDKGASAQSFIERMTNFDKNLPNEKVLPKHSLLYEYFTVYNELTKVKYVTEGMRKPAFLSGEQKKAIVDLLFKTNRKVTVKQLKEDYFKKIECFDSVEISGVEDRFNASLGTYHDLLKIIKDKDFLDNEENEDILEDIVLTLTLFEDREMIEERLKTYAHLFDDKVMKQLKRRRYTGWGRLSRKLINGIRDKQSGKTILDFLKSDGFANRNFMQLIHDDSLTFKEDIQKAQVSGQGDSLHEHIANLAGSPAIKKGILQTVKVVDELVKVMGRHKPENIVIEMARENQTTQKGQKNSRERMKRIEEGIKELGSQILKEHPVENTQLQNEKLYLYYLQNGRDMYVDQELDINRLSDYDVDHIVPQSFLKDDSIDNKVLTRSDKARGKSDNVPSEEVVKKMKNYWRQLLNAKLITQRKFDNLTKAERGGLSELDKAGFIKRQLVETRQITKHVAQILDSRMNTKYDENDKLIREVKVITLKSKLVSDFRKDFQFYKVREINNYHHAHDAYLNAVVGTALIKKYPKLESEFVYGDYKVYDVRKMIAKSEQEIGKATAKYFFYSNIMNFFKTEITLANGEIRKRPLIETNGETGEIVWDKGRDFATVRKVLSMPQVNIVKKTEVQTGGFSKESILPKRNSDKLIARKKDWDPKKYGGFDSPTVAYSVLVVAKVEKGKSKKLKSVKELLGITIMERSSFEKNPIDFLEAKGYKEVKKDLIIKLPKYSLFELENGRKRMLASAGELQKGNELALPSKYVNFLYLASHYEKLKGSPEDNEQKQLFVEQHKHYLDEIIEQISEFSKRVILADANLDKVLSAYNKHRDKPIREQAENIIHLFTLTNLGAPAAFKYFDTTIDRKRYTSTKEVLDATLIHQSITGLYETRIDLSQLGGDGGPAPGGSEAAAKGGVQEISDSRPMLHIYLNGRRFLGLLDTGADKTCIAGRDWPANWPIHQTESSLQGLGMACGVARSSQPLRWQHEDKSGIIHPFVIPTLPFTLWGRDIMKDIKVRLMTDSPDDSQDLMIGAIESNLFADQISWKSDQPVWLNQWPLKQEKLQALQQLVTEQLQLGHLEESNSPWNTPVFVIKKKSGKWRLLQDLRAVNATMHDMGALQPGLPSPVAVPKGWEIIIIDLQDCFFNIKLHPEDCKRFAFSVPSPNFKRPYQRFQWKVLPQGMKNSPTLCQKFVDKAILTVRDKYQDSYIVHYMDDILLAHPSRSIVDEILTSMIQALNKHGLVVSTEKIQKYDNLKYLGTHIQGDSVSYQKLQIRTDKLRTLNDFQKLLGNINWIRPFLKLTTGELKPLFEILNPDSNPISTRKLTPEACKALQLMNERLSTARVKRLDLSQPWSLCILKTEYTPTACLWQDGVVEWIHLPHISPKVITPYDIFCTQLIIKGRHRSKELFSKDPDYIVVPYTKVQFDLLLQEKEDWPISLLGFLGEVHFHLPKDPLLTFTLQTAIIFPHMTSTTPLEKGIVIFTDGSANGRSVTYIQGREPIIKENTQNTAQQAEIVAVITAFEEVSQPFNLYTDSKYVTGLFPEIETATLSPRTKIYTELKHLQRLIHKRQEKFYIGHIRGHTGLPGPLAQGNAYADSLTRILTAAGKRTADGSEFEKRTADGSEFESPKKKAKVE

SEQ ID NO: 3259 - protein, 2123 aa, synthetic construct
MPAAKRVKLDGGDKKYSIGLDIGTNSVGWAVITDEYKVPSKKFKVLGNTDRHSIKKNLIGALLFDSGETAEATRLKRTARRRYTRRKNRICYLQEIFSNEMAKVDDSFFHRLEESFLVEEDKKHERHPIFGNIVDEVAYHEKYPTIYHLRKKLVDSTDKADLRLIYLALAHMIKFRGHFLIEGDLNPDNSDVDKLFIQLVQTYNQLFEENPINASGVDAKAILSARLSKSRRLENLIAQLPGEKKNGLFGNLIALSLGLTPNFKSNFDLAEDAKLQLSKDTYDDDLDNLLAQIGDQYADLFLAAKNLSDAILLSDILRVNTEITKAPLSASMIKRYDEHHQDLTLLKALVRQQLPEKYKEIFFDQSKNGYAGYIDGGASQEEFYKFIKPILEKMDGTEELLVKLNREDLLRKQRTFDNGSIPHQIHLGELHAILRRQEDFYPFLKDNREKIEKILTFRIPYYVGPLARGNSRFAWMTRKSEETITPWNFEEVVDKGASAQSFIERMTNFDKNLPNEKVLPKHSLLYEYFTVYNELTKVKYVTEGMRKPAFLSGEQKKAIVDLLFKTNRKVTVKQLKEDYFKKIECFDSVEISGVEDRFNASLGTYHDLLKIIKDKDFLDNEENEDILEDIVLTLTLFEDREMIEERLKTYAHLFDDKVMKQLKRRRYTGWGRLSRKLINGIRDKQSGKTILDFLKSDGFANRNFMQLIHDDSLTFKEDIQKAQVSGQGDSLHEHIANLAGSPAIKKGILQTVKVVDELVKVMGRHKPENIVIEMARENQTTQKGQKNSRERMKRIEEGIKELGSQILKEHPVENTQLQNEKLYLYYLQNGRDMYVDQELDINRLSDYDVDHIVPQSFLKDDSIDNKVLTRSDKARGKSDNVPSEEVVKKMKNYWRQLLNAKLITQRKFDNLTKAERGGLSELDKAGFIKRQLVETRQITKHVAQILDSRMNTKYDENDKLIREVKVITLKSKLVSDFRKDFQFYKVREINNYHHAHDAYLNAVVGTALIKKYPKLESEFVYGDYKVYDVRKMIAKSEQEIGKATAKYFFYSNIMNFFKTEITLANGEIRKRPLIETNGETGEIVWDKGRDFATVRKVLSMPQVNIVKKTEVQTGGFSKESILPKRNSDKLIARKKDWDPKKYGGFDSPTVAYSVLVVAKVEKGKSKKLKSVKELLGITIMERSSFEKNPIDFLEAKGYKEVKKDLIIKLPKYSLFELENGRKRMLASAGELQKGNELALPSKYVNFLYLASHYEKLKGSPEDNEQKQLFVEQHKHYLDEIIEQISEFSKRVILADANLDKVLSAYNKHRDKPIREQAENIIHLFTLTNLGAPAAFKYFDTTIDRKRYTSTKEVLDATLIHQSITGLYETRIDLSQLGGDGGGSSGSSGSSGSSGSSGSSGGVQEISDSRPMLHIYLNGRRFLGLLDTGADKTCIAGRDWPANWPIHQTESSLQGLGMACGVARSSQPLRWQHEDKSGIIHPFVIPTLPFTLWGRDIMKDIKVRLMTDSPDDSQDLMIGAIESNLFADQISWKSDQPVWLNQWPLKQEKLQALQQLVTEQLQLGHLEESNSPWNTPVFVIKKKSGKWRLLQDLRAVNATMHDMGALQPGLPSPVAVPKGWEIIIIDLQDCFFNIKLHPEDCKRFAFSVPSPNFKRPYQRFQWKVLPQGMKNSPTLCQKFVDKAILTVRDKYQDSYIVHYMDDILLAHPSRSIVDEILTSMIQALNKHGLVVSTEKIQKYDNLKYLGTHIQGDSVSYQKLQIRTDKLRTLNDFQKLLGNINWIRPFLKLTTGELKPLFEILNPDSNPISTRKLTPEACKALQLMNERLSTARVKRLDLSQPWSLCILKTEYTPTACLWQDGVVEWIHLPHISPKVITPYDIFCTQLIIKGRHRSKELFSKDPDYIVVPYTKVQFDLLLQEKEDWPISLLGFLGEVHFHLPKDPLLTFTLQTAIIFPHMTSTTPLEKGIVIFTDGSANGRSVTYIQGREPIIKENTQNTAQQAEIVAVITAFEEVSQPFNLYTDSKYVTGLFPEIETATLSPRTKIYTELKHLQRLIHKRQEKFYIGHIRGHTGLPGPLAQGNAYADSLTRILTAAGKRTADGSEFEKRTADGSEFESPKKKAKVE

SEQ ID NO: 3260 - protein, 2125 aa, synthetic construct; identical to SEQ ID NO: 3157

SEQ ID NO: 3261 - protein, 2116 aa, synthetic construct
MPAAKRVKLDGGDKKYSIGLDIGTNSVGWAVITDEYKVPSKKFKVLGNTDRHSIKKNLIGALLFDSGETAEATRLKRTARRRYTRRKNRICYLQEIFSNEMAKVDDSFFHRLEESFLVEEDKKHERHPIFGNIVDEVAYHEKYPTIYHLRKKLVDSTDKADLRLIYLALAHMIKFRGHFLIEGDLNPDNSDVDKLFIQLVQTYNQLFEENPINASGVDAKAILSARLSKSRRLENLIAQLPGEKKNGLFGNLIALSLGLTPNFKSNFDLAEDAKLQLSKDTYDDDLDNLLAQIGDQYADLFLAAKNLSDAILLSDILRVNTEITKAPLSASMIKRYDEHHQDLTLLKALVRQQLPEKYKEIFFDQSKNGYAGYIDGGASQEEFYKFIKPILEKMDGTEELLVKLNREDLLRKQRTFDNGSIPHQIHLGELHAILRRQEDFYPFLKDNREKIEKILTFRIPYYVGPLARGNSRFAWMTRKSEETITPWNFEEVVDKGASAQSFIERMTNFDKNLPNEKVLPKHSLLYEYFTVYNELTKVKYVTEGMRKPAFLSGEQKKAIVDLLFKTNRKVTVKQLKEDYFKKIECFDSVEISGVEDRFNASLGTYHDLLKIIKDKDFLDNEENEDILEDIVLTLTLFEDREMIEERLKTYAHLFDDKVMKQLKRRRYTGWGRLSRKLINGIRDKQSGKTILDFLKSDGFANRNFMQLIHDDSLTFKEDIQKAQVSGQGDSLHEHIANLAGSPAIKKGILQTVKVVDELVKVMGRHKPENIVIEMARENQTTQKGQKNSRERMKRIEEGIKELGSQILKEHPVENTQLQNEKLYLYYLQNGRDMYVDQELDINRLSDYDVDHIVPQSFLKDDSIDNKVLTRSDKARGKSDNVPSEEVVKKMKNYWRQLLNAKLITQRKFDNLTKAERGGLSELDKAGFIKRQLVETRQITKHVAQILDSRMNTKYDENDKLIREVKVITLKSKLVSDFRKDFQFYKVREINNYHHAHDAYLNAVVGTALIKKYPKLESEFVYGDYKVYDVRKMIAKSEQEIGKATAKYFFYSNIMNFFKTEITLANGEIRKRPLIETNGETGEIVWDKGRDFATVRKVLSMPQVNIVKKTEVQTGGFSKESILPKRNSDKLIARKKDWDPKKYGGFDSPTVAYSVLVVAKVEKGKSKKLKSVKELLGITIMERSSFEKNPIDFLEAKGYKEVKKDLIIKLPKYSLFELENGRKRMLASAGELQKGNELALPSKYVNFLYLASHYEKLKGSPEDNEQKQLFVEQHKHYLDEIIEQISEFSKRVILADANLDKVLSAYNKHRDKPIREQAENIIHLFTLTNLGAPAAFKYFDTTIDRKRYTSTKEVLDATLIHQSITGLYETRIDLSQLGGDGGGGSGSSEAAAKGGVQEISDSRPMLHIYLNGRRFLGLLDTGADKTCIAGRDWPANWPIHQTESSLQGLGMACGVARSSQPLRWQHEDKSGIIHPFVIPTLPFTLWGRDIMKDIKVRLMTDSPDDSQDLMIGAIESNLFADQISWKSDQPVWLNQWPLKQEKLQALQQLVTEQLQLGHLEESNSPWNTPVFVIKKKSGKWRLLQDLRAVNATMHDMGALQPGLPSPVAVPKGWEIIIIDLQDCFFNIKLHPEDCKRFAFSVPSPNFKRPYQRFQWKVLPQGMKNSPTLCQKFVDKAILTVRDKYQDSYIVHYMDDILLAHPSRSIVDEILTSMIQALNKHGLVVSTEKIQKYDNLKYLGTHIQGDSVSYQKLQIRTDKLRTLNDFQKLLGNINWIRPFLKLTTGELKPLFEILNGDSNPISTRKLTPEACKALQLMNERLSTARVKRLDLSQPWSLCILKTEYTPTACLWQDGVVEWIHLPHISPKVITPYDIFCTQLIIKGRHRSKELFSKDPDYIVVPYTKVQFDLLLQEKEDWPISLLGFLGEVHFHLPKDPLLTFTLQTAIIFPHMTSTTPLEKGIVIFTDGSANGRSVTYIQGREPIIKENTQNTAQQAEIVAVITAFEEVSQPFNLYTDSKYVTGLFPEIETATLSPRTKIYTELKHLQRLIHKRQEKFYIGHIRGHTGLPGPLAQGNAYADSLTRILTAAGKRTADGSEFEKRTADGSEFESPKKKAKVE

SEQ ID NO: 3262 - protein, 2114 aa, synthetic construct
MPAAKRVKLDGGDKKYSIGLDIGTNSVGWAVITDEYKVPSKKFKVLGNTDRHSIKKNLIGALLFDSGETAEATRLKRTARRRYTRRKNRICYLQEIFSNEMAKVDDSFFHRLEESFLVEEDKKHERHPIFGNIVDEVAYHEKYPTIYHLRKKLVDSTDKADLRLIYLALAHMIKFRGHFLIEGDLNPDNSDVDKLFIQLVQTYNQLFEENPINASGVDAKAILSARLSKSRRLENLIAQLPGEKKNGLFGNLIALSLGLTPNFKSNFDLAEDAKLQLSKDTYDDDLDNLLAQIGDQYADLFLAAKNLSDAILLSDILRVNTEITKAPLSASMIKRYDEHHQDLTLLKALVRQQLPEKYKEIFFDQSKNGYAGYIDGGASQEEFYKFIKPILEKMDGTEELLVKLNREDLLRKQRTFDNGSIPHQIHLGELHAILRRQEDFYPFLKDNREKIEKILTFRIPYYVGPLARGNSRFAWMTRKSEETITPWNFEEVVDKGASAQSFIERMTNFDKNLPNEKVLPKHSLLYEYFTVYNELTKVKYVTEGMRKPAFLSGEQKKAIVDLLFKTNRKVTVKQLKEDYFKKIECFDSVEISGVEDRFNASLGTYHDLLKIIKDKDFLDNEENEDILEDIVLTLTLFEDREMIEERLKTYAHLFDDKVMKQLKRRRYTGWGRLSRKLINGIRDKQSGKTILDFLKSDGFANRNFMQLIHDDSLTFKEDIQKAQVSGQGDSLHEHIANLAGSPAIKKGILQTVKVVDELVKVMGRHKPENIVIEMARENQTTQKGQKNSRERMKRIEEGIKELGSQILKEHPVENTQLQNEKLYLYYLQNGRDMYVDQELDINRLSDYDVDHIVPQSFLKDDSIDNKVLTRSDKARGKSDNVPSEEVVKKMKNYWRQLLNAKLITQRKFDNLTKAERGGLSELDKAGFIKRQLVETRQITKHVAQILDSRMNTKYDENDKLIREVKVITLKSKLVSDFRKDFQFYKVREINNYHHAHDAYLNAVVGTALIKKYPKLESEFVYGDYKVYDVRKMIAKSEQEIGKATAKYFFYSNIMNFFKTEITLANGEIRKRPLIETNGETGEIVWDKGRDFATVRKVLSMPQVNIVKKTEVQTGGFSKESILPKRNSDKLIARKKDWDPKKYGGFDSPTVAYSVLVVAKVEKGKSKKLKSVKELLGITIMERSSFEKNPIDFLEAKGYKEVKKDLIIKLPKYSLFELENGRKRMLASAGELQKGNELALPSKYVNFLYLASHYEKLKGSPEDNEQKQLFVEQHKHYLDEIIEQISEFSKRVILADANLDKVLSAYNKHRDKPIREQAENIIHLFTLTNLGAPAAFKYFDTTIDRKRYTSTKEVLDATLIHQSITGLYETRIDLSQLGGDGGPAPAPAPAPGGVQEISDSRPMLHIYLNGRRFLGLLDTGADKTCIAGRDWPANWPIHQTESSLQGLGMACGVARSSQPLRWQHEDKSGIIHPFVIPTLPFTLWGRDIMKDIKVRLMTDSPDDSQDLMIGAIESNLFADQISWKSDQPVWLNQWPLKQEKLQALQQLVTEQLQLGHLEESNSPWNTPVFVIKKKSGKWRLLQDLRAVNATMHDMGALQPGLPSPVAVPKGWEIIIIDLQDCFFNIKLHPEDCKRFAFSVPSPNFKRPYQRFQWKVLPQGMKNSPTLCQKFVDKAILTVRDKYQDSYIVHYMDDILLAHPSRSIVDEILTSMIQALNKHGLVVSTEKIQKYDNLKYLGTHIQGDSVSYQKLQIRTDKLRTLNDFQKLLGNINWIRPFLKLTTGELKPLFEILNGDSNPISTRKLTPEACKALQLMNERLSTARVKRLDLSQPWSLCILKTEYTPTACLWQDGVVEWIHLPHISPKVITPYDIFCTQLIIKGRHRSKELFSKDPDYIVVPYTKVQFDLLLQEKEDWPISLLGFLGEVHFHLPKDPLLTFTLQTAIIFPHMTSTTPLEKGIVIFTDGSANGRSVTYIQGREPIIKENTQNTAQQAEIVAVITAFEEVSQPFNLYTDSKYVTGLFPEIETATLSPRTKIYTELKHLQRLIHKRQEKFYIGHIRGHTGLPGPLAQGNAYADSLTRILTAAGKRTADGSEFEKRTADGSEFESPKKKAKVE

SEQ ID NO: 3263 - protein, 2116 aa, synthetic construct; identical to SEQ ID NO: 3146

SEQ ID NO: 3264 - protein, 2114 aa, synthetic construct
MPAAKRVKLDGGDKKYSIGLDIGTNSVGWAVITDEYKVPSKKFKVLGNTDRHSIKKNLIGALLFDSGETAEATRLKRTARRRYTRRKNRICYLQEIFSNEMAKVDDSFFHRLEESFLVEEDKKHERHPIFGNIVDEVAYHEKYPTIYHLRKKLVDSTDKADLRLIYLALAHMIKFRGHFLIEGDLNPDNSDVDKLFIQLVQTYNQLFEENPINASGVDAKAILSARLSKSRRLENLIAQLPGEKKNGLFGNLIALSLGLTPNFKSNFDLAEDAKLQLSKDTYDDDLDNLLAQIGDQYADLFLAAKNLSDAILLSDILRVNTEITKAPLSASMIKRYDEHHQDLTLLKALVRQQLPEKYKEIFFDQSKNGYAGYIDGGASQEEFYKFIKPILEKMDGTEELLVKLNREDLLRKQRTFDNGSIPHQIHLGELHAILRRQEDFYPFLKDNREKIEKILTFRIPYYVGPLARGNSRFAWMTRKSEETITPWNFEEVVDKGASAQSFIERMTNFDKNLPNEKVLPKHSLLYEYFTVYNELTKVKYVTEGMRKPAFLSGEQKKAIVDLLFKTNRKVTVKQLKEDYFKKIECFDSVEISGVEDRFNASLGTYHDLLKIIKDKDFLDNEENEDILEDIVLTLTLFEDREMIEERLKTYAHLFDDKVMKQLKRRRYTGWGRLSRKLINGIRDKQSGKTILDFLKSDGFANRNFMQLIHDDSLTFKEDIQKAQVSGQGDSLHEHIANLAGSPAIKKGILQTVKVVDELVKVMGRHKPENIVIEMARENQTTQKGQKNSRERMKRIEEGIKELGSQILKEHPVENTQLQNEKLYLYYLQNGRDMYVDQELDINRLSDYDVDHIVPQSFLKDDSIDNKVLTRSDKARGKSDNVPSEEVVKKMKNYWRQLLNAKLITQRKFDNLTKAERGGLSELDKAGFIKRQLVETRQITKHVAQILDSRMNTKYDENDKLIREVKVITLKSKLVSDFRKDFQFYKVREINNYHHAHDAYLNAVVGTALIKKYPKLESEFVYGDYKVYDVRKMIAKSEQEIGKATAKYFFYSNIMNFFKTEITLANGEIRKRPLIETNGETGEIVWDKGRDFATVRKVLSMPQVNIVKKTEVQTGGFSKESILPKRNSDKLIARKKDWDPKKYGGFDSPTVAYSVLVVAKVEKGKSKKLKSVKELLGITIMERSSFEKNPIDFLEAKGYKEVKKDLIIKLPKYSLFELENGRKRMLASAGELQKGNELALPSKYVNFLYLASHYEKLKGSPEDNEQKQLFVEQHKHYLDEIIEQISEFSKRVILADANLDKVLSAYNKHRDKPIREQAENIIHLFTLTNLGAPAAFKYFDTTIDRKRYTSTKEVLDATLIHQSITGLYETRIDLSQLGGDGGGSSPAPGGGGGVQEISDSRPMLHIYLNGRRFLGLLDTGADKTCIAGRDWPANWPIHQTESSLQGLGMACGVARSSQPLRWQHEDKSGIIHPFVIPTLPFTLWGRDIMKDIKVRLMTDSPDDSQDLMIGAIESNLFADQISWKSDQPVWLNQWPLKQEKLQALQQLVTEQLQLGHLEESNSPWNTPVFVIKKKSGKWRLLQDLRAVNATMHDMGALQPGLPSPVAVPKGWEIIIIDLQDCFFNIKLHPEDCKRFAFSVPSPNFKRPYQRFQWKVLPQGMKNSPTLCQKFVDKAILTVRDKYQDSYIVHYMDDILLAHPSRSIVDEILTSMIQALNKHGLVVSTEKIQKYDNLKYLGTHIQGDSVSYQKLQIRTDKLRTLNDFQKLLGNINWIRPFLKLTTGELKPLFEILNGDSNPISTRKLTPEACKALQLMNERLSTARVKRLDLSQPWSLCILKTEYTPTACLWQDGVVEWIHLPHISPKVITPYDIFCTQLIIKGRHRSKELFSKDPDYIVVPYTKVQFDLLLQEKEDWPISLLGFLGEVHFHLPKDPLLTFTLQTAIIFPHMTSTTPLEKGIVIFTDGSANGRSVTYIQGREPIIKENTQNTAQQAEIVAVITAFEEVSQPFNLYTDSKYVTGLFPEIETATLSPRTKIYTELKHLQRLIHKRQEKFYIGHIRGHTGLPGPLAQGNAYADSLTRILTAAGKRTADGSEFEKRTADGSEFESPKKKAKVE

SEQ ID NO: 3265 - protein, 2116 aa, synthetic construct
MPAAKRVKLDGGDKKYSIGLDIGTNSVGWAVITDEYKVPSKKFKVLGNTDRHSIKKNLIGALLFDSGETAEATRLKRTARRRYTRRKNRICYLQEIFSNEMAKVDDSFFHRLEESFLVEEDKKHERHPIFGNIVDEVAYHEKYPTIYHLRKKLVDSTDKADLRLIYLALAHMIKFRGHFLIEGDLNPDNSDVDKLFIQLVQTYNQLFEENPINASGVDAKAILSARLSKSRRLENLIAQLPGEKKNGLFGNLIALSLGLTPNFKSNFDLAEDAKLQLSKDTYDDDLDNLLAQIGDQYADLFLAAKNLSDAILLSDILRVNTEITKAPLSASMIKRYDEHHQDLTLLKALVRQQLPEKYKEIFFDQSKNGYAGYIDGGASQEEFYKFIKPILEKMDGTEELLVKLNREDLLRKQRTFDNGSIPHQIHLGELHAILRRQEDFYPFLKDNREKIEKILTFRIPYYVGPLARGNSRFAWMTRKSEETITPWNFEEVVDKGASAQSFIERMTNFDKNLPNEKVLPKHSLLYEYFTVYNELTKVKYVTEGMRKPAFLSGEQKKAIVDLLFKTNRKVTVKQLKEDYFKKIECFDSVEISGVEDRFNASLGTYHDLLKIIKDKDFLDNEENEDILEDIVLTLTLFEDREMIEERLKTYAHLFDDKVMKQLKRRRYTGWGRLSRKLINGIRDKQSGKTILDFLKSDGFANRNFMQLIHDDSLTFKEDIQKAQVSGQGDSLHEHIANLAGSPAIKKGILQTVKVVDELVKVMGRHKPENIVIEMARENQTTQKGQKNSRERMKRIEEGIKELGSQILKEHPVENTQLQNEKLYLYYLQNGRDMYVDQELDINRLSDYDVDHIVPQSFLKDDSIDNKVLTRSDKARGKSDNVPSEEVVKKMKNYWRQLLNAKLITQRKFDNLTKAERGGLSELDKAGFIKRQLVETRQITKHVAQILDSRMNTKYDENDKLIREVKVITLKSKLVSDFRKDFQFYKVREINNYHHAHDAYLNAVVGTALIKKYPKLESEFVYGDYKVYDVRKMIAKSEQEIGKATAKYFFYSNIMNFFKTEITLANGEIRKRPLIETNGETGEIVWDKGRDFATVRKVLSMPQVNIVKKTEVQTGGFSKESILPKRNSDKLIARKKDWDPKKYGGFDSPTVAYSVLVVAKVEKGKSKKLKSVKELLGITIMERSSFEKNPIDFLEAKGYKEVKKDLIIKLPKYSLFELENGRKRMLASAGELQKGNELALPSKYVNFLYLASHYEKLKGSPEDNEQKQLFVEQHKHYLDEIIEQISEFSKRVILADANLDKVLSAYNKHRDKPIREQAENIIHLFTLTNLGAPAAFKYFDTTIDRKRYTSTKEVLDATLIHQSITGLYETRIDLSQLGGDGGGSSEAAAKPAPGGVQEISDSRPMLHIYLNGRRFLGLLDTGADKTCIAGRDWPANWPIHQTESSLQGLGMACGVARSSQPLRWQHEDKSGIIHPFVIPTLPFTLWGRDIMKDIKVRLMTDSPDDSQDLMIGAIESNLFADQISWKSDQPVWLNQWPLKQEKLQALQQLVTEQLQLGHLEESNSPWNTPVFVIKKKSGKWRLLQDLRAVNATMHDMGALQPGLPSPVAVPKGWEIIIIDLQDCFFNIKLHPEDCKRFAFSVPSPNFKRPYQRFQWKVLPQGMKNSPTLCQKFVDKAILTVRDKYQDSYIVHYMDDILLAHPSRSIVDEILTSMIQALNKHGLVVSTEKIQKYDNLKYLGTHIQGDSVSYQKLQIRTDKLRTLNDFQKLLGNINWIRPFLKLTTGELKPLFEILNGDSNPISTRKLTPEACKALQLMNERLSTARVKRLDLSQPWSLCILKTEYTPTACLWQDGVVEWIHLPHISPKVITPYDIFCTQLIIKGRHRSKELFSKDPDYIVVPYTKVQFDLLLQEKEDWPISLLGFLGEVHFHLPKDPLLTFTLQTAIIFPHMTSTTPLEKGIVIFTDGSANGRSVTYIQGREPIIKENTQNTAQQAEIVAVITAFEEVSQPFNLYTDSKYVTGLFPEIETATLSPRTKIYTELKHLQRLIHKRQEKFYIGHIRGHTGLPGPLAQGNAYADSLTRILTAAGKRTADGSEFEKRTADGSEFESPKKKAKVE

SEQ ID NO: 3266 - protein, 2120 aa, synthetic construct
MPAAKRVKLDGGDKKYSIGLDIGTNSVGWAVITDEYKVPSKKFKVLGNTDRHSIKKNLIGALLFDSGETAEATRLKRTARRRYTRRKNRICYLQEIFSNEMAKVDDSFFHRLEESFLVEEDKKHERHPIFGNIVDEVAYHEKYPTIYHLRKKLVDSTDKADLRLIYLALAHMIKFRGHFLIEGDLNPDNSDVDKLFIQLVQTYNQLFEENPINASGVDAKAILSARLSKSRRLENLIAQLPGEKKNGLFGNLIALSLGLTPNFKSNFDLAEDAKLQLSKDTYDDDLDNLLAQIGDQYADLFLAAKNLSDAILLSDILRVNTEITKAPLSASMIKRYDEHHQDLTLLKALVRQQLPEKYKEIFFDQSKNGYAGYIDGGASQEEFYKFIKPILEKMDGTEELLVKLNREDLLRKQRTFDNGSIPHQIHLGELHAILRRQEDFYPFLKDNREKIEKILTFRIPYYVGPLARGNSRFAWMTRKSEETITPWNFEEVVDKGASAQSFIERMTNFDKNLPNEKVLPKHSLLYEYFTVYNELTKVKYVTEGMRKPAFLSGEQKKAIVDLLFKTNRKVTVKQLKEDYFKKIECFDSVEISGVEDRFNASLGTYHDLLKIIKDKDFLDNEENEDILEDIVLTLTLFEDREMIEERLKTYAHLFDDKVMKQLKRRRYTGWGRLSRKLINGIRDKQSGKTILDFLKSDGFANRNFMQLIHDDSLTFKEDIQKAQVSGQGDSLHEHIANLAGSPAIKKGILQTVKVVDELVKVMGRHKPENIVIEMARENQTTQKGQKNSRERMKRIEEGIKELGSQILKEHPVENTQLQNEKLYLYYLQNGRDMYVDQELDINRLSDYDVDHIVPQSFLKDDSIDNKVLTRSDKARGKSDNVPSEEVVKKMKNYWRQLLNAKLITQRKFDNLTKAERGGLSELDKAGFIKRQLVETRQITKHVAQILDSRMNTKYDENDKLIREVKVITLKSKLVSDFRKDFQFYKVREINNYHHAHDAYLNAVVGTALIKKYPKLESEFVYGDYKVYDVRKMIAKSEQEIGKATAKYFFYSNIMNFFKTEITLANGEIRKRPLIETNGETGEIVWDKGRDFATVRKVLSMPQVNIVKKTEVQTGGFSKESILPKRNSDKLIARKKDWDPKKYGGFDSPTVAYSVLVVAKVEKGKSKKLKSVKELLGITIMERSSFEKNPIDFLEAKGYKEVKKDLIIKLPKYSLFELENGRKRMLASAGELQKGNELALPSKYVNFLYLASHYEKLKGSPEDNEQKQLFVEQHKHYLDEIIEQISEFSKRVILADANLDKVLSAYNKHRDKPIREQAENIIHLFTLTNLGAPAAFKYFDTTIDRKRYTSTKEVLDATLIHQSITGLYETRIDLSQLGGDGGGGSGGSGGSGGSGGSGGWVQEISDSRPMLHIYLNGRRFLGLLNTGADKTCIAGRDWPANWPIHQTESSLQGLGMACGVARSSQPLRWQHEDKSGIIHPFVIPTLPFTLWGRDIMKDIKVRLMTDSPDDSQDLMIGAIESNLFADQISWKSDQPVWLNQWPLKQEKLQALQQLVTEQLQLGHLEESNSPWNTPVFVIKKKSGKWRLLQDLRAVNATMHDMGALQPGLPSPVAVPKGWEIIIIDLQDCFFNIKLHPEDCKRFAFSVPSPNFKRPYQRFQWKVLPQGMKNSPTLCQKFVDKAILTVRDKYQDSYIVHYMDDILLAHPSRSIVDEILTSMIQALNKHGLVVSTEKIQKYDNLKYLGTHIQGDSVSYQKLQIRTDKLRTLNDFQKLLGNINWIRPFLKLTTGELKPLFEILNGDSNPISTRKLTPEACKALQLMNERLSTARVKRLDLSQPWSLCILKTEYTPTACLWQDGVVEWIHLPHISPKVITPYDIFCTQLIIKGRHRSKELFSKDPDYIVVPYTKVQFDLLLQEKEDWPISLLGFLGEVHFHLPKDPLLTFTLQTAIIFPHMTSTTPLEKGIVIFTDGSANGRSVTYIQGREPIIKENTQNTAQQAEIVAVITAFEEVSQPFNLYTDSKYVTGLFPEIETATLSPRTKIYTELKHLQRLIHKRQEKFYIGHIRGHTGLPGPLAQGNAYADSLTRILTAGKRTADGSEFEKRTADGSEFESPKKKAKVE

SEQ ID NO: 3267 - protein, 2151 aa, synthetic construct
MPAAKRVKLDGGDKKYSIGLDIGTNSVGWAVITDEYKVPSKKFKVLGNTDRHSIKKNLIGALLFDSGETAEATRLKRTARRRYTRRKNRICYLQEIFSNEMAKVDDSFFHRLEESFLVEEDKKHERHPIFGNIVDEVAYHEKYPTIYHLRKKLVDSTDKADLRLIYLALAHMIKFRGHFLIEGDLNPDNSDVDKLFIQLVQTYNQLFEENPINASGVDAKAILSARLSKSRRLENLIAQLPGEKKNGLFGNLIALSLGLTPNFKSNFDLAEDAKLQLSKDTYDDDLDNLLAQIGDQYADLFLAAKNLSDAILLSDILRVNTEITKAPLSASMIKRYDEHHQDLTLLKALVRQQLPEKYKEIFFDQSKNGYAGYIDGGASQEEFYKFIKPILEKMDGTEELLVKLNREDLLRKQRTFDNGSIPHQIHLGELHAILRRQEDFYPFLKDNREKIEKILTFRIPYYVGPLARGNSRFAWMTRKSEETITPWNFEEVVDKGASAQSFIERMTNFDKNLPNEKVLPKHSLLYEYFTVYNELTKVKYVTEGMRKPAFLSGEQKKAIVDLLFKTNRKVTVKQLKEDYFKKIECFDSVEISGVEDRFNASLGTYHDLLKIIKDKDFLDNEENEDILEDIVLTLTLFEDREMIEERLKTYAHLFDDKVMKQLKRRRYTGWGRLSRKLINGIRDKQSGKTILDFLKSDGFANRNFMQLIHDDSLTFKEDIQKAQVSGQGDSLHEHIANLAGSPAIKKGILQTVKVVDELVKVMGRHKPENIVIEMARENQTTQKGQKNSRERMKRIEEGIKELGSQILKEHPVENTQLQNEKLYLYYLQNGRDMYVDQELDINRLSDYDVDHIVPQSFLKDDSIDNKVLTRSDKARGKSDNVPSEEVVKKMKNYWRQLLNAKLITQRKFDNLTKAERGGLSELDKAGFIKRQLVETRQITKHVAQILDSRMNTKYDENDKLIREVKVITLKSKLVSDFRKDFQFYKVREINNYHHAHDAYLNAVVGTALIKKYPKLESEFVYGDYKVYDVRKMIAKSEQEIGKATAKYFFYSNIMNFFKTEITLANGEIRKRPLIETNGETGEIVWDKGRDFATVRKVLSMPQVNIVKKTEVQTGGFSKESILPKRNSDKLIARKKDWDPKKYGGFDSPTVAYSVLVVAKVEKGKSKKLKSVKELLGITIMERSSFEKNPIDFLEAKGYKEVKKDLIIKLPKYSLFELENGRKRMLASAGELQKGNELALPSKYVNFLYLASHYEKLKGSPEDNEQKQLFVEQHKHYLDEIIEQISEFSKRVILADANLDKVLSAYNKHRDKPIREQAENIIHLFTLTNLGAPAAFKYFDTTIDRKRYTSTKEVLDATLIHQSITGLYETRIDLSQLGGDGGAEAAAKEAAAKEAAAKEAAAKALEAEAAAKEAAAKEAAAKEAAAKAGGWVQEISDSRPMLHIYLNGRRFLGLLNTGADKTCIAGRDWPANWPIHQTESSLQGLGMACGVARSSQPLRWQHEDKSGIIHPFVIPTLPFTLWGRDIMKDIKVRLMTDSPDDSQDLMIGAIESNLFADQISWKSDQPVWLNQWPLKQEKLQALQQLVTEQLQLGHLEESNSPWNTPVFVIKKKSGKWRLLQDLRAVNATMHDMGALQPGLPSPVAVPKGWEIIIIDLQDCFFNIKLHPEDCKRFAFSVPSPNFKRPYQRFQWKVLPQGMKNSPTLCQKFVDKAILTVRDKYQDSYIVHYMDDILLAHPSRSIVDEILTSMIQALNKHGLVVSTEKIQKYDNLKYLGTHIQGDSVSYQKLQIRTDKLRTLNDFQKLLGNINWIRPFLKLTTGELKPLFEILNGDSNPISTRKLTPEACKALQLMNERLSTARVKRLDLSQPWSLCILKTEYTPTACLWQDGVVEWIHLPHISPKVITPYDIFCTQLIIKGRHRSKELFSKDPDYIVVPYTKVQFDLLLQEKEDWPISLLGFLGEVHFHLPKDPLLTFTLQTAIIFPHMTSTTPLEKGIVIFTDGSANGRSVTYIQGREPIIKENTQNTAQQAEIVAVITAFEEVSQPFNLYTDSKYVTGLFPEIETATLSPRTKIYTELKHLQRLIHKRQEKFYIGHIRGHTGLPGPLAQGNAYADSLTRILTAGKRTADGSEFEKRTADGSEFESPKKKAKVE

SEQ ID NO: 3268 - protein, 2135 aa, synthetic construct; identical to SEQ ID NO: 3172

SEQ ID NO: 3269 - protein, 2114 aa, synthetic construct
MPAAKRVKLDGGDKKYSIGLDIGTNSVGWAVITDEYKVPSKKFKVLGNTDRHSIKKNLIGALLFDSGETAEATRLKRTARRRYTRRKNRICYLQEIFSNEMAKVDDSFFHRLEESFLVEEDKKHERHPIFGNIVDEVAYHEKYPTIYHLRKKLVDSTDKADLRLIYLALAHMIKFRGHFLIEGDLNPDNSDVDKLFIQLVQTYNQLFEENPINASGVDAKAILSARLSKSRRLENLIAQLPGEKKNGLFGNLIALSLGLTPNFKSNFDLAEDAKLQLSKDTYDDDLDNLLAQIGDQYADLFLAAKNLSDAILLSDILRVNTEITKAPLSASMIKRYDEHHQDLTLLKALVRQQLPEKYKEIFFDQSKNGYAGYIDGGASQEEFYKFIKPILEKMDGTEELLVKLNREDLLRKQRTFDNGSIPHQIHLGELHAILRRQEDFYPFLKDNREKIEKILTFRIPYYVGPLARGNSRFAWMTRKSEETITPWNFEEVVDKGASAQSFIERMTNFDKNLPNEKVLPKHSLLYEYFTVYNELTKVKYVTEGMRKPAFLSGEQKKAIVDLLFKTNRKVTVKQLKEDYFKKIECFDSVEISGVEDRFNASLGTYHDLLKIIKDKDFLDNEENEDILEDIVLTLTLFEDREMIEERLKTYAHLFDDKVMKQLKRRRYTGWGRLSRKLINGIRDKQSGKTILDFLKSDGFANRNFMQLIHDDSLTFKEDIQKAQVSGQGDSLHEHIANLAGSPAIKKGILQTVKVVDELVKVMGRHKPENIVIEMARENQTTQKGQKNSRERMKRIEEGIKELGSQILKEHPVENTQLQNEKLYLYYLQNGRDMYVDQELDINRLSDYDVDHIVPQSFLKDDSIDNKVLTRSDKARGKSDNVPSEEVVKKMKNYWRQLLNAKLITQRKFDNLTKAERGGLSELDKAGFIKRQLVETRQITKHVAQILDSRMNTKYDENDKLIREVKVITLKSKLVSDFRKDFQFYKVREINNYHHAHDAYLNAVVGTALIKKYPKLESEFVYGDYKVYDVRKMIAKSEQEIGKATAKYFFYSNIMNFFKTEITLANGEIRKRPLIETNGETGEIVWDKGRDFATVRKVLSMPQVNIVKKTEVQTGGFSKESILPKRNSDKLIARKKDWDPKKYGGFDSPTVAYSVLVVAKVEKGKSKKLKSVKELLGITIMERSSFEKNPIDFLEAKGYKEVKKDLIIKLPKYSLFELENGRKRMLASAGELQKGNELALPSKYVNFLYLASHYEKLKGSPEDNEQKQLFVEQHKHYLDEIIEQISEFSKRVILADANLDKVLSAYNKHRDKPIREQAENIIHLFTLTNLGAPAAFKYFDTTIDRKRYTSTKEVLDATLIHQSITGLYETRIDLSQLGGDGGGGSGGGGSSGGWVQEISDSRPMLHIYLNGRRFLGLLNTGADKTCIAGRDWPANWPIHQTESSLQGLGMACGVARSSQPLRWQHEDKSGIIHPFVIPTLPFTLWGRDIMKDIKVRLMTDSPDDSQDLMIGAIESNLFADQISWKSDQPVWLNQWPLKQEKLQALQQLVTEQLQLGHLEESNSPWNTPVFVIKKKSGKWRLLQDLRAVNATMHDMGALQPGLPSPVAVPKGWEIIIIDLQDCFFNIKLHPEDCKRFAFSVPSPNFKRPYQRFQWKVLPQGMKNSPTLCQKFVDKAILTVRDKYQDSYIVHYMDDILLAHPSRSIVDEILTSMIQALNKHGLVVSTEKIQKYDNLKYLGTHIQGDSVSYQKLQIRTDKLRTLNDFQKLLGNINWIRPFLKLTTGELKPLFEILNGDSNPISTRKLTPEACKALQLMNERLSTARVKRLDLSQPWSLCILKTEYTPTACLWQDGVVEWIHLPHISPKVITPYDIFCTQLIIKGRHRSKELFSKDPDYIVVPYTKVQFDLLLQEKEDWPISLLGFLGEVHFHLPKDPLLTFTLQTAIIFPHMTSTTPLEKGIVIFTDGSANGRSVTYIQGREPIIKENTQNTAQQAEIVAVITAFEEVSQPFNLYTDSKYVTGLFPEIETATLSPRTKIYTELKHLQRLIHKRQEKFYIGHIRGHTGLPGPLAQGNAYADSLTRILTAGKRTADGSEFEKRTADGSEFESPKKKAKVE

SEQ ID NO: 3270 - protein, 2116 aa, synthetic construct; identical to SEQ ID NO: 3181

SEQ ID NO: 3271 - protein, 2116 aa, synthetic construct
MPAAKRVKLDGGDKKYSIGLDIGTNSVGWAVITDEYKVPSKKFKVLGNTDRHSIKKNLIGALLFDSGETAEATRLKRTARRRYTRRKNRICYLQEIFSNEMAKVDDSFFHRLEESFLVEEDKKHERHPIFGNIVDEVAYHEKYPTIYHLRKKLVDSTDKADLRLIYLALAHMIKFRGHFLIEGDLNPDNSDVDKLFIQLVQTYNQLFEENPINASGVDAKAILSARLSKSRRLENLIAQLPGEKKNGLFGNLIALSLGLTPNFKSNFDLAEDAKLQLSKDTYDDDLDNLLAQIGDQYADLFLAAKNLSDAILLSDILRVNTEITKAPLSASMIKRYDEHHQDLTLLKALVRQQLPEKYKEIFFDQSKNGYAGYIDGGASQEEFYKFIKPILEKMDGTEELLVKLNREDLLRKQRTFDNGSIPHQIHLGELHAILRRQEDFYPFLKDNREKIEKILTFRIPYYVGPLARGNSRFAWMTRKSEETITPWNFEEVVDKGASAQSFIERMTNFDKNLPNEKVLPKHSLLYEYFTVYNELTKVKYVTEGMRKPAFLSGEQKKAIVDLLFKTNRKVTVKQLKEDYFKKIECFDSVEISGVEDRFNASLGTYHDLLKIIKDKDFLDNEENEDILEDIVLTLTLFEDREMIEERLKTYAHLFDDKVMKQLKRRRYTGWGRLSRKLINGIRDKQSGKTILDFLKSDGFANRNFMQLIHDDSLTFKEDIQKAQVSGQGDSLHEHIANLAGSPAIKKGILQTVKVVDELVKVMGRHKPENIVIEMARENQTTQKGQKNSRERMKRIEEGIKELGSQILKEHPVENTQLQNEKLYLYYLQNGRDMYVDQELDINRLSDYDVDHIVPQSFLKDDSIDNKVLTRSDKARGKSDNVPSEEVVKKMKNYWRQLLNAKLITQRKFDNLTKAERGGLSELDKAGFIKRQLVETRQITKHVAQILDSRMNTKYDENDKLIREVKVITLKSKLVSDFRKDFQFYKVREINNYHHAHDAYLNAVVGTALIKKYPKLESEFVYGDYKVYDVRKMIAKSEQEIGKATAKYFFYSNIMNFFKTEITLANGEIRKRPLIETNGETGEIVWDKGRDFATVRKVLSMPQVNIVKKTEVQTGGFSKESILPKRNSDKLIARKKDWDPKKYGGFDSPTVAYSVLVVAKVEKGKSKKLKSVKELLGITIMERSSFEKNPIDFLEAKGYKEVKKDLIIKLPKYSLFELENGRKRMLASAGELQKGNELALPSKYVNFLYLASHYEKLKGSPEDNEQKQLFVEQHKHYLDEIIEQISEFSKRVILADANLDKVLSAYNKHRDKPIREQAENIIHLFTLTNLGAPAAFKYFDTTIDRKRYTSTKEVLDATLIHQSITGLYETRIDLSQLGGDGGEAAAKGSSGGGGGWVQEISDSRPMLHIYLNGRRFLGLLNTGADKTCIAGRDWPANWPIHQTESSLQGLGMACGVARSSQPLRWQHEDKSGIIHPFVIPTLPFTLWGRDIMKDIKVRLMTDSPDDSQDLMIGAIESNLFADQISWKSDQPVWLNQWPLKQEKLQALQQLVTEQLQLGHLEESNSPWNTPVFVIKKKSGKWRLLQDLRAVNATMHDMGALQPGLPSPVAVPKGWEIIIIDLQDCFFNIKLHPEDCKRFAFSVPSPNFKRPYQRFQWKVLPQGMKNSPTLCQKFVDKAILTVRDKYQDSYIVHYMDDILLAHPSRSIVDEILTSMIQALNKHGLVVSTEKIQKYDNLKYLGTHIQGDSVSYQKLQIRTDKLRTLNDFQKLLGNINWIRPFLKLTTGELKPLFEILNGDSNPISTRKLTPEACKALQLMNERLSTARVKRLDLSQPWSLCILKTEYTPTACLWQDGVVEWIHLPHISPKVITPYDIFCTQLIIKGRHRSKELFSKDPDYIVVPYTKVQFDLLLQEKEDWPISLLGFLGEVHFHLPKDPLLTFTLQTAIIFPHMTSTTPLEKGIVIFTDGSANGRSVTYIQGREPIIKENTQNTAQQAEIVAVITAFEEVSQPFNLYTDSKYVTGLFPEIETATLSPRTKIYTELKHLQRLIHKRQEKFYIGHIRGHTGLPGPLAQGNAYADSLTRILTAGKRTADGSEFEKRTADGSEFESPKKKAKVE

SEQ ID NO: 3272 - protein, 2114 aa, synthetic construct
MPAAKRVKLDGGDKKYSIGLDIGTNSVGWAVITDEYKVPSKKFKVLGNTDRHSIKKNLIGALLFDSGETAEATRLKRTARRRYTRRKNRICYLQEIFSNEMAKVDDSFFHRLEESFLVEEDKKHERHPIFGNIVDEVAYHEKYPTIYHLRKKLVDSTDKADLRLIYLALAHMIKFRGHFLIEGDLNPDNSDVDKLFIQLVQTYNQLFEENPINASGVDAKAILSARLSKSRRLENLIAQLPGEKKNGLFGNLIALSLGLTPNFKSNFDLAEDAKLQLSKDTYDDDLDNLLAQIGDQYADLFLAAKNLSDAILLSDILRVNTEITKAPLSASMIKRYDEHHQDLTLLKALVRQQLPEKYKEIFFDQSKNGYAGYIDGGASQEEFYKFIKPILEKMDGTEELLVKLNREDLLRKQRTFDNGSIPHQIHLGELHAILRRQEDFYPFLKDNREKIEKILTFRIPYYVGPLARGNSRFAWMTRKSEETITPWNFEEVVDKGASAQSFIERMTNFDKNLPNEKVLPKHSLLYEYFTVYNELTKVKYVTEGMRKPAFLSGEQKKAIVDLLFKTNRKVTVKQLKEDYFKKIECFDSVEISGVEDRFNASLGTYHDLLKIIKDKDFLDNEENEDILEDIVLTLTLFEDREMIEERLKTYAHLFDDKVMKQLKRRRYTGWGRLSRKLINGIRDKQSGKTILDFLKSDGFANRNFMQLIHDDSLTFKEDIQKAQVSGQGDSLHEHIANLAGSPAIKKGILQTVKVVDELVKVMGRHKPENIVIEMARENQTTQKGQKNSRERMKRIEEGIKELGSQILKEHPVENTQLQNEKLYLYYLQNGRDMYVDQELDINRLSDYDVDHIVPQSFLKDDSIDNKVLTRSDKARGKSDNVPSEEVVKKMKNYWRQLLNAKLITQRKFDNLTKAERGGLSELDKAGFIKRQLVETRQITKHVAQILDSRMNTKYDENDKLIREVKVITLKSKLVSDFRKDFQFYKVREINNYHHAHDAYLNAVVGTALIKKYPKLESEFVYGDYKVYDVRKMIAKSEQEIGKATAKYFFYSNIMNFFKTEITLANGEIRKRPLIETNGETGEIVWDKGRDFATVRKVLSMPQVNIVKKTEVQTGGFSKESILPKRNSDKLIARKKDWDPKKYGGFDSPTVAYSVLVVAKVEKGKSKKLKSVKELLGITIMERSSFEKNPIDFLEAKGYKEVKKDLIIKLPKYSLFELENGRKRMLASAGELQKGNELALPSKYVNFLYLASHYEKLKGSPEDNEQKQLFVEQHKHYLDEIIEQISEFSKRVILADANLDKVLSAYNKHRDKPIREQAENIIHLFTLTNLGAPAAFKYFDTTIDRKRYTSTKEVLDATLIHQSITGLYETRIDLSQLGGDGGGGGGGSGSSGGWVQEISDSRPMLHIYLNGRRFLGLLNTGADKTCIAGRDWPANWPIHQTESSLQGLGMACGVARSSQPLRWQHEDKSGIIHPFVIPTLPFTLWGRDIMKDIKVRLMTDSPDDSQDLMIGAIESNLFADQISWKSDQPVWLNQWPLKQEKLQALQQLVTEQLQLGHLEESNSPWNTPVFVIKKKSGKWRLLQDLRAVNATMHDMGALQPGLPSPVAVPKGWEIIIIDLQDCFFNIKLHPEDCKRFAFSVPSPNFKRPYQRFQWKVLPQGMKNSPTLCQKFVDKAILTVRDKYQDSYIVHYMDDILLAHPSRSIVDEILTSMIQALNKHGLVVSTEKIQKYDNLKYLGTHIQGDSVSYQKLQIRTDKLRTLNDFQKLLGNINWIRPFLKLTTGELKPLFEILNGDSNPISTRKLTPEACKALQLMNERLSTARVKRLDLSQPWSLCILKTEYTPTACLWQDGVVEWIHLPHISPKVITPYDIFCTQLIIKGRHRSKELFSKDPDYIVVPYTKVQFDLLLQEKEDWPISLLGFLGEVHFHLPKDPLLTFTLQTAIIFPHMTSTTPLEKGIVIFTDGSANGRSVTYIQGREPIIKENTQNTAQQAEIVAVITAFEEVSQPFNLYTDSKYVTGLFPEIETATLSPRTKIYTELKHLQRLIHKRQEKFYIGHIRGHTGLPGPLAQGNAYADSLTRILTAGKRTADGSEFEKRTADGSEFESPKKKAKVE

SEQ ID NO: 3273 - protein, 2116 aa, synthetic construct
MPAAKRVKLDGGDKKYSIGLDIGTNSVGWAVITDEYKVPSKKFKVLGNTDRHSIKKNLIGALLFDSGETAEATRLKRTARRRYTRRKNRICYLQEIFSNEMAKVDDSFFHRLEESFLVEEDKKHERHPIFGNIVDEVAYHEKYPTIYHLRKKLVDSTDKADLRLIYLALAHMIKFRGHFLIEGDLNPDNSDVDKLFIQLVQTYNQLFEENPINASGVDAKAILSARLSKSRRLENLIAQLPGEKKNGLFGNLIALSLGLTPNFKSNFDLAEDAKLQLSKDTYDDDLDNLLAQIGDQYADLFLAAKNLSDAILLSDILRVNTEITKAPLSASMIKRYDEHHQDLTLLKALVRQQLPEKYKEIFFDQSKNGYAGYIDGGASQEEFYKFIKPILEKMDGTEELLVKLNREDLLRKQRTFDNGSIPHQIHLGELHAILRRQEDFYPFLKDNREKIEKILTFRIPYYVGPLARGNSRFAWMTRKSEETITPWNFEEVVDKGASAQSFIERMTNFDKNLPNEKVLPKHSLLYEYFTVYNELTKVKYVTEGMRKPAFLSGEQKKAIVDLLFKTNRKVTVKQLKEDYFKKIECFDSVEISGVEDRFNASLGTYHDLLKIIKDKDFLDNEENEDILEDIVLTLTLFEDREMIEERLKTYAHLFDDKVMKQLKRRRYTGWGRLSRKLINGIRDKQSGKTILDFLKSDGFANRNFMQLIHDDSLTFKEDIQKAQVSGQGDSLHEHIANLAGSPAIKKGILQTVKVVDELVKVMGRHKPENIVIEMARENQTTQKGQKNSRERMKRIEEGIKELGSQILKEHPVENTQLQNEKLYLYYLQNGRDMYVDQELDINRLSDYDVDHIVPQSFLKDDSIDNKVLTRSDKARGKSDNVPSEEVVKKMKNYWRQLLNAKLITQRKFDNLTKAERGGLSELDKAGFIKRQLVETRQITKHVAQILDSRMNTKYDENDKLIREVKVITLKSKLVSDFRKDFQFYKVREINNYHHAHDAYLNAVVGTALIKKYPKLESEFVYGDYKVYDVRKMIAKSEQEIGKATAKYFFYSNIMNFFKTEITLANGEIRKRPLIETNGETGEIVWDKGRDFATVRKVLSMPQVNIVKKTEVQTGGFSKESILPKRNSDKLIARKKDWDPKKYGGFDSPTVAYSVLVVAKVEKGKSKKLKSVKELLGITIMERSSFEKNPIDFLEAKGYKEVKKDLIIKLPKYSLFELENGRKRMLASAGELQKGNELALPSKYVNFLYLASHYEKLKGSPEDNEQKQLFVEQHKHYLDEIIEQISEFSKRVILADANLDKVLSAYNKHRDKPIREQAENIIHLFTLTNLGAPAAFKYFDTTIDRKRYTSTKEVLDATLIHQSITGLYETRIDLSQLGGDGGEAAAKGGGPAPGGWVQEISDSRPMLHIYLNGRRFLGLLNTGADKTCIAGRDWPANWPIHQTESSLQGLGMACGVARSSQPLRWQHEDKSGIIHPFVIPTLPFTLWGRDIMKDIKVRLMTDSPDDSQDLMIGAIESNLFADQISWKSDQPVWLNQWPLKQEKLQALQQLVTEQLQLGHLEESNSPWNTPVFVIKKKSGKWRLLQDLRAVNATMHDMGALQPGLPSPVAVPKGWEIIIIDLQDCFFNIKLHPEDCKRFAFSVPSPNFKRPYQRFQWKVLPQGMKNSPTLCQKFVDKAILTVRDKYQDSYIVHYMDDILLAHPSRSIVDEILTSMIQALNKHGLVVSTEKIQKYDNLKYLGTHIQGDSVSYQKLQIRTDKLRTLNDFQKLLGNINWIRPFLKLTTGELKPLFEILNGDSNPISTRKLTPEACKALQLMNERLSTARVKRLDLSQPWSLCILKTEYTPTACLWQDGVVEWIHLPHISPKVITPYDIFCTQLIIKGRHRSKELFSKDPDYIVVPYTKVQFDLLLQEKEDWPISLLGFLGEVHFHLPKDPLLTFTLQTAIIFPHMTSTTPLEKGIVIFTDGSANGRSVTYIQGREPIIKENTQNTAQQAEIVAVITAFEEVSQPFNLYTDSKYVTGLFPEIETATLSPRTKIYTELKHLQRLIHKRQEKFYIGHIRGHTGLPGPLAQGNAYADSLTRILTAGKRTADGSEFEKRTADGSEFESPKKKAKVE

SEQ ID NO: 3274 - protein, 2116 aa, synthetic construct
MPAAKRVKLDGGDKKYSIGLDIGTNSVGWAVITDEYKVPSKKFKVLGNTDRHSIKKNLIGALLFDSGETAEATRLKRTARRRYTRRKNRICYLQEIFSNEMAKVDDSFFHRLEESFLVEEDKKHERHPIFGNIVDEVAYHEKYPTIYHLRKKLVDSTDKADLRLIYLALAHMIKFRGHFLIEGDLNPDNSDVDKLFIQLVQTYNQLFEENPINASGVDAKAILSARLSKSRRLENLIAQLPGEKKNGLFGNLIALSLGLTPNFKSNFDLAEDAKLQLSKDTYDDDLDNLLAQIGDQYADLFLAAKNLSDAILLSDILRVNTEITKAPLSASMIKRYDEHHQDLTLLKALVRQQLPEKYKEIFFDQSKNGYAGYIDGGASQEEFYKFIKPILEKMDGTEELLVKLNREDLLRKQRTFDNGSIPHQIHLGELHAILRRQEDFYPFLKDNREKIEKILTFRIPYYVGPLARGNSRFAWMTRKSEETITPWNFEEVVDKGASAQSFIERMTNFDKNLPNEKVLPKHSLLYEYFTVYNELTKVKYVTEGMRKPAFLSGEQKKAIVDLLFKTNRKVTVKQLKEDYFKKIECFDSVEISGVEDRFNASLGTYHDLLKIIKDKDFLDNEENEDILEDIVLTLTLFEDREMIEERLKTYAHLFDDKVMKQLKRRRYTGWGRLSRKLINGIRDKQSGKTILDFLKSDGFANRNFMQLIHDDSLTFKEDIQKAQVSGQGDSLHEHIANLAGSPAIKKGILQTVKVVDELVKVMGRHKPENIVIEMARENQTTQKGQKNSRERMKRIEEGIKELGSQILKEHPVENTQLQNEKLYLYYLQNGRDMYVDQELDINRLSDYDVDHIVPQSFLKDDSIDNKVLTRSDKARGKSDNVPSEEVVKKMKNYWRQLLNAKLITQRKFDNLTKAERGGLSELDKAGFIKRQLVETRQITKHVAQILDSRMNTKYDENDKLIREVKVITLKSKLVSDFRKDFQFYKVREINNYHHAHDAYLNAVVGTALIKKYPKLESEFVYGDYKVYDVRKMIAKSEQEIGKATAKYFFYSNIMNFFKTEITLANGEIRKRPLIETNGETGEIVWDKGRDFATVRKVLSMPQVNIVKKTEVQTGGFSKESILPKRNSDKLIARKKDWDPKKYGGFDSPTVAYSVLVVAKVEKGKSKKLKSVKELLGITIMERSSFEKNPIDFLEAKGYKEVKKDLIIKLPKYSLFELENGRKRMLASAGELQKGNELALPSKYVNFLYLASHYEKLKGSPEDNEQKQLFVEQHKHYLDEIIEQISEFSKRVILADANLDKVLSAYNKHRDKPIREQAENIIHLFTLTNLGAPAAFKYFDTTIDRKRYTSTKEVLDATLIHQSITGLYETRIDLSQLGGDGGPAPEAAAKGGGGGWVQEISDSRPMLHIYLNGRRFLGLLNTGADKTCIAGRDWPANWPIHQTESSLQGLGMACGVARSSQPLRWQHEDKSGIIHPFVIPTLPFTLWGRDIMKDIKVRLMTDSPDDSQDLMIGAIESNLFADQISWKSDQPVWLNQWPLKQEKLQALQQLVTEQLQLGHLEESNSPWNTPVFVIKKKSGKWRLLQDLRAVNATMHDMGALQPGLPSPVAVPKGWEIIIIDLQDCFFNIKLHPEDCKRFAFSVPSPNFKRPYQRFQWKVLPQGMKNSPTLCQKFVDKAILTVRDKYQDSYIVHYMDDILLAHPSRSIVDEILTSMIQALNKHGLVVSTEKIQKYDNLKYLGTHIQGDSVSYQKLQIRTDKLRTLNDFQKLLGNINWIRPFLKLTTGELKPLFEILNGDSNPISTRKLTPEACKALQLMNERLSTARVKRLDLSQPWSLCILKTEYTPTACLWQDGVVEWIHLPHISPKVITPYDIFCTQLIIKGRHRSKELFSKDPDYIVVPYTKVQFDLLLQEKEDWPISLLGFLGEVHFHLPKDPLLTFTLQTAIIFPHMTSTTPLEKGIVIFTDGSANGRSVTYIQGREPIIKENTQNTAQQAEIVAVITAFEEVSQPFNLYTDSKYVTGLFPEIETATLSPRTKIYTELKHLQRLIHKRQEKFYIGHIRGHTGLPGPLAQGNAYADSLTRILTAGKRTADGSEFEKRTADGSEFESPKKKAKVE

SEQ ID NO: 3275 - protein, 2114 aa, synthetic construct
MPAAKRVKLDGGDKKYSIGLDIGTNSVGWAVITDEYKVPSKKFKVLGNTDRHSIKKNLIGALLFDSGETAEATRLKRTARRRYTRRKNRICYLQEIFSNEMAKVDDSFFHRLEESFLVEEDKKHERHPIFGNIVDEVAYHEKYPTIYHLRKKLVDSTDKADLRLIYLALAHMIKFRGHFLIEGDLNPDNSDVDKLFIQLVQTYNQLFEENPINASGVDAKAILSARLSKSRRLENLIAQLPGEKKNGLFGNLIALSLGLTPNFKSNFDLAEDAKLQLSKDTYDDDLDNLLAQIGDQYADLFLAAKNLSDAILLSDILRVNTEITKAPLSASMIKRYDEHHQDLTLLKALVRQQLPEKYKEIFFDQSKNGYAGYIDGGASQEEFYKFIKPILEKMDGTEELLVKLNREDLLRKQRTFDNGSIPHQIHLGELHAILRRQEDFYPFLKDNREKIEKILTFRIPYYVGPLARGNSRFAWMTRKSEETITPWNFEEVVDKGASAQSFIERMTNFDKNLPNEKVLPKHSLLYEYFTVYNELTKVKYVTEGMRKPAFLSGEQKKAIVDLLFKTNRKVTVKQLKEDYFKKIECFDSVEISGVEDRFNASLGTYHDLLKIIKDKDFLDNEENEDILEDIVLTLTLFEDREMIEERLKTYAHLFDDKVMKQLKRRRYTGWGRLSRKLINGIRDKQSGKTILDFLKSDGFANRNFMQLIHDDSLTFKEDIQKAQVSGQGDSLHEHIANLAGSPAIKKGILQTVKVVDELVKVMGRHKPENIVIEMARENQTTQKGQKNSRERMKRIEEGIKELGSQILKEHPVENTQLQNEKLYLYYLQNGRDMYVDQELDINRLSDYDVDHIVPQSFLKDDSIDNKVLTRSDKARGKSDNVPSEEVVKKMKNYWRQLLNAKLITQRKFDNLTKAERGGLSELDKAGFIKRQLVETRQITKHVAQILDSRMNTKYDENDKLIREVKVITLKSKLVSDFRKDFQFYKVREINNYHHAHDAYLNAVVGTALIKKYPKLESEFVYGDYKVYDVRKMIAKSEQEIGKATAKYFFYSNIMNFFKTEITLANGEIRKRPLIETNGETGEIVWDKGRDFATVRKVLSMPQVNIVKKTEVQTGGFSKESILPKRNSDKLIARKKDWDPKKYGGFDSPTVAYSVLVVAKVEKGKSKKLKSVKELLGITIMERSSFEKNPIDFLEAKGYKEVKKDLIIKLPKYSLFELENGRKRMLASAGELQKGNELALPSKYVNFLYLASHYEKLKGSPEDNEQKQLFVEQHKHYLDEIIEQISEFSKRVILADANLDKVLSAYNKHRDKPIREQAENIIHLFTLTNLGAPAAFKYFDTTIDRKRYTSTKEVLDATLIHQSITGLYETRIDLSQLGGDGGGGGPAPGGSGGWVQEISDSRPMLHIYLNGRRFLGLLNTGADKTCIAGRDWPANWPIHQTESSLQGLGMACGVARSSQPLRWQHEDKSGIIHPFVIPTLPFTLWGRDIMKDIKVRLMTDSPDDSQDLMIGAIESNLFADQISWKSDQPVWLNQWPLKQEKLQALQQLVTEQLQLGHLEESNSPWNTPVFVIKKKSGKWRLLQDLRAVNATMHDMGALQPGLPSPVAVPKGWEIIIIDLQDCFFNIKLHPEDCKRFAFSVPSPNFKRPYQRFQWKVLPQGMKNSPTLCQKFVDKAILTVRDKYQDSYIVHYMDDILLAHPSRSIVDEILTSMIQALNKHGLVVSTEKIQKYDNLKYLGTHIQGDSVSYQKLQIRTDKLRTLNDFQKLLGNINWIRPFLKLTTGELKPLFEILNGDSNPISTRKLTPEACKALQLMNERLSTARVKRLDLSQPWSLCILKTEYTPTACLWQDGVVEWIHLPHISPKVITPYDIFCTQLIIKGRHRSKELFSKDPDYIVVPYTKVQFDLLLQEKEDWPISLLGFLGEVHFHLPKDPLLTFTLQTAIIFPHMTSTTPLEKGIVIFTDGSANGRSVTYIQGREPIIKENTQNTAQQAEIVAVITAFEEVSQPFNLYTDSKYVTGLFPEIETATLSPRTKIYTELKHLQRLIHKRQEKFYIGHIRGHTGLPGPLAQGNAYADSLTRILTAGKRTADGSEFEKRTADGSEFESPKKKAKVE

SEQ ID NO: 3276 - protein, 2114 aa, synthetic construct
MPAAKRVKLDGGDKKYSIGLDIGTNSVGWAVITDEYKVPSKKFKVLGNTDRHSIKKNLIGALLFDSGETAEATRLKRTARRRYTRRKNRICYLQEIFSNEMAKVDDSFFHRLEESFLVEEDKKHERHPIFGNIVDEVAYHEKYPTIYHLRKKLVDSTDKADLRLIYLALAHMIKFRGHFLIEGDLNPDNSDVDKLFIQLVQTYNQLFEENPINASGVDAKAILSARLSKSRRLENLIAQLPGEKKNGLFGNLIALSLGLTPNFKSNFDLAEDAKLQLSKDTYDDDLDNLLAQIGDQYADLFLAAKNLSDAILLSDILRVNTEITKAPLSASMIKRYDEHHQDLTLLKALVRQQLPEKYKEIFFDQSKNGYAGYIDGGASQEEFYKFIKPILEKMDGTEELLVKLNREDLLRKQRTFDNGSIPHQIHLGELHAILRRQEDFYPFLKDNREKIEKILTFRIPYYVGPLARGNSRFAWMTRKSEETITPWNFEEVVDKGASAQSFIERMTNFDKNLPNEKVLPKHSLLYEYFTVYNELTKVKYVTEGMRKPAFLSGEQKKAIVDLLFKTNRKVTVKQLKEDYFKKIECFDSVEISGVEDRFNASLGTYHDLLKIIKDKDFLDNEENEDILEDIVLTLTLFEDREMIEERLKTYAHLFDDKVMKQLKRRRYTGWGRLSRKLINGIRDKQSGKTILDFLKSDGFANRNFMQLIHDDSLTFKEDIQKAQVSGQGDSLHEHIANLAGSPAIKKGILQTVKVVDELVKVMGRHKPENIVIEMARENQTTQKGQKNSRERMKRIEEGIKELGSQILKEHPVENTQLQNEKLYLYYLQNGRDMYVDQELDINRLSDYDVDHIVPQSFLKDDSIDNKVLTRSDKARGKSDNVPSEEVVKKMKNYWRQLLNAKLITQRKFDNLTKAERGGLSELDKAGFIKRQLVETRQITKHVAQILDSRMNTKYDENDKLIREVKVITLKSKLVSDFRKDFQFYKVREINNYHHAHDAYLNAVVGTALIKKYPKLESEFVYGDYKVYDVRKMIAKSEQEIGKATAKYFFYSNIMNFFKTEITLANGEIRKRPLIETNGETGEIVWDKGRDFATVRKVLSMPQVNIVKKTEVQTGGFSKESILPKRNSDKLIARKKDWDPKKYGGFDSPTVAYSVLVVAKVEKGKSKKLKSVKELLGITIMERSSFEKNPIDFLEAKGYKEVKKDLIIKLPKYSLFELENGRKRMLASAGELQKGNELALPSKYVNFLYLASHYEKLKGSPEDNEQKQLFVEQHKHYLDEIIEQISEFSKRVILADANLDKVLSAYNKHRDKPIREQAENIIHLFTLTNLGAPAAFKYFDTTIDRKRYTSTKEVLDATLIHQSITGLYETRIDLSQLGGDGGGGSGGGPAPGGWVQEISDSRPMLHIYLNGRRFLGLLNTGADKTCIAGRDWPANWPIHQTESSLQGLGMACGVARSSQPLRWQHEDKSGIIHPFVIPTLPFTLWGRDIMKDIKVRLMTDSPDDSQDLMIGAIESNLFADQISWKSDQPVWLNQWPLKQEKLQALQQLVTEQLQLGHLEESNSPWNTPVFVIKKKSGKWRLLQDLRAVNATMHDMGALQPGLPSPVAVPKGWEIIIIDLQDCFFNIKLHPEDCKRFAFSVPSPNFKRPYQRFQWKVLPQGMKNSPTLCQKFVDKAILTVRDKYQDSYIVHYMDDILLAHPSRSIVDEILTSMIQALNKHGLVVSTEKIQKYDNLKYLGTHIQGDSVSYQKLQIRTDKLRTLNDFQKLLGNINWIRPFLKLTTGELKPLFEILNGDSNPISTRKLTPEACKALQLMNERLSTARVKRLDLSQPWSLCILKTEYTPTACLWQDGVVEWIHLPHISPKVITPYDIFCTQLIIKGRHRSKELFSKDPDYIVVPYTKVQFDLLLQEKEDWPISLLGFLGEVHFHLPKDPLLTFTLQTAIIFPHMTSTTPLEKGIVIFTDGSANGRSVTYIQGREPIIKENTQNTAQQAEIVAVITAFEEVSQPFNLYTDSKYVTGLFPEIETATLSPRTKIYTELKHLQRLIHKRQEKFYIGHIRGHTGLPGPLAQGNAYADSLTRILTAGKRTADGSEFEKRTADGSEFESPKKKAKVE

SEQ ID NO: 3277 - protein, 2135 aa, synthetic construct; identical to SEQ ID NO: 3173

SEQ ID NO: 3278 - protein, 2110 aa, synthetic construct
MPAAKRVKLDGGDKKYSIGLDIGTNSVGWAVITDEYKVPSKKFKVLGNTDRHSIKKNLIGALLFDSGETAEATRLKRTARRRYTRRKNRICYLQEIFSNEMAKVDDSFFHRLEESFLVEEDKKHERHPIFGNIVDEVAYHEKYPTIYHLRKKLVDSTDKADLRLIYLALAHMIKFRGHFLIEGDLNPDNSDVDKLFIQLVQTYNQLFEENPINASGVDAKAILSARLSKSRRLENLIAQLPGEKKNGLFGNLIALSLGLTPNFKSNFDLAEDAKLQLSKDTYDDDLDNLLAQIGDQYADLFLAAKNLSDAILLSDILRVNTEITKAPLSASMIKRYDEHHQDLTLLKALVRQQLPEKYKEIFFDQSKNGYAGYIDGGASQEEFYKFIKPILEKMDGTEELLVKLNREDLLRKQRTFDNGSIPHQIHLGELHAILRRQEDFYPFLKDNREKIEKILTFRIPYYVGPLARGNSRFAWMTRKSEETITPWNFEEVVDKGASAQSFIERMTNFDKNLPNEKVLPKHSLLYEYFTVYNELTKVKYVTEGMRKPAFLSGEQKKAIVDLLFKTNRKVTVKQLKEDYFKKIECFDSVEISGVEDRFNASLGTYHDLLKIIKDKDFLDNEENEDILEDIVLTLTLFEDREMIEERLKTYAHLFDDKVMKQLKRRRYTGWGRLSRKLINGIRDKQSGKTILDFLKSDGFANRNFMQLIHDDSLTFKEDIQKAQVSGQGDSLHEHIANLAGSPAIKKGILQTVKVVDELVKVMGRHKPENIVIEMARENQTTQKGQKNSRERMKRIEEGIKELGSQILKEHPVENTQLQNEKLYLYYLQNGRDMYVDQELDINRLSDYDVDHIVPQSFLKDDSIDNKVLTRSDKARGKSDNVPSEEVVKKMKNYWRQLLNAKLITQRKFDNLTKAERGGLSELDKAGFIKRQLVETRQITKHVAQILDSRMNTKYDENDKLIREVKVITLKSKLVSDFRKDFQFYKVREINNYHHAHDAYLNAVVGTALIKKYPKLESEFVYGDYKVYDVRKMIAKSEQEIGKATAKYFFYSNIMNFFKTEITLANGEIRKRPLIETNGETGEIVWDKGRDFATVRKVLSMPQVNIVKKTEVQTGGFSKESILPKRNSDKLIARKKDWDPKKYGGFDSPTVAYSVLVVAKVEKGKSKKLKSVKELLGITIMERSSFEKNPIDFLEAKGYKEVKKDLIIKLPKYSLFELENGRKRMLASAGELQKGNELALPSKYVNFLYLASHYEKLKGSPEDNEQKQLFVEQHKHYLDEIIEQISEFSKRVILADANLDKVLSAYNKHRDKPIREQAENIIHLFTLTNLGAPAAFKYFDTTIDRKRYTSTKEVLDATLIHQSITGLYETRIDLSQLGGDGGEAAAKGGWVQEISDSRPMLHIYLNGRRFLGLLNTGADKTCIAGRDWPANWPIHQTESSLQGLGMACGVARSSQPLRWQHEDKSGIIHPFVIPTLPFTLWGRDIMKDIKVRLMTDSPDDSQDLMIGAIESNLFADQISWKSDQPVWLNQWPLKQEKLQALQQLVTEQLQLGHLEESNSPWNTPVFVIKKKSGKWRLLQDLRAVNATMHDMGALQPGLPSPVAVPKGWEIIIIDLQDCFFNIKLHPEDCKRFAFSVPSPNFKRPYQRFQWKVLPQGMKNSPTLCQKFVDKAILTVRDKYQDSYIVHYMDDILLAHPSRSIVDEILTSMIQALNKHGLVVSTEKIQKYDNLKYLGTHIQGDSVSYQKLQIRTDKLRTLNDFQKLLGNINWIRPFLKLTTGELKPLFEILNGDSNPISTRKLTPEACKALQLMNERLSTARVKRLDLSQPWSLCILKTEYTPTACLWQDGVVEWIHLPHISPKVITPYDIFCTQLIIKGRHRSKELFSKDPDYIVVPYTKVQFDLLLQEKEDWPISLLGFLGEVHFHLPKDPLLTFTLQTAIIFPHMTSTTPLEKGIVIFTDGSANGRSVTYIQGREPIIKENTQNTAQQAEIVAVITAFEEVSQPFNLYTDSKYVTGLFPEIETATLSPRTKIYTELKHLQRLIHKRQEKFYIGHIRGHTGLPGPLAQGNAYADSLTRILTAGKRTADGSEFEKRTADGSEFESPKKKAKVE

SEQ ID NO: 3279 - protein, 2116 aa, synthetic construct
MPAAKRVKLDGGDKKYSIGLDIGTNSVGWAVITDEYKVPSKKFKVLGNTDRHSIKKNLIGALLFDSGETAEATRLKRTARRRYTRRKNRICYLQEIFSNEMAKVDDSFFHRLEESFLVEEDKKHERHPIFGNIVDEVAYHEKYPTIYHLRKKLVDSTDKADLRLIYLALAHMIKFRGHFLIEGDLNPDNSDVDKLFIQLVQTYNQLFEENPINASGVDAKAILSARLSKSRRLENLIAQLPGEKKNGLFGNLIALSLGLTPNFKSNFDLAEDAKLQLSKDTYDDDLDNLLAQIGDQYADLFLAAKNLSDAILLSDILRVNTEITKAPLSASMIKRYDEHHQDLTLLKALVRQQLPEKYKEIFFDQSKNGYAGYIDGGASQEEFYKFIKPILEKMDGTEELLVKLNREDLLRKQRTFDNGSIPHQIHLGELHAILRRQEDFYPFLKDNREKIEKILTFRIPYYVGPLARGNSRFAWMTRKSEETITPWNFEEVVDKGASAQSFIERMTNFDKNLPNEKVLPKHSLLYEYFTVYNELTKVKYVTEGMRKPAFLSGEQKKAIVDLLFKTNRKVTVKQLKEDYFKKIECFDSVEISGVEDRFNASLGTYHDLLKIIKDKDFLDNEENEDILEDIVLTLTLFEDREMIEERLKTYAHLFDDKVMKQLKRRRYTGWGRLSRKLINGIRDKQSGKTILDFLKSDGFANRNFMQLIHDDSLTFKEDIQKAQVSGQGDSLHEHIANLAGSPAIKKGILQTVKVVDELVKVMGRHKPENIVIEMARENQTTQKGQKNSRERMKRIEEGIKELGSQILKEHPVENTQLQNEKLYLYYLQNGRDMYVDQELDINRLSDYDVDHIVPQSFLKDDSIDNKVLTRSDKARGKSDNVPSEEVVKKMKNYWRQLLNAKLITQRKFDNLTKAERGGLSELDKAGFIKRQLVETRQITKHVAQILDSRMNTKYDENDKLIREVKVITLKSKLVSDFRKDFQFYKVREINNYHHAHDAYLNAVVGTALIKKYPKLESEFVYGDYKVYDVRKMIAKSEQEIGKATAKYFFYSNIMNFFKTEITLANGEIRKRPLIETNGETGEIVWDKGRDFATVRKVLSMPQVNIVKKTEVQTGGFSKESILPKRNSDKLIARKKDWDPKKYGGFDSPTVAYSVLVVAKVEKGKSKKLKSVKELLGITIMERSSFEKNPIDFLEAKGYKEVKKDLIIKLPKYSLFELENGRKRMLASAGELQKGNELALPSKYVNFLYLASHYEKLKGSPEDNEQKQLFVEQHKHYLDEIIEQISEFSKRVILADANLDKVLSAYNKHRDKPIREQAENIIHLFTLTNLGAPAAFKYFDTTIDRKRYTSTKEVLDATLIHQSITGLYETRIDLSQLGGDGGGGGGGSEAAAKGGWVQEISDSRPMLHIYLNGRRFLGLLNTGADKTCIAGRDWPANWPIHQTESSLQGLGMACGVARSSQPLRWQHEDKSGIIHPFVIPTLPFTLWGRDIMKDIKVRLMTDSPDDSQDLMIGAIESNLFADQISWKSDQPVWLNQWPLKQEKLQALQQLVTEQLQLGHLEESNSPWNTPVFVIKKKSGKWRLLQDLRAVNATMHDMGALQPGLPSPVAVPKGWEIIIIDLQDCFFNIKLHPEDCKRFAFSVPSPNFKRPYQRFQWKVLPQGMKNSPTLCQKFVDKAILTVRDKYQDSYIVHYMDDILLAHPSRSIVDEILTSMIQALNKHGLVVSTEKIQKYDNLKYLGTHIQGDSVSYQKLQIRTDKLRTLNDFQKLLGNINWIRPFLKLTTGELKPLFEILNGDSNPISTRKLTPEACKALQLMNERLSTARVKRLDLSQPWSLCILKTEYTPTACLWQDGVVEWIHLPHISPKVITPYDIFCTQLIIKGRHRSKELFSKDPDYIVVPYTKVQFDLLLQEKEDWPISLLGFLGEVHFHLPKDPLLTFTLQTAIIFPHMTSTTPLEKGIVIFTDGSANGRSVTYIQGREPIIKENTQNTAQQAEIVAVITAFEEVSQPFNLYTDSKYVTGLFPEIETATLSPRTKIYTELKHLQRLIHKRQEKFYIGHIRGHTGLPGPLAQGNAYADSLTRILTAGKRTADGSEFEKRTADGSEFESPKKKAKVE

SEQ ID NO: 3280 - protein, 2125 aa, synthetic construct; identical to SEQ ID NO: 3193

SEQ ID NO: 3281 - protein, 2120 aa, synthetic construct
MPAAKRVKLDGGDKKYSIGLDIGTNSVGWAVITDEYKVPSKKFKVLGNTDRHSIKKNLIGALLFDSGETAEATRLKRTARRRYTRRKNRICYLQEIFSNEMAKVDDSFFHRLEESFLVEEDKKHERHPIFGNIVDEVAYHEKYPTIYHLRKKLVDSTDKADLRLIYLALAHMIKFRGHFLIEGDLNPDNSDVDKLFIQLVQTYNQLFEENPINASGVDAKAILSARLSKSRRLENLIAQLPGEKKNGLFGNLIALSLGLTPNFKSNFDLAEDAKLQLSKDTYDDDLDNLLAQIGDQYADLFLAAKNLSDAILLSDILRVNTEITKAPLSASMIKRYDEHHQDLTLLKALVRQQLPEKYKEIFFDQSKNGYAGYIDGGASQEEFYKFIKPILEKMDGTEELLVKLNREDLLRKQRTFDNGSIPHQIHLGELHAILRRQEDFYPFLKDNREKIEKILTFRIPYYVGPLARGNSRFAWMTRKSEETITPWNFEEVVDKGASAQSFIERMTNFDKNLPNEKVLPKHSLLYEYFTVYNELTKVKYVTEGMRKPAFLSGEQKKAIVDLLFKTNRKVTVKQLKEDYFKKIECFDSVEISGVEDRFNASLGTYHDLLKIIKDKDFLDNEENEDILEDIVLTLTLFEDREMIEERLKTYAHLFDDKVMKQLKRRRYTGWGRLSRKLINGIRDKQSGKTILDFLKSDGFANRNFMQLIHDDSLTFKEDIQKAQVSGQGDSLHEHIANLAGSPAIKKGILQTVKVVDELVKVMGRHKPENIVIEMARENQTTQKGQKNSRERMKRIEEGIKELGSQILKEHPVENTQLQNEKLYLYYLQNGRDMYVDQELDINRLSDYDVDHIVPQSFLKDDSIDNKVLTRSDKARGKSDNVPSEEVVKKMKNYWRQLLNAKLITQRKFDNLTKAERGGLSELDKAGFIKRQLVETRQITKHVAQILDSRMNTKYDENDKLIREVKVITLKSKLVSDFRKDFQFYKVREINNYHHAHDAYLNAVVGTALIKKYPKLESEFVYGDYKVYDVRKMIAKSEQEIGKATAKYFFYSNIMNFFKTEITLANGEIRKRPLIETNGETGEIVWDKGRDFATVRKVLSMPQVNIVKKTEVQTGGFSKESILPKRNSDKLIARKKDWDPKKYGGFDSPTVAYSVLVVAKVEKGKSKKLKSVKELLGITIMERSSFEKNPIDFLEAKGYKEVKKDLIIKLPKYSLFELENGRKRMLASAGELQKGNELALPSKYVNFLYLASHYEKLKGSPEDNEQKQLFVEQHKHYLDEIIEQISEFSKRVILADANLDKVLSAYNKHRDKPIREQAENIIHLFTLTNLGAPAAFKYFDTTIDRKRYTSTKEVLDATLIHQSITGLYETRIDLSQLGGDGGGSSGSSGSSGSSGSSGGWVQEISDSRPMLHIYLNGRRFLGLLNTGADKTCIAGRDWPANWPIHQTESSLQGLGMACGVARSSQPLRWQHEDKSGIIHPFVIPTLPFTLWGRDIMKDIKVRLMTDSPDDSQDLMIGAIESNLFADQISWKSDQPVWLNQWPLKQEKLQALQQLVTEQLQLGHLEESNSPWNTPVFVIKKKSGKWRLLQDLRAVNATMHDMGALQPGLPSPVAVPKGWEIIIIDLQDCFFNIKLHPEDCKRFAFSVPSPNFKRPYQRFQWKVLPQGMKNSPTLCQKFVDKAILTVRDKYQDSYIVHYMDDILLAHPSRSIVDEILTSMIQALNKHGLVVSTEKIQKYDNLKYLGTHIQGDSVSYQKLQIRTDKLRTLNDFQKLLGNINWIRPFLKLTTGELKPLFEILNGDSNPISTRKLTPEACKALQLMNERLSTARVKRLDLSQPWSLCILKTEYTPTACLWQDGVVEWIHLPHISPKVITPYDIFCTQLIIKGRHRSKELFSKDPDYIVVPYTKVQFDLLLQEKEDWPISLLGFLGEVHFHLPKDPLLTFTLQTAIIFPHMTSTTPLEKGIVIFTDGSANGRSVTYIQGREPIIKENTQNTAQQAEIVAVITAFEEVSQPFNLYTDSKYVTGLFPEIETATLSPRTKIYTELKHLQRLIHKRQEKFYIGHIRGHTGLPGPLAQGNAYADSLTRILTAGKRTADGSEFEKRTADGSEFESPKKKAKVE

SEQ ID NO: 3282 - protein, 2123 aa, synthetic construct
MPAAKRVKLDGGDKKYSIGLDIGTNSVGWAVITDEYKVPSKKFKVLGNTDRHSIKKNLIGALLFDSGETAEATRLKRTARRRYTRRKNRICYLQEIFSNEMAKVDDSFFHRLEESFLVEEDKKHERHPIFGNIVDEVAYHEKYPTIYHLRKKLVDSTDKADLRLIYLALAHMIKFRGHFLIEGDLNPDNSDVDKLFIQLVQTYNQLFEENPINASGVDAKAILSARLSKSRRLENLIAQLPGEKKNGLFGNLIALSLGLTPNFKSNFDLAEDAKLQLSKDTYDDDLDNLLAQIGDQYADLFLAAKNLSDAILLSDILRVNTEITKAPLSASMIKRYDEHHQDLTLLKALVRQQLPEKYKEIFFDQSKNGYAGYIDGGASQEEFYKFIKPILEKMDGTEELLVKLNREDLLRKQRTFDNGSIPHQIHLGELHAILRRQEDFYPFLKDNREKIEKILTFRIPYYVGPLARGNSRFAWMTRKSEETITPWNFEEVVDKGASAQSFIERMTNFDKNLPNEKVLPKHSLLYEYFTVYNELTKVKYVTEGMRKPAFLSGEQKKAIVDLLFKTNRKVTVKQLKEDYFKKIECFDSVEISGVEDRFNASLGTYHDLLKIIKDKDFLDNEENEDILEDIVLTLTLFEDREMIEERLKTYAHLFDDKVMKQLKRRRYTGWGRLSRKLINGIRDKQSGKTILDFLKSDGFANRNFMQLIHDDSLTFKEDIQKAQVSGQGDSLHEHIANLAGSPAIKKGILQTVKVVDELVKVMGRHKPENIVIEMARENQTTQKGQKNSRERMKRIEEGIKELGSQILKEHPVENTQLQNEKLYLYYLQNGRDMYVDQELDINRLSDYDVDHIVPQSFLKDDSIDNKVLTRSDKARGKSDNVPSEEVVKKMKNYWRQLLNAKLITQRKFDNLTKAERGGLSELDKAGFIKRQLVETRQITKHVAQILDSRMNTKYDENDKLIREVKVITLKSKLVSDFRKDFQFYKVREINNYHHAHDAYLNAVVGTALIKKYPKLESEFVYGDYKVYDVRKMIAKSEQEIGKATAKYFFYSNIMNFFKTEITLANGEIRKRPLIETNGETGEIVWDKGRDFATVRKVLSMPQVNIVKKTEVQTGGFSKESILPKRNSDKLIARKKDWDPKKYGGFDSPTVAYSVLVVAKVEKGKSKKLKSVKELLGITIMERSSFEKNPIDFLEAKGYKEVKKDLIIKLPKYSLFELENGRKRMLASAGELQKGNELALPSKYVNFLYLASHYEKLKGSPEDNEQKQLFVEQHKHYLDEIIEQISEFSKRVILADANLDKVLSAYNKHRDKPIREQAENIIHLFTLTNLGAPAAFKYFDTTIDRKRYTSTKEVLDATLIHQSITGLYETRIDLSQLGGDGGGSSGSSGSSGSSGSSGSSGGWVQEISDSRPMLHIYLNGRRFLGLLNTGADKTCIAGRDWPANWPIHQTESSLQGLGMACGVARSSQPLRWQHEDKSGIIHPFVIPTLPFTLWGRDIMKDIKVRLMTDSPDDSQDLMIGAIESNLFADQISWKSDQPVWLNQWPLKQEKLQALQQLVTEQLQLGHLEESNSPWNTPVFVIKKKSGKWRLLQDLRAVNATMHDMGALQPGLPSPVAVPKGWEIIIIDLQDCFFNIKLHPEDCKRFAFSVPSPNFKRPYQRFQWKVLPQGMKNSPTLCQKFVDKAILTVRDKYQDSYIVHYMDDILLAHPSRSIVDEILTSMIQALNKHGLVVSTEKIQKYDNLKYLGTHIQGDSVSYQKLQIRTDKLRTLNDFQKLLGNINWIRPFLKLTTGELKPLFEILNGDSNPISTRKLTPEACKALQLMNERLSTARVKRLDLSQPWSLCILKTEYTPTACLWQDGVVEWIHLPHISPKVITPYDIFCTQLIIKGRHRSKELFSKDPDYIVVPYTKVQFDLLLQEKEDWPISLLGFLGEVHFHLPKDPLLTFTLQTAIIFPHMTSTTPLEKGIVIFTDGSANGRSVTYIQGREPIIKENTQNTAQQAEIVAVITAFEEVSQPFNLYTDSKYVTGLFPEIETATLSPRTKIYTELKHLQRLIHKRQEKFYIGHIRGHTGLPGPLAQGNAYADSLTRILTAGKRTADGSEFEKRTADGSEFESPKKKAKVE

SEQ ID NO: 3283 - protein, 2116 aa, synthetic construct
MPAAKRVKLDGGDKKYSIGLDIGTNSVGWAVITDEYKVPSKKFKVLGNTDRHSIKKNLIGALLFDSGETAEATRLKRTARRRYTRRKNRICYLQEIFSNEMAKVDDSFFHRLEESFLVEEDKKHERHPIFGNIVDEVAYHEKYPTIYHLRKKLVDSTDKADLRLIYLALAHMIKFRGHFLIEGDLNPDNSDVDKLFIQLVQTYNQLFEENPINASGVDAKAILSARLSKSRRLENLIAQLPGEKKNGLFGNLIALSLGLTPNFKSNFDLAEDAKLQLSKDTYDDDLDNLLAQIGDQYADLFLAAKNLSDAILLSDILRVNTEITKAPLSASMIKRYDEHHQDLTLLKALVRQQLPEKYKEIFFDQSKNGYAGYIDGGASQEEFYKFIKPILEKMDGTEELLVKLNREDLLRKQRTFDNGSIPHQIHLGELHAILRRQEDFYPFLKDNREKIEKILTFRIPYYVGPLARGNSRFAWMTRKSEETITPWNFEEVVDKGASAQSFIERMTNFDKNLPNEKVLPKHSLLYEYFTVYNELTKVKYVTEGMRKPAFLSGEQKKAIVDLLFKTNRKVTVKQLKEDYFKKIECFDSVEISGVEDRFNASLGTYHDLLKIIKDKDFLDNEENEDILEDIVLTLTLFEDREMIEERLKTYAHLFDDKVMKQLKRRRYTGWGRLSRKLINGIRDKQSGKTILDFLKSDGFANRNFMQLIHDDSLTFKEDIQKAQVSGQGDSLHEHIANLAGSPAIKKGILQTVKVVDELVKVMGRHKPENIVIEMARENQTTQKGQKNSRERMKRIEEGIKELGSQILKEHPVENTQLQNEKLYLYYLQNGRDMYVDQELDINRLSDYDVDHIVPQSFLKDDSIDNKVLTRSDKARGKSDNVPSEEVVKKMKNYWRQLLNAKLITQRKFDNLTKAERGGLSELDKAGFIKRQLVETRQITKHVAQILDSRMNTKYDENDKLIREVKVITLKSKLVSDFRKDFQFYKVREINNYHHAHDAYLNAVVGTALIKKYPKLESEFVYGDYKVYDVRKMIAKSEQEIGKATAKYFFYSNIMNFFKTEITLANGEIRKRPLIETNGETGEIVWDKGRDFATVRKVLSMPQVNIVKKTEVQTGGFSKESILPKRNSDKLIARKKDWDPKKYGGFDSPTVAYSVLVVAKVEKGKSKKLKSVKELLGITIMERSSFEKNPIDFLEAKGYKEVKKDLIIKLPKYSLFELENGRKRMLASAGELQKGNELALPSKYVNFLYLASHYEKLKGSPEDNEQKQLFVEQHKHYLDEIIEQISEFSKRVILADANLDKVLSAYNKHRDKPIREQAENIIHLFTLTNLGAPAAFKYFDTTIDRKRYTSTKEVLDATLIHQSITGLYETRIDLSQLGGDGGEAAAKGGGGSSGGWVQEISDSRPMLHIYLNGRRFLGLLNTGADKTCIAGRDWPANWPIHQTESSLQGLGMACGVARSSQPLRWQHEDKSGIIHPFVIPTLPFTLWGRDIMKDIKVRLMTDSPDDSQDLMIGAIESNLFADQISWKSDQPVWLNQWPLKQEKLQALQQLVTEQLQLGHLEESNSPWNTPVFVIKKKSGKWRLLQDLRAVNATMHDMGALQPGLPSPVAVPKGWEIIIIDLQDCFFNIKLHPEDCKRFAFSVPSPNFKRPYQRFQWKVLPQGMKNSPTLCQKFVDKAILTVRDKYQDSYIVHYMDDILLAHPSRSIVDEILTSMIQALNKHGLVVSTEKIQKYDNLKYLGTHIQGDSVSYQKLQIRTDKLRTLNDFQKLLGNINWIRPFLKLTTGELKPLFEILNGDSNPISTRKLTPEACKALQLMNERLSTARVKRLDLSQPWSLCILKTEYTPTACLWQDGVVEWIHLPHISPKVITPYDIFCTQLIIKGRHRSKELFSKDPDYIVVPYTKVQFDLLLQEKEDWPISLLGFLGEVHFHLPKDPLLTFTLQTAIIFPHMTSTTPLEKGIVIFTDGSANGRSVTYIQGREPIIKENTQNTAQQAEIVAVITAFEEVSQPFNLYTDSKYVTGLFPEIETATLSPRTKIYTELKHLQRLIHKRQEKFYIGHIRGHTGLPGPLAQGNAYADSLTRILTAGKRTADGSEFEKRTADGSEFESPKKKAKVE

SEQ ID NO: 3284 - protein, 2116 aa, synthetic construct
MPAAKRVKLDGGDKKYSIGLDIGTNSVGWAVITDEYKVPSKKFKVLGNTDRHSIKKNLIGALLFDSGETAEATRLKRTARRRYTRRKNRICYLQEIFSNEMAKVDDSFFHRLEESFLVEEDKKHERHPIFGNIVDEVAYHEKYPTIYHLRKKLVDSTDKADLRLIYLALAHMIKFRGHFLIEGDLNPDNSDVDKLFIQLVQTYNQLFEENPINASGVDAKAILSARLSKSRRLENLIAQLPGEKKNGLFGNLIALSLGLTPNFKSNFDLAEDAKLQLSKDTYDDDLDNLLAQIGDQYADLFLAAKNLSDAILLSDILRVNTEITKAPLSASMIKRYDEHHQDLTLLKALVRQQLPEKYKEIFFDQSKNGYAGYIDGGASQEEFYKFIKPILEKMDGTEELLVKLNREDLLRKQRTFDNGSIPHQIHLGELHAILRRQEDFYPFLKDNREKIEKILTFRIPYYVGPLARGNSRFAWMTRKSEETITPWNFEEVVDKGASAQSFIERMTNFDKNLPNEKVLPKHSLLYEYFTVYNELTKVKYVTEGMRKPAFLSGEQKKAIVDLLFKTNRKVTVKQLKEDYFKKIECFDSVEISGVEDRFNASLGTYHDLLKIIKDKDFLDNEENEDILEDIVLTLTLFEDREMIEERLKTYAHLFDDKVMKQLKRRRYTGWGRLSRKLINGIRDKQSGKTILDFLKSDGFANRNFMQLIHDDSLTFKEDIQKAQVSGQGDSLHEHIANLAGSPAIKKGILQTVKVVDELVKVMGRHKPENIVIEMARENQTTQKGQKNSRERMKRIEEGIKELGSQILKEHPVENTQLQNEKLYLYYLQNGRDMYVDQELDINRLSDYDVDHIVPQSFLKDDSIDNKVLTRSDKARGKSDNVPSEEVVKKMKNYWRQLLNAKLITQRKFDNLTKAERGGLSELDKAGFIKRQLVETRQITKHVAQILDSRMNTKYDENDKLIREVKVITLKSKLVSDFRKDFQFYKVREINNYHHAHDAYLNAVVGTALIKKYPKLESEFVYGDYKVYDVRKMIAKSEQEIGKATAKYFFYSNIMNFFKTEITLANGEIRKRPLIETNGETGEIVWDKGRDFATVRKVLSMPQVNIVKKTEVQTGGFSKESILPKRNSDKLIARKKDWDPKKYGGFDSPTVAYSVLVVAKVEKGKSKKLKSVKELLGITIMERSSFEKNPIDFLEAKGYKEVKKDLIIKLPKYSLFELENGRKRMLASAGELQKGNELALPSKYVNFLYLASHYEKLKGSPEDNEQKQLFVEQHKHYLDEIIEQISEFSKRVILADANLDKVLSAYNKHRDKPIREQAENIIHLFTLTNLGAPAAFKYFDTTIDRKRYTSTKEVLDATLIHQSITGLYETRIDLSQLGGDGGEAAAKGGGGGSGGWVQEISDSRPMLHIYLNGRRFLGLLNTGADKTCIAGRDWPANWPIHQTESSLQGLGMACGVARSSQPLRWQHEDKSGIIHPFVIPTLPFTLWGRDIMKDIKVRLMTDSPDDSQDLMIGAIESNLFADQISWKSDQPVWLNQWPLKQEKLQALQQLVTEQLQLGHLEESNSPWNTPVFVIKKKSGKWRLLQDLRAVNATMHDMGALQPGLPSPVAVPKGWEIIIIDLQDCFFNIKLHPEDCKRFAFSVPSPNFKRPYQRFQWKVLPQGMKNSPTLCQKFVDKAILTVRDKYQDSYIVHYMDDILLAHPSRSIVDEILTSMIQALNKHGLVVSTEKIQKYDNLKYLGTHIQGDSVSYQKLQIRTDKLRTLNDFQKLLGNINWIRPFLKLTTGELKPLFEILNGDSNPISTRKLTPEACKALQLMNERLSTARVKRLDLSQPWSLCILKTEYTPTACLWQDGVVEWIHLPHISPKVITPYDIFCTQLIIKGRHRSKELFSKDPDYIVVPYTKVQFDLLLQEKEDWPISLLGFLGEVHFHLPKDPLLTFTLQTAIIFPHMTSTTPLEKGIVIFTDGSANGRSVTYIQGREPIIKENTQNTAQQAEIVAVITAFEEVSQPFNLYTDSKYVTGLFPEIETATLSPRTKIYTELKHLQRLIHKRQEKFYIGHIRGHTGLPGPLAQGNAYADSLTRILTAGKRTADGSEFEKRTADGSEFESPKKKAKVE

SEQ ID NO: 3285 - protein, 2116 aa, synthetic construct
MPAAKRVKLDGGDKKYSIGLDIGTNSVGWAVITDEYKVPSKKFKVLGNTDRHSIKKNLIGALLFDSGETAEATRLKRTARRRYTRRKNRICYLQEIFSNEMAKVDDSFFHRLEESFLVEEDKKHERHPIFGNIVDEVAYHEKYPTIYHLRKKLVDSTDKADLRLIYLALAHMIKFRGHFLIEGDLNPDNSDVDKLFIQLVQTYNQLFEENPINASGVDAKAILSARLSKSRRLENLIAQLPGEKKNGLFGNLIALSLGLTPNFKSNFDLAEDAKLQLSKDTYDDDLDNLLAQIGDQYADLFLAAKNLSDAILLSDILRVNTEITKAPLSASMIKRYDEHHQDLTLLKALVRQQLPEKYKEIFFDQSKNGYAGYIDGGASQEEFYKFIKPILEKMDGTEELLVKLNREDLLRKQRTFDNGSIPHQIHLGELHAILRRQEDFYPFLKDNREKIEKILTFRIPYYVGPLARGNSRFAWMTRKSEETITPWNFEEVVDKGASAQSFIERMTNFDKNLPNEKVLPKHSLLYEYFTVYNELTKVKYVTEGMRKPAFLSGEQKKAIVDLLFKTNRKVTVKQLKEDYFKKIECFDSVEISGVEDRFNASLGTYHDLLKIIKDKDFLDNEENEDILEDIVLTLTLFEDREMIEERLKTYAHLFDDKVMKQLKRRRYTGWGRLSRKLINGIRDKQSGKTILDFLKSDGFANRNFMQLIHDDSLTFKEDIQKAQVSGQGDSLHEHIANLAGSPAIKKGILQTVKVVDELVKVMGRHKPENIVIEMARENQTTQKGQKNSRERMKRIEEGIKELGSQILKEHPVENTQLQNEKLYLYYLQNGRDMYVDQELDINRLSDYDVDHIVPQSFLKDDSIDNKVLTRSDKARGKSDNVPSEEVVKKMKNYWRQLLNAKLITQRKFDNLTKAERGGLSELDKAGFIKRQLVETRQITKHVAQILDSRMNTKYDENDKLIREVKVITLKSKLVSDFRKDFQFYKVREINNYHHAHDAYLNAVVGTALIKKYPKLESEFVYGDYKVYDVRKMIAKSEQEIGKATAKYFFYSNIMNFFKTEITLANGEIRKRPLIETNGETGEIVWDKGRDFATVRKVLSMPQVNIVKKTEVQTGGFSKESILPKRNSDKLIARKKDWDPKKYGGFDSPTVAYSVLVVAKVEKGKSKKLKSVKELLGITIMERSSFEKNPIDFLEAKGYKEVKKDLIIKLPKYSLFELENGRKRMLASAGELQKGNELALPSKYVNFLYLASHYEKLKGSPEDNEQKQLFVEQHKHYLDEIIEQISEFSKRVILADANLDKVLSAYNKHRDKPIREQAENIIHLFTLTNLGAPAAFKYFDTTIDRKRYTSTKEVLDATLIHQSITGLYETRIDLSQLGGDGGGGGGSSEAAAKGGWVQEISDSRPMLHIYLNGRRFLGLLNTGADKTCIAGRDWPANWPIHQTESSLQGLGMACGVARSSQPLRWQHEDKSGIIHPFVIPTLPFTLWGRDIMKDIKVRLMTDSPDDSQDLMIGAIESNLFADQISWKSDQPVWLNQWPLKQEKLQALQQLVTEQLQLGHLEESNSPWNTPVFVIKKKSGKWRLLQDLRAVNATMHDMGALQPGLPSPVAVPKGWEIIIIDLQDCFFNIKLHPEDCKRFAFSVPSPNFKRPYQRFQWKVLPQGMKNSPTLCQKFVDKAILTVRDKYQDSYIVHYMDDILLAHPSRSIVDEILTSMIQALNKHGLVVSTEKIQKYDNLKYLGTHIQGDSVSYQKLQIRTDKLRTLNDFQKLLGNINWIRPFLKLTTGELKPLFEILNGDSNPISTRKLTPEACKALQLMNERLSTARVKRLDLSQPWSLCILKTEYTPTACLWQDGVVEWIHLPHISPKVITPYDIFCTQLIIKGRHRSKELFSKDPDYIVVPYTKVQFDLLLQEKEDWPISLLGFLGEVHFHLPKDPLLTFTLQTAIIFPHMTSTTPLEKGIVIFTDGSANGRSVTYIQGREPIIKENTQNTAQQAEIVAVITAFEEVSQPFNLYTDSKYVTGLFPEIETATLSPRTKIYTELKHLQRLIHKRQEKFYIGHIRGHTGLPGPLAQGNAYADSLTRILTAGKRTADGSEFEKRTADGSEFESPKKKAKVE

SEQ ID NO: 3286 - protein, 2116 aa, synthetic construct
MPAAKRVKLDGGDKKYSIGLDIGTNSVGWAVITDEYKVPSKKFKVLGNTDRHSIKKNLIGALLFDSGETAEATRLKRTARRRYTRRKNRICYLQEIFSNEMAKVDDSFFHRLEESFLVEEDKKHERHPIFGNIVDEVAYHEKYPTIYHLRKKLVDSTDKADLRLIYLALAHMIKFRGHFLIEGDLNPDNSDVDKLFIQLVQTYNQLFEENPINASGVDAKAILSARLSKSRRLENLIAQLPGEKKNGLFGNLIALSLGLTPNFKSNFDLAEDAKLQLSKDTYDDDLDNLLAQIGDQYADLFLAAKNLSDAILLSDILRVNTEITKAPLSASMIKRYDEHHQDLTLLKALVRQQLPEKYKEIFFDQSKNGYAGYIDGGASQEEFYKFIKPILEKMDGTEELLVKLNREDLLRKQRTFDNGSIPHQIHLGELHAILRRQEDFYPFLKDNREKIEKILTFRIPYYVGPLARGNSRFAWMTRKSEETITPWNFEEVVDKGASAQSFIERMTNFDKNLPNEKVLPKHSLLYEYFTVYNELTKVKYVTEGMRKPAFLSGEQKKAIVDLLFKTNRKVTVKQLKEDYFKKIECFDSVEISGVEDRFNASLGTYHDLLKIIKDKDFLDNEENEDILEDIVLTLTLFEDREMIEERLKTYAHLFDDKVMKQLKRRRYTGWGRLSRKLINGIRDKQSGKTILDFLKSDGFANRNFMQLIHDDSLTFKEDIQKAQVSGQGDSLHEHIANLAGSPAIKKGILQTVKVVDELVKVMGRHKPENIVIEMARENQTTQKGQKNSRERMKRIEEGIKELGSQILKEHPVENTQLQNEKLYLYYLQNGRDMYVDQELDINRLSDYDVDHIVPQSFLKDDSIDNKVLTRSDKARGKSDNVPSEEVVKKMKNYWRQLLNAKLITQRKFDNLTKAERGGLSELDKAGFIKRQLVETRQITKHVAQILDSRMNTKYDENDKLIREVKVITLKSKLVSDFRKDFQFYKVREINNYHHAHDAYLNAVVGTALIKKYPKLESEFVYGDYKVYDVRKMIAKSEQEIGKATAKYFFYSNIMNFFKTEITLANGEIRKRPLIETNGETGEIVWDKGRDFATVRKVLSMPQVNIVKKTEVQTGGFSKESILPKRNSDKLIARKKDWDPKKYGGFDSPTVAYSVLVVAKVEKGKSKKLKSVKELLGITIMERSSFEKNPIDFLEAKGYKEVKKDLIIKLPKYSLFELENGRKRMLASAGELQKGNELALPSKYVNFLYLASHYEKLKGSPEDNEQKQLFVEQHKHYLDEIIEQISEFSKRVILADANLDKVLSAYNKHRDKPIREQAENIIHLFTLTNLGAPAAFKYFDTTIDRKRYTSTKEVLDATLIHQSITGLYETRIDLSQLGGDGGGGSGGGEAAAKGGWVQEISDSRPMLHIYLNGRRFLGLLNTGADKTCIAGRDWPANWPIHQTESSLQGLGMACGVARSSQPLRWQHEDKSGIIHPFVIPTLPFTLWGRDIMKDIKVRLMTDSPDDSQDLMIGAIESNLFADQISWKSDQPVWLNQWPLKQEKLQALQQLVTEQLQLGHLEESNSPWNTPVFVIKKKSGKWRLLQDLRAVNATMHDMGALQPGLPSPVAVPKGWEIIIIDLQDCFFNIKLHPEDCKRFAFSVPSPNFKRPYQRFQWKVLPQGMKNSPTLCQKFVDKAILTVRDKYQDSYIVHYMDDILLAHPSRSIVDEILTSMIQALNKHGLVVSTEKIQKYDNLKYLGTHIQGDSVSYQKLQIRTDKLRTLNDFQKLLGNINWIRPFLKLTTGELKPLFEILNGDSNPISTRKLTPEACKALQLMNERLSTARVKRLDLSQPWSLCILKTEYTPTACLWQDGVVEWIHLPHISPKVITPYDIFCTQLIIKGRHRSKELFSKDPDYIVVPYTKVQFDLLLQEKEDWPISLLGFLGEVHFHLPKDPLLTFTLQTAIIFPHMTSTTPLEKGIVIFTDGSANGRSVTYIQGREPIIKENTQNTAQQAEIVAVITAFEEVSQPFNLYTDSKYVTGLFPEIETATLSPRTKIYTELKHLQRLIHKRQEKFYIGHIRGHTGLPGPLAQGNAYADSLTRILTAGKRTADGSEFEKRTADGSEFESPKKKAKVE

SEQ ID NO: 3287 - protein, 2114 aa, synthetic construct; identical to SEQ ID NO: 3179

SEQ ID NO: 3288 - protein, 2116 aa, synthetic construct
MPAAKRVKLDGGDKKYSIGLDIGTNSVGWAVITDEYKVPSKKFKVLGNTDRHSIKKNLIGALLFDSGETAEATRLKRTARRRYTRRKNRICYLQEIFSNEMAKVDDSFFHRLEESFLVEEDKKHERHPIFGNIVDEVAYHEKYPTIYHLRKKLVDSTDKADLRLIYLALAHMIKFRGHFLIEGDLNPDNSDVDKLFIQLVQTYNQLFEENPINASGVDAKAILSARLSKSRRLENLIAQLPGEKKNGLFGNLIALSLGLTPNFKSNFDLAEDAKLQLSKDTYDDDLDNLLAQIGDQYADLFLAAKNLSDAILLSDILRVNTEITKAPLSASMIKRYDEHHQDLTLLKALVRQQLPEKYKEIFFDQSKNGYAGYIDGGASQEEFYKFIKPILEKMDGTEELLVKLNREDLLRKQRTFDNGSIPHQIHLGELHAILRRQEDFYPFLKDNREKIEKILTFRIPYYVGPLARGNSRFAWMTRKSEETITPWNFEEVVDKGASAQSFIERMTNFDKNLPNEKVLPKHSLLYEYFTVYNELTKVKYVTEGMRKPAFLSGEQKKAIVDLLFKTNRKVTVKQLKEDYFKKIECFDSVEISGVEDRFNASLGTYHDLLKIIKDKDFLDNEENEDILEDIVLTLTLFEDREMIEERLKTYAHLFDDKVMKQLKRRRYTGWGRLSRKLINGIRDKQSGKTILDFLKSDGFANRNFMQLIHDDSLTFKEDIQKAQVSGQGDSLHEHIANLAGSPAIKKGILQTVKVVDELVKVMGRHKPENIVIEMARENQTTQKGQKNSRERMKRIEEGIKELGSQILKEHPVENTQLQNEKLYLYYLQNGRDMYVDQELDINRLSDYDVDHIVPQSFLKDDSIDNKVLTRSDKARGKSDNVPSEEVVKKMKNYWRQLLNAKLITQRKFDNLTKAERGGLSELDKAGFIKRQLVETRQITKHVAQILDSRMNTKYDENDKLIREVKVITLKSKLVSDFRKDFQFYKVREINNYHHAHDAYLNAVVGTALIKKYPKLESEFVYGDYKVYDVRKMIAKSEQEIGKATAKYFFYSNIMNFFKTEITLANGEIRKRPLIETNGETGEIVWDKGRDFATVRKVLSMPQVNIVKKTEVQTGGFSKESILPKRNSDKLIARKKDWDPKKYGGFDSPTVAYSVLVVAKVEKGKSKKLKSVKELLGITIMERSSFEKNPIDFLEAKGYKEVKKDLIIKLPKYSLFELENGRKRMLASAGELQKGNELALPSKYVNFLYLASHYEKLKGSPEDNEQKQLFVEQHKHYLDEIIEQISEFSKRVILADANLDKVLSAYNKHRDKPIREQAENIIHLFTLTNLGAPAAFKYFDTTIDRKRYTSTKEVLDATLIHQSITGLYETRIDLSQLGGDGGPAPEAAAKGGSGGWVQEISDSRPMLHIYLNGRRFLGLLNTGADKTCIAGRDWPANWPIHQTESSLQGLGMACGVARSSQPLRWQHEDKSGIIHPFVIPTLPFTLWGRDIMKDIKVRLMTDSPDDSQDLMIGAIESNLFADQISWKSDQPVWLNQWPLKQEKLQALQQLVTEQLQLGHLEESNSPWNTPVFVIKKKSGKWRLLQDLRAVNATMHDMGALQPGLPSPVAVPKGWEIIIIDLQDCFFNIKLHPEDCKRFAFSVPSPNFKRPYQRFQWKVLPQGMKNSPTLCQKFVDKAILTVRDKYQDSYIVHYMDDILLAHPSRSIVDEILTSMIQALNKHGLVVSTEKIQKYDNLKYLGTHIQGDSVSYQKLQIRTDKLRTLNDFQKLLGNINWIRPFLKLTTGELKPLFEILNGDSNPISTRKLTPEACKALQLMNERLSTARVKRLDLSQPWSLCILKTEYTPTACLWQDGVVEWIHLPHISPKVITPYDIFCTQLIIKGRHRSKELFSKDPDYIVVPYTKVQFDLLLQEKEDWPISLLGFLGEVHFHLPKDPLLTFTLQTAIIFPHMTSTTPLEKGIVIFTDGSANGRSVTYIQGREPIIKENTQNTAQQAEIVAVITAFEEVSQPFNLYTDSKYVTGLFPEIETATLSPRTKIYTELKHLQRLIHKRQEKFYIGHIRGHTGLPGPLAQGNAYADSLTRILTAGKRTADGSEFEKRTADGSEFESPKKKAKVE

SEQ ID NO: 3289 - protein, 2116 aa, synthetic construct; identical to SEQ ID NO: 3178

SEQ ID NO: 3290 - protein, 2116 aa, synthetic construct
MPAAKRVKLDGGDKKYSIGLDIGTNSVGWAVITDEYKVPSKKFKVLGNTDRHSIKKNLIGALLFDSGETAEATRLKRTARRRYTRRKNRICYLQEIFSNEMAKVDDSFFHRLEESFLVEEDKKHERHPIFGNIVDEVAYHEKYPTIYHLRKKLVDSTDKADLRLIYLALAHMIKFRGHFLIEGDLNPDNSDVDKLFIQLVQTYNQLFEENPINASGVDAKAILSARLSKSRRLENLIAQLPGEKKNGLFGNLIALSLGLTPNFKSNFDLAEDAKLQLSKDTYDDDLDNLLAQIGDQYADLFLAAKNLSDAILLSDILRVNTEITKAPLSASMIKRYDEHHQDLTLLKALVRQQLPEKYKEIFFDQSKNGYAGYIDGGASQEEFYKFIKPILEKMDGTEELLVKLNREDLLRKQRTFDNGSIPHQIHLGELHAILRRQEDFYPFLKDNREKIEKILTFRIPYYVGPLARGNSRFAWMTRKSEETITPWNFEEVVDKGASAQSFIERMTNFDKNLPNEKVLPKHSLLYEYFTVYNELTKVKYVTEGMRKPAFLSGEQKKAIVDLLFKTNRKVTVKQLKEDYFKKIECFDSVEISGVEDRFNASLGTYHDLLKIIKDKDFLDNEENEDILEDIVLTLTLFEDREMIEERLKTYAHLFDDKVMKQLKRRRYTGWGRLSRKLINGIRDKQSGKTILDFLKSDGFANRNFMQLIHDDSLTFKEDIQKAQVSGQGDSLHEHIANLAGSPAIKKGILQTVKVVDELVKVMGRHKPENIVIEMARENQTTQKGQKNSRERMKRIEEGIKELGSQILKEHPVENTQLQNEKLYLYYLQNGRDMYVDQELDINRLSDYDVDHIVPQSFLKDDSIDNKVLTRSDKARGKSDNVPSEEVVKKMKNYWRQLLNAKLITQRKFDNLTKAERGGLSELDKAGFIKRQLVETRQITKHVAQILDSRMNTKYDENDKLIREVKVITLKSKLVSDFRKDFQFYKVREINNYHHAHDAYLNAVVGTALIKKYPKLESEFVYGDYKVYDVRKMIAKSEQEIGKATAKYFFYSNIMNFFKTEITLANGEIRKRPLIETNGETGEIVWDKGRDFATVRKVLSMPQVNIVKKTEVQTGGFSKESILPKRNSDKLIARKKDWDPKKYGGFDSPTVAYSVLVVAKVEKGKSKKLKSVKELLGITIMERSSFEKNPIDFLEAKGYKEVKKDLIIKLPKYSLFELENGRKRMLASAGELQKGNELALPSKYVNFLYLASHYEKLKGSPEDNEQKQLFVEQHKHYLDEIIEQISEFSKRVILADANLDKVLSAYNKHRDKPIREQAENIIHLFTLTNLGAPAAFKYFDTTIDRKRYTSTKEVLDATLIHQSITGLYETRIDLSQLGGDGGPAPGGSEAAAKGGWVQEISDSRPMLHIYLNGRRFLGLLNTGADKTCIAGRDWPANWPIHQTESSLQGLGMACGVARSSQPLRWQHEDKSGIIHPFVIPTLPFTLWGRDIMKDIKVRLMTDSPDDSQDLMIGAIESNLFADQISWKSDQPVWLNQWPLKQEKLQALQQLVTEQLQLGHLEESNSPWNTPVFVIKKKSGKWRLLQDLRAVNATMHDMGALQPGLPSPVAVPKGWEIIIIDLQDCFFNIKLHPEDCKRFAFSVPSPNFKRPYQRFQWKVLPQGMKNSPTLCQKFVDKAILTVRDKYQDSYIVHYMDDILLAHPSRSIVDEILTSMIQALNKHGLVVSTEKIQKYDNLKYLGTHIQGDSVSYQKLQIRTDKLRTLNDFQKLLGNINWIRPFLKLTTGELKPLFEILNGDSNPISTRKLTPEACKALQLMNERLSTARVKRLDLSQPWSLCILKTEYTPTACLWQDGVVEWIHLPHISPKVITPYDIFCTQLIIKGRHRSKELFSKDPDYIVVPYTKVQFDLLLQEKEDWPISLLGFLGEVHFHLPKDPLLTFTLQTAIIFPHMTSTTPLEKGIVIFTDGSANGRSVTYIQGREPIIKENTQNTAQQAEIVAVITAFEEVSQPFNLYTDSKYVTGLFPEIETATLSPRTKIYTELKHLQRLIHKRQEKFYIGHIRGHTGLPGPLAQGNAYADSLTRILTAGKRTADGSEFEKRTADGSEFESPKKKAKVE

SEQ ID NO: 3291 - protein, 2116 aa, synthetic construct
MPAAKRVKLDGGDKKYSIGLDIGTNSVGWAVITDEYKVPSKKFKVLGNTDRHSIKKNLIGALLFDSGETAEATRLKRTARRRYTRRKNRICYLQEIFSNEMAKVDDSFFHRLEESFLVEEDKKHERHPIFGNIVDEVAYHEKYPTIYHLRKKLVDSTDKADLRLIYLALAHMIKFRGHFLIEGDLNPDNSDVDKLFIQLVQTYNQLFEENPINASGVDAKAILSARLSKSRRLENLIAQLPGEKKNGLFGNLIALSLGLTPNFKSNFDLAEDAKLQLSKDTYDDDLDNLLAQIGDQYADLFLAAKNLSDAILLSDILRVNTEITKAPLSASMIKRYDEHHQDLTLLKALVRQQLPEKYKEIFFDQSKNGYAGYIDGGASQEEFYKFIKPILEKMDGTEELLVKLNREDLLRKQRTFDNGSIPHQIHLGELHAILRRQEDFYPFLKDNREKIEKILTFRIPYYVGPLARGNSRFAWMTRKSEETITPWNFEEVVDKGASAQSFIERMTNFDKNLPNEKVLPKHSLLYEYFTVYNELTKVKYVTEGMRKPAFLSGEQKKAIVDLLFKTNRKVTVKQLKEDYFKKIECFDSVEISGVEDRFNASLGTYHDLLKIIKDKDFLDNEENEDILEDIVLTLTLFEDREMIEERLKTYAHLFDDKVMKQLKRRRYTGWGRLSRKLINGIRDKQSGKTILDFLKSDGFANRNFMQLIHDDSLTFKEDIQKAQVSGQGDSLHEHIANLAGSPAIKKGILQTVKVVDELVKVMGRHKPENIVIEMARENQTTQKGQKNSRERMKRIEEGIKELGSQILKEHPVENTQLQNEKLYLYYLQNGRDMYVDQELDINRLSDYDVDHIVPQSFLKDDSIDNKVLTRSDKARGKSDNVPSEEVVKKMKNYWRQLLNAKLITQRKFDNLTKAERGGLSELDKAGFIKRQLVETRQITKHVAQILDSRMNTKYDENDKLIREVKVITLKSKLVSDFRKDFQFYKVREINNYHHAHDAYLNAVVGTALIKKYPKLESEFVYGDYKVYDVRKMIAKSEQEIGKATAKYFFYSNIMNFFKTEITLANGEIRKRPLIETNGETGEIVWDKGRDFATVRKVLSMPQVNIVKKTEVQTGGFSKESILPKRNSDKLIARKKDWDPKKYGGFDSPTVAYSVLVVAKVEKGKSKKLKSVKELLGITIMERSSFEKNPIDFLEAKGYKEVKKDLIIKLPKYSLFELENGRKRMLASAGELQKGNELALPSKYVNFLYLASHYEKLKGSPEDNEQKQLFVEQHKHYLDEIIEQISEFSKRVILADANLDKVLSAYNKHRDKPIREQAENIIHLFTLTNLGAPAAFKYFDTTIDRKRYTSTKEVLDATLIHQSITGLYETRIDLSQLGGDGGGGSEAAAKGGGGGWVQEISDSRPMLHIYLNGRRFLGLLNTGADKTCIAGRDWPANWPIHQTESSLQGLGMACGVARSSQPLRWQHEDKSGIIHPFVIPTLPFTLWGRDIMKDIKVRLMTDSPDDSQDLMIGAIESNLFADQISWKSDQPVWLNQWPLKQEKLQALQQLVTEQLQLGHLEESNSPWNTPVFVIKKKSGKWRLLQDLRAVNATMHDMGALQPGLPSPVAVPKGWEIIIIDLQDCFFNIKLHPEDCKRFAFSVPSPNFKRPYQRFQWKVLPQGMKNSPTLCQKFVDKAILTVRDKYQDSYIVHYMDDILLAHPSRSIVDEILTSMIQALNKHGLVVSTEKIQKYDNLKYLGTHIQGDSVSYQKLQIRTDKLRTLNDFQKLLGNINWIRPFLKLTTGELKPLFEILNGDSNPISTRKLTPEACKALQLMNERLSTARVKRLDLSQPWSLCILKTEYTPTACLWQDGVVEWIHLPHISPKVITPYDIFCTQLIIKGRHRSKELFSKDPDYIVVPYTKVQFDLLLQEKEDWPISLLGFLGEVHFHLPKDPLLTFTLQTAIIFPHMTSTTPLEKGIVIFTDGSANGRSVTYIQGREPIIKENTQNTAQQAEIVAVITAFEEVSQPFNLYTDSKYVTGLFPEIETATLSPRTKIYTELKHLQRLIHKRQEKFYIGHIRGHTGLPGPLAQGNAYADSLTRILTAGKRTADGSEFEKRTADGSEFESPKKKAKVE

SEQ ID NO: 3292 - protein, 2114 aa, synthetic construct
MPAAKRVKLDGGDKKYSIGLDIGTNSVGWAVITDEYKVPSKKFKVLGNTDRHSIKKNLIGALLFDSGETAEATRLKRTARRRYTRRKNRICYLQEIFSNEMAKVDDSFFHRLEESFLVEEDKKHERHPIFGNIVDEVAYHEKYPTIYHLRKKLVDSTDKADLRLIYLALAHMIKFRGHFLIEGDLNPDNSDVDKLFIQLVQTYNQLFEENPINASGVDAKAILSARLSKSRRLENLIAQLPGEKKNGLFGNLIALSLGLTPNFKSNFDLAEDAKLQLSKDTYDDDLDNLLAQIGDQYADLFLAAKNLSDAILLSDILRVNTEITKAPLSASMIKRYDEHHQDLTLLKALVRQQLPEKYKEIFFDQSKNGYAGYIDGGASQEEFYKFIKPILEKMDGTEELLVKLNREDLLRKQRTFDNGSIPHQIHLGELHAILRRQEDFYPFLKDNREKIEKILTFRIPYYVGPLARGNSRFAWMTRKSEETITPWNFEEVVDKGASAQSFIERMTNFDKNLPNEKVLPKHSLLYEYFTVYNELTKVKYVTEGMRKPAFLSGEQKKAIVDLLFKTNRKVTVKQLKEDYFKKIECFDSVEISGVEDRFNASLGTYHDLLKIIKDKDFLDNEENEDILEDIVLTLTLFEDREMIEERLKTYAHLFDDKVMKQLKRRRYTGWGRLSRKLINGIRDKQSGKTILDFLKSDGFANRNFMQLIHDDSLTFKEDIQKAQVSGQGDSLHEHIANLAGSPAIKKGILQTVKVVDELVKVMGRHKPENIVIEMARENQTTQKGQKNSRERMKRIEEGIKELGSQILKEHPVENTQLQNEKLYLYYLQNGRDMYVDQELDINRLSDYDVDHIVPQSFLKDDSIDNKVLTRSDKARGKSDNVPSEEVVKKMKNYWRQLLNAKLITQRKFDNLTKAERGGLSELDKAGFIKRQLVETRQITKHVAQILDSRMNTKYDENDKLIREVKVITLKSKLVSDFRKDFQFYKVREINNYHHAHDAYLNAVVGTALIKKYPKLESEFVYGDYKVYDVRKMIAKSEQEIGKATAKYFFYSNIMNFFKTEITLANGEIRKRPLIETNGETGEIVWDKGRDFATVRKVLSMPQVNIVKKTEVQTGGFSKESILPKRNSDKLIARKKDWDPKKYGGFDSPTVAYSVLVVAKVEKGKSKKLKSVKELLGITIMERSSFEKNPIDFLEAKGYKEVKKDLIIKLPKYSLFELENGRKRMLASAGELQKGNELALPSKYVNFLYLASHYEKLKGSPEDNEQKQLFVEQHKHYLDEIIEQISEFSKRVILADANLDKVLSAYNKHRDKPIREQAENIIHLFTLTNLGAPAAFKYFDTTIDRKRYTSTKEVLDATLIHQSITGLYETRIDLSQLGGDGGGGSGGSGGSGGWVQEISDSRPMLHIYLNGRRFLGLLNTGADKTCIAGRDWPANWPIHQTESSLQGLGMACGVARSSQPLRWQHEDKSGIIHPFVIPTLPFTLWGRDIMKDIKVRLMTDSPDDSQDLMIGAIESNLFADQISWKSDQPVWLNQWPLKQEKLQALQQLVTEQLQLGHLEESNSPWNTPVFVIKKKSGKWRLLQDLRAVNATMHDMGALQPGLPSPVAVPKGWEIIIIDLQDCFFNIKLHPEDCKRFAFSVPSPNFKRPYQRFQWKVLPQGMKNSPTLCQKFVDKAILTVRDKYQDSYIVHYMDDILLAHPSRSIVDEILTSMIQALNKHGLVVSTEKIQKYDNLKYLGTHIQGDSVSYQKLQIRTDKLRTLNDFQKLLGNINWIRPFLKLTTGELKPLFEILNGDSNPISTRKLTPEACKALQLMNERLSTARVKRLDLSQPWSLCILKTEYTPTACLWQDGVVEWIHLPHISPKVITPYDIFCTQLIIKGRHRSKELFSKDPDYIVVPYTKVQFDLLLQEKEDWPISLLGFLGEVHFHLPKDPLLTFTLQTAIIFPHMTSTTPLEKGIVIFTDGSANGRSVTYIQGREPIIKENTQNTAQQAEIVAVITAFEEVSQPFNLYTDSKYVTGLFPEIETATLSPRTKIYTELKHLQRLIHKRQEKFYIGHIRGHTGLPGPLAQGNAYADSLTRILTAGKRTADGSEFEKRTADGSEFESPKKKAKVE

SEQ ID NO: 3293 - protein, 2113 aa, synthetic construct
MPAAKRVKLDGGDKKYSIGLDIGTNSVGWAVITDEYKVPSKKFKVLGNTDRHSIKKNLIGALLFDSGETAEATRLKRTARRRYTRRKNRICYLQEIFSNEMAKVDDSFFHRLEESFLVEEDKKHERHPIFGNIVDEVAYHEKYPTIYHLRKKLVDSTDKADLRLIYLALAHMIKFRGHFLIEGDLNPDNSDVDKLFIQLVQTYNQLFEENPINASGVDAKAILSARLSKSRRLENLIAQLPGEKKNGLFGNLIALSLGLTPNFKSNFDLAEDAKLQLSKDTYDDDLDNLLAQIGDQYADLFLAAKNLSDAILLSDILRVNTEITKAPLSASMIKRYDEHHQDLTLLKALVRQQLPEKYKEIFFDQSKNGYAGYIDGGASQEEFYKFIKPILEKMDGTEELLVKLNREDLLRKQRTFDNGSIPHQIHLGELHAILRRQEDFYPFLKDNREKIEKILTFRIPYYVGPLARGNSRFAWMTRKSEETITPWNFEEVVDKGASAQSFIERMTNFDKNLPNEKVLPKHSLLYEYFTVYNELTKVKYVTEGMRKPAFLSGEQKKAIVDLLFKTNRKVTVKQLKEDYFKKIECFDSVEISGVEDRFNASLGTYHDLLKIIKDKDFLDNEENEDILEDIVLTLTLFEDREMIEERLKTYAHLFDDKVMKQLKRRRYTGWGRLSRKLINGIRDKQSGKTILDFLKSDGFANRNFMQLIHDDSLTFKEDIQKAQVSGQGDSLHEHIANLAGSPAIKKGILQTVKVVDELVKVMGRHKPENIVIEMARENQTTQKGQKNSRERMKRIEEGIKELGSQILKEHPVENTQLQNEKLYLYYLQNGRDMYVDQELDINRLSDYDVDHIVPQSFLKDDSIDNKVLTRSDKARGKSDNVPSEEVVKKMKNYWRQLLNAKLITQRKFDNLTKAERGGLSELDKAGFIKRQLVETRQITKHVAQILDSRMNTKYDENDKLIREVKVITLKSKLVSDFRKDFQFYKVREINNYHHAHDAYLNAVVGTALIKKYPKLESEFVYGDYKVYDVRKMIAKSEQEIGKATAKYFFYSNIMNFFKTEITLANGEIRKRPLIETNGETGEIVWDKGRDFATVRKVLSMPQVNIVKKTEVQTGGFSKESILPKRNSDKLIARKKDWDPKKYGGFDSPTVAYSVLVVAKVEKGKSKKLKSVKELLGITIMERSSFEKNPIDFLEAKGYKEVKKDLIIKLPKYSLFELENGRKRMLASAGELQKGNELALPSKYVNFLYLASHYEKLKGSPEDNEQKQLFVEQHKHYLDEIIEQISEFSKRVILADANLDKVLSAYNKHRDKPIREQAENIIHLFTLTNLGAPAAFKYFDTTIDRKRYTSTKEVLDATLIHQSITGLYETRIDLSQLGGDGGGGSEAAAKGGWVQEISDSRPMLHIYLNGRRFLGLLNTGADKTCIAGRDWPANWPIHQTESSLQGLGMACGVARSSQPLRWQHEDKSGIIHPFVIPTLPFTLWGRDIMKDIKVRLMTDSPDDSQDLMIGAIESNLFADQISWKSDQPVWLNQWPLKQEKLQALQQLVTEQLQLGHLEESNSPWNTPVFVIKKKSGKWRLLQDLRAVNATMHDMGALQPGLPSPVAVPKGWEIIIIDLQDCFFNIKLHPEDCKRFAFSVPSPNFKRPYQRFQWKVLPQGMKNSPTLCQKFVDKAILTVRDKYQDSYIVHYMDDILLAHPSRSIVDEILTSMIQALNKHGLVVSTEKIQKYDNLKYLGTHIQGDSVSYQKLQIRTDKLRTLNDFQKLLGNINWIRPFLKLTTGELKPLFEILNGDSNPISTRKLTPEACKALQLMNERLSTARVKRLDLSQPWSLCILKTEYTPTACLWQDGVVEWIHLPHISPKVITPYDIFCTQLIIKGRHRSKELFSKDPDYIVVPYTKVQFDLLLQEKEDWPISLLGFLGEVHFHLPKDPLLTFTLQTAIIFPHMTSTTPLEKGIVIFTDGSANGRSVTYIQGREPIIKENTQNTAQQAEIVAVITAFEEVSQPFNLYTDSKYVTGLFPEIETATLSPRTKIYTELKHLQRLIHKRQEKFYIGHIRGHTGLPGPLAQGNAYADSLTRILTAGKRTADGSEFEKRTADGSEFESPKKKAKVE

SEQ ID NO: 3294 - protein, 2043 aa, synthetic construct
MPAAKRVKLDGGDKKYSIGLDIGTNSVGWAVITDEYKVPSKKFKVLGNTDRHSIKKNLIGALLFDSGETAEATRLKRTARRRYTRRKNRICYLQEIFSNEMAKVDDSFFHRLEESFLVEEDKKHERHPIFGNIVDEVAYHEKYPTIYHLRKKLVDSTDKADLRLIYLALAHMIKFRGHFLIEGDLNPDNSDVDKLFIQLVQTYNQLFEENPINASGVDAKAILSARLSKSRRLENLIAQLPGEKKNGLFGNLIALSLGLTPNFKSNFDLAEDAKLQLSKDTYDDDLDNLLAQIGDQYADLFLAAKNLSDAILLSDILRVNTEITKAPLSASMIKRYDEHHQDLTLLKALVRQQLPEKYKEIFFDQSKNGYAGYIDGGASQEEFYKFIKPILEKMDGTEELLVKLNREDLLRKQRTFDNGSIPHQIHLGELHAILRRQEDFYPFLKDNREKIEKILTFRIPYYVGPLARGNSRFAWMTRKSEETITPWNFEEVVDKGASAQSFIERMTNFDKNLPNEKVLPKHSLLYEYFTVYNELTKVKYVTEGMRKPAFLSGEQKKAIVDLLFKTNRKVTVKQLKEDYFKKIECFDSVEISGVEDRFNASLGTYHDLLKIIKDKDFLDNEENEDILEDIVLTLTLFEDREMIEERLKTYAHLFDDKVMKQLKRRRYTGWGRLSRKLINGIRDKQSGKTILDFLKSDGFANRNFMQLIHDDSLTFKEDIQKAQVSGQGDSLHEHIANLAGSPAIKKGILQTVKVVDELVKVMGRHKPENIVIEMARENQTTQKGQKNSRERMKRIEEGIKELGSQILKEHPVENTQLQNEKLYLYYLQNGRDMYVDQELDINRLSDYDVDHIVPQSFLKDDSIDNKVLTRSDKARGKSDNVPSEEVVKKMKNYWRQLLNAKLITQRKFDNLTKAERGGLSELDKAGFIKRQLVETRQITKHVAQILDSRMNTKYDENDKLIREVKVITLKSKLVSDFRKDFQFYKVREINNYHHAHDAYLNAVVGTALIKKYPKLESEFVYGDYKVYDVRKMIAKSEQEIGKATAKYFFYSNIMNFFKTEITLANGEIRKRPLIETNGETGEIVWDKGRDFATVRKVLSMPQVNIVKKTEVQTGGFSKESILPKRNSDKLIARKKDWDPKKYGGFDSPTVAYSVLVVAKVEKGKSKKLKSVKELLGITIMERSSFEKNPIDFLEAKGYKEVKKDLIIKLPKYSLFELENGRKRMLASAGELQKGNELALPSKYVNFLYLASHYEKLKGSPEDNEQKQLFVEQHKHYLDEIIEQISEFSKRVILADANLDKVLSAYNKHRDKPIREQAENIIHLFTLTNLGAPAAFKYFDTTIDRKRYTSTKEVLDATLIHQSITGLYETRIDLSQLGGDGGEAAAKEAAAKEAAAKEAAAKEAAAKEAAAKGGGRDIMKDIKVRLMTDSPDDSQDLMIGAIESNLFADQISWKSDQPVWLNQWPLKQEKLQALQQLVTEQLQLGHLEESNSPWNTPVFVIKKKSGKWRLLQDLRAVNATMHDMGALQPGLPSPVAVPKGWEIIIIDLQDCFFNIKLHPEDCKRFAFSVPSPNFKRPYQRFQWKVLPQGMKNSPTLCQKFVDKAILTVRDKYQDSYIVHYMDDILLAHPSRSIVDEILTSMIQALNKHGLVVSTEKIQKYDNLKYLGTHIQGDSVSYQKLQIRTDKLRTLNDFQKLLGNINWIRPFLKLTTGELKPLFEILNGDSNPISTRKLTPEACKALQLMNERLSTARVKRLDLSQPWSLCILKTEYTPTACLWQDGVVEWIHLPHISPKVITPYDIFCTQLIIKGRHRSKELFSKDPDYIVVPYTKVQFDLLLQEKEDWPISLLGFLGEVHFHLPKDPLLTFTLQTAIIFPHMTSTTPLEKGIVIFTDGSANGRSVTYIQGREPIIKENTQNTAQQAEIVAVITAFEEVSQPFNLYTDSKYVTGLFPEIETATLSPRTKIYTELKHLQRLIHKRQEKFYIGHIRGHTGLPGPLAQGNAYADSLTRILTAGKRTADGSEFEKRTADGSEFESPKKKAKVE

SEQ ID NO: 3295 - protein, 2046 aa, synthetic construct; identical to SEQ ID NO: 3238

SEQ ID NO: 3296 - protein, 2028 aa, synthetic construct; identical to SEQ ID NO: 3201

SEQ ID NO: 3297 - protein, 2031 aa, synthetic construct
MPAAKRVKLDGGDKKYSIGLDIGTNSVGWAVITDEYKVPSKKFKVLGNTDRHSIKKNLIGALLFDSGETAEATRLKRTARRRYTRRKNRICYLQEIFSNEMAKVDDSFFHRLEESFLVEEDKKHERHPIFGNIVDEVAYHEKYPTIYHLRKKLVDSTDKADLRLIYLALAHMIKFRGHFLIEGDLNPDNSDVDKLFIQLVQTYNQLFEENPINASGVDAKAILSARLSKSRRLENLIAQLPGEKKNGLFGNLIALSLGLTPNFKSNFDLAEDAKLQLSKDTYDDDLDNLLAQIGDQYADLFLAAKNLSDAILLSDILRVNTEITKAPLSASMIKRYDEHHQDLTLLKALVRQQLPEKYKEIFFDQSKNGYAGYIDGGASQEEFYKFIKPILEKMDGTEELLVKLNREDLLRKQRTFDNGSIPHQIHLGELHAILRRQEDFYPFLKDNREKIEKILTFRIPYYVGPLARGNSRFAWMTRKSEETITPWNFEEVVDKGASAQSFIERMTNFDKNLPNEKVLPKHSLLYEYFTVYNELTKVKYVTEGMRKPAFLSGEQKKAIVDLLFKTNRKVTVKQLKEDYFKKIECFDSVEISGVEDRFNASLGTYHDLLKIIKDKDFLDNEENEDILEDIVLTLTLFEDREMIEERLKTYAHLFDDKVMKQLKRRRYTGWGRLSRKLINGIRDKQSGKTILDFLKSDGFANRNFMQLIHDDSLTFKEDIQKAQVSGQGDSLHEHIANLAGSPAIKKGILQTVKVVDELVKVMGRHKPENIVIEMARENQTTQKGQKNSRERMKRIEEGIKELGSQILKEHPVENTQLQNEKLYLYYLQNGRDMYVDQELDINRLSDYDVDHIVPQSFLKDDSIDNKVLTRSDKARGKSDNVPSEEVVKKMKNYWRQLLNAKLITQRKFDNLTKAERGGLSELDKAGFIKRQLVETRQITKHVAQILDSRMNTKYDENDKLIREVKVITLKSKLVSDFRKDFQFYKVREINNYHHAHDAYLNAVVGTALIKKYPKLESEFVYGDYKVYDVRKMIAKSEQEIGKATAKYFFYSNIMNFFKTEITLANGEIRKRPLIETNGETGEIVWDKGRDFATVRKVLSMPQVNIVKKTEVQTGGFSKESILPKRNSDKLIARKKDWDPKKYGGFDSPTVAYSVLVVAKVEKGKSKKLKSVKELLGITIMERSSFEKNPIDFLEAKGYKEVKKDLIIKLPKYSLFELENGRKRMLASAGELQKGNELALPSKYVNFLYLASHYEKLKGSPEDNEQKQLFVEQHKHYLDEIIEQISEFSKRVILADANLDKVLSAYNKHRDKPIREQAENIIHLFTLTNLGAPAAFKYFDTTIDRKRYTSTKEVLDATLIHQSITGLYETRIDLSQLGGDGGGSSGSSGSSGSSGSSGSSGGGRDIMKDIKVRLMTDSPDDSQDLMIGAIESNLFADQISWKSDQPVWLNQWPLKQEKLQALQQLVTEQLQLGHLEESNSPWNTPVFVIKKKSGKWRLLQDLRAVNATMHDMGALQPGLPSPVAVPKGWEIIIIDLQDCFFNIKLHPEDCKRFAFSVPSPNFKRPYQRFQWKVLPQGMKNSPTLCQKFVDKAILTVRDKYQDSYIVHYMDDILLAHPSRSIVDEILTSMIQALNKHGLVVSTEKIQKYDNLKYLGTHIQGDSVSYQKLQIRTDKLRTLNDFQKLLGNINWIRPFLKLTTGELKPLFEILNGDSNPISTRKLTPEACKALQLMNERLSTARVKRLDLSQPWSLCILKTEYTPTACLWQDGVVEWIHLPHISPKVITPYDIFCTQLIIKGRHRSKELFSKDPDYIVVPYTKVQFDLLLQEKEDWPISLLGFLGEVHFHLPKDPLLTFTLQTAIIFPHMTSTTPLEKGIVIFTDGSANGRSVTYIQGREPIIKENTQNTAQQAEIVAVITAFEEVSQPFNLYTDSKYVTGLFPEIETATLSPRTKIYTELKHLQRLIHKRQEKFYIGHIRGHTGLPGPLAQGNAYADSLTRILTAGKRTADGSEFEKRTADGSEFESPKKKAKVE

SEQ ID NO: 3298 - protein, 2028 aa, synthetic construct
MPAAKRVKLDGGDKKYSIGLDIGTNSVGWAVITDEYKVPSKKFKVLGNTDRHSIKKNLIGALLFDSGETAEATRLKRTARRRYTRRKNRICYLQEIFSNEMAKVDDSFFHRLEESFLVEEDKKHERHPIFGNIVDEVAYHEKYPTIYHLRKKLVDSTDKADLRLIYLALAHMIKFRGHFLIEGDLNPDNSDVDKLFIQLVQTYNQLFEENPINASGVDAKAILSARLSKSRRLENLIAQLPGEKKNGLFGNLIALSLGLTPNFKSNFDLAEDAKLQLSKDTYDDDLDNLLAQIGDQYADLFLAAKNLSDAILLSDILRVNTEITKAPLSASMIKRYDEHHQDLTLLKALVRQQLPEKYKEIFFDQSKNGYAGYIDGGASQEEFYKFIKPILEKMDGTEELLVKLNREDLLRKQRTFDNGSIPHQIHLGELHAILRRQEDFYPFLKDNREKIEKILTFRIPYYVGPLARGNSRFAWMTRKSEETITPWNFEEVVDKGASAQSFIERMTNFDKNLPNEKVLPKHSLLYEYFTVYNELTKVKYVTEGMRKPAFLSGEQKKAIVDLLFKTNRKVTVKQLKEDYFKKIECFDSVEISGVEDRFNASLGTYHDLLKIIKDKDFLDNEENEDILEDIVLTLTLFEDREMIEERLKTYAHLFDDKVMKQLKRRRYTGWGRLSRKLINGIRDKQSGKTILDFLKSDGFANRNFMQLIHDDSLTFKEDIQKAQVSGQGDSLHEHIANLAGSPAIKKGILQTVKVVDELVKVMGRHKPENIVIEMARENQTTQKGQKNSRERMKRIEEGIKELGSQILKEHPVENTQLQNEKLYLYYLQNGRDMYVDQELDINRLSDYDVDHIVPQSFLKDDSIDNKVLTRSDKARGKSDNVPSEEVVKKMKNYWRQLLNAKLITQRKFDNLTKAERGGLSELDKAGFIKRQLVETRQITKHVAQILDSRMNTKYDENDKLIREVKVITLKSKLVSDFRKDFQFYKVREINNYHHAHDAYLNAVVGTALIKKYPKLESEFVYGDYKVYDVRKMIAKSEQEIGKATAKYFFYSNIMNFFKTEITLANGEIRKRPLIETNGETGEIVWDKGRDFATVRKVLSMPQVNIVKKTEVQTGGFSKESILPKRNSDKLIARKKDWDPKKYGGFDSPTVAYSVLVVAKVEKGKSKKLKSVKELLGITIMERSSFEKNPIDFLEAKGYKEVKKDLIIKLPKYSLFELENGRKRMLASAGELQKGNELALPSKYVNFLYLASHYEKLKGSPEDNEQKQLFVEQHKHYLDEIIEQISEFSKRVILADANLDKVLSAYNKHRDKPIREQAENIIHLFTLTNLGAPAAFKYFDTTIDRKRYTSTKEVLDATLIHQSITGLYETRIDLSQLGGDGGGGGGSEAAAKGGGGSGGGRDIMKDIKVRLMTDSPDDSQDLMIGAIESNLFADQISWKSDQPVWLNQWPLKQEKLQALQQLVTEQLQLGHLEESNSPWNTPVFVIKKKSGKWRLLQDLRAVNATMHDMGALQPGLPSPVAVPKGWEIIIIDLQDCFFNIKLHPEDCKRFAFSVPSPNFKRPYQRFQWKVLPQGMKNSPTLCQKFVDKAILTVRDKYQDSYIVHYMDDILLAHPSRSIVDEILTSMIQALNKHGLVVSTEKIQKYDNLKYLGTHIQGDSVSYQKLQIRTDKLRTLNDFQKLLGNINWIRPFLKLTTGELKPLFEILNGDSNPISTRKLTPEACKALQLMNERLSTARVKRLDLSQPWSLCILKTEYTPTACLWQDGVVEWIHLPHISPKVITPYDIFCTQLIIKGRHRSKELFSKDPDYIVVPYTKVQFDLLLQEKEDWPISLLGFLGEVHFHLPKDPLLTFTLQTAIIFPHMTSTTPLEKGIVIFTDGSANGRSVTYIQGREPIIKENTQNTAQQAEIVAVITAFEEVSQPFNLYTDSKYVTGLFPEIETATLSPRTKIYTELKHLQRLIHKRQEKFYIGHIRGHTGLPGPLAQGNAYADSLTRILTAGKRTADGSEFEKRTADGSEFESPKKKAKVE

SEQ ID NO: 3299 - protein, 2028 aa, synthetic construct
MPAAKRVKLDGGDKKYSIGLDIGTNSVGWAVITDEYKVPSKKFKVLGNTDRHSIKKNLIGALLFDSGETAEATRLKRTARRRYTRRKNRICYLQEIFSNEMAKVDDSFFHRLEESFLVEEDKKHERHPIFGNIVDEVAYHEKYPTIYHLRKKLVDSTDKADLRLIYLALAHMIKFRGHFLIEGDLNPDNSDVDKLFIQLVQTYNQLFEENPINASGVDAKAILSARLSKSRRLENLIAQLPGEKKNGLFGNLIALSLGLTPNFKSNFDLAEDAKLQLSKDTYDDDLDNLLAQIGDQYADLFLAAKNLSDAILLSDILRVNTEITKAPLSASMIKRYDEHHQDLTLLKALVRQQLPEKYKEIFFDQSKNGYAGYIDGGASQEEFYKFIKPILEKMDGTEELLVKLNREDLLRKQRTFDNGSIPHQIHLGELHAILRRQEDFYPFLKDNREKIEKILTFRIPYYVGPLARGNSRFAWMTRKSEETITPWNFEEVVDKGASAQSFIERMTNFDKNLPNEKVLPKHSLLYEYFTVYNELTKVKYVTEGMRKPAFLSGEQKKAIVDLLFKTNRKVTVKQLKEDYFKKIECFDSVEISGVEDRFNASLGTYHDLLKIIKDKDFLDNEENEDILEDIVLTLTLFEDREMIEERLKTYAHLFDDKVMKQLKRRRYTGWGRLSRKLINGIRDKQSGKTILDFLKSDGFANRNFMQLIHDDSLTFKEDIQKAQVSGQGDSLHEHIANLAGSPAIKKGILQTVKVVDELVKVMGRHKPENIVIEMARENQTTQKGQKNSRERMKRIEEGIKELGSQILKEHPVENTQLQNEKLYLYYLQNGRDMYVDQELDINRLSDYDVDHIVPQSFLKDDSIDNKVLTRSDKARGKSDNVPSEEVVKKMKNYWRQLLNAKLITQRKFDNLTKAERGGLSELDKAGFIKRQLVETRQITKHVAQILDSRMNTKYDENDKLIREVKVITLKSKLVSDFRKDFQFYKVREINNYHHAHDAYLNAVVGTALIKKYPKLESEFVYGDYKVYDVRKMIAKSEQEIGKATAKYFFYSNIMNFFKTEITLANGEIRKRPLIETNGETGEIVWDKGRDFATVRKVLSMPQVNIVKKTEVQTGGFSKESILPKRNSDKLIARKKDWDPKKYGGFDSPTVAYSVLVVAKVEKGKSKKLKSVKELLGITIMERSSFEKNPIDFLEAKGYKEVKKDLIIKLPKYSLFELENGRKRMLASAGELQKGNELALPSKYVNFLYLASHYEKLKGSPEDNEQKQLFVEQHKHYLDEIIEQISEFSKRVILADANLDKVLSAYNKHRDKPIREQAENIIHLFTLTNLGAPAAFKYFDTTIDRKRYTSTKEVLDATLIHQSITGLYETRIDLSQLGGDGGEAAAKEAAAKEAAAKGGGRDIMKDIKVRLMTDSPDDSQDLMIGAIESNLFADQISWKSDQPVWLNQWPLKQEKLQALQQLVTEQLQLGHLEESNSPWNTPVFVIKKKSGKWRLLQDLRAVNATMHDMGALQPGLPSPVAVPKGWEIIIIDLQDCFFNIKLHPEDCKRFAFSVPSPNFKRPYQRFQWKVLPQGMKNSPTLCQKFVDKAILTVRDKYQDSYIVHYMDDILLAHPSRSIVDEILTSMIQALNKHGLVVSTEKIQKYDNLKYLGTHIQGDSVSYQKLQIRTDKLRTLNDFQKLLGNINWIRPFLKLTTGELKPLFEILNGDSNPISTRKLTPEACKALQLMNERLSTARVKRLDLSQPWSLCILKTEYTPTACLWQDGVVEWIHLPHISPKVITPYDIFCTQLIIKGRHRSKELFSKDPDYIVVPYTKVQFDLLLQEKEDWPISLLGFLGEVHFHLPKDPLLTFTLQTAIIFPHMTSTTPLEKGIVIFTDGSANGRSVTYIQGREPIIKENTQNTAQQAEIVAVITAFEEVSQPFNLYTDSKYVTGLFPEIETATLSPRTKIYTELKHLQRLIHKRQEKFYIGHIRGHTGLPGPLAQGNAYADSLTRILTAGKRTADGSEFEKRTADGSEFESPKKKAKVE

SEQ ID NO: 3300 - protein, 2024 aa, synthetic construct; identical to SEQ ID NO: 3213

SEQ ID NO: 3301 - protein, 2024 aa, synthetic construct
MPAAKRVKLDGGDKKYSIGLDIGTNSVGWAVITDEYKVPSKKFKVLGNTDRHSIKKNLIGALLFDSGETAEATRLKRTARRRYTRRKNRICYLQEIFSNEMAKVDDSFFHRLEESFLVEEDKKHERHPIFGNIVDEVAYHEKYPTIYHLRKKLVDSTDKADLRLIYLALAHMIKFRGHFLIEGDLNPDNSDVDKLFIQLVQTYNQLFEENPINASGVDAKAILSARLSKSRRLENLIAQLPGEKKNGLFGNLIALSLGLTPNFKSNFDLAEDAKLQLSKDTYDDDLDNLLAQIGDQYADLFLAAKNLSDAILLSDILRVNTEITKAPLSASMIKRYDEHHQDLTLLKALVRQQLPEKYKEIFFDQSKNGYAGYIDGGASQEEFYKFIKPILEKMDGTEELLVKLNREDLLRKQRTFDNGSIPHQIHLGELHAILRRQEDFYPFLKDNREKIEKILTFRIPYYVGPLARGNSRFAWMTRKSEETITPWNFEEVVDKGASAQSFIERMTNFDKNLPNEKVLPKHSLLYEYFTVYNELTKVKYVTEGMRKPAFLSGEQKKAIVDLLFKTNRKVTVKQLKEDYFKKIECFDSVEISGVEDRFNASLGTYHDLLKIIKDKDFLDNEENEDILEDIVLTLTLFEDREMIEERLKTYAHLFDDKVMKQLKRRRYTGWGRLSRKLINGIRDKQSGKTILDFLKSDGFANRNFMQLIHDDSLTFKEDIQKAQVSGQGDSLHEHIANLAGSPAIKKGILQTVKVVDELVKVMGRHKPENIVIEMARENQTTQKGQKNSRERMKRIEEGIKELGSQILKEHPVENTQLQNEKLYLYYLQNGRDMYVDQELDINRLSDYDVDHIVPQSFLKDDSIDNKVLTRSDKARGKSDNVPSEEVVKKMKNYWRQLLNAKLITQRKFDNLTKAERGGLSELDKAGFIKRQLVETRQITKHVAQILDSRMNTKYDENDKLIREVKVITLKSKLVSDFRKDFQFYKVREINNYHHAHDAYLNAVVGTALIKKYPKLESEFVYGDYKVYDVRKMIAKSEQEIGKATAKYFFYSNIMNFFKTEITLANGEIRKRPLIETNGETGEIVWDKGRDFATVRKVLSMPQVNIVKKTEVQTGGFSKESILPKRNSDKLIARKKDWDPKKYGGFDSPTVAYSVLVVAKVEKGKSKKLKSVKELLGITIMERSSFEKNPIDFLEAKGYKEVKKDLIIKLPKYSLFELENGRKRMLASAGELQKGNELALPSKYVNFLYLASHYEKLKGSPEDNEQKQLFVEQHKHYLDEIIEQISEFSKRVILADANLDKVLSAYNKHRDKPIREQAENIIHLFTLTNLGAPAAFKYFDTTIDRKRYTSTKEVLDATLIHQSITGLYETRIDLSQLGGDGGEAAAKGSSGGSGGGRDIMKDIKVRLMTDSPDDSQDLMIGAIESNLFADQISWKSDQPVWLNQWPLKQEKLQALQQLVTEQLQLGHLEESNSPWNTPVFVIKKKSGKWRLLQDLRAVNATMHDMGALQPGLPSPVAVPKGWEIIIIDLQDCFFNIKLHPEDCKRFAFSVPSPNFKRPYQRFQWKVLPQGMKNSPTLCQKFVDKAILTVRDKYQDSYIVHYMDDILLAHPSRSIVDEILTSMIQALNKHGLVVSTEKIQKYDNLKYLGTHIQGDSVSYQKLQIRTDKLRTLNDFQKLLGNINWIRPFLKLTTGELKPLFEILNGDSNPISTRKLTPEACKALQLMNERLSTARVKRLDLSQPWSLCILKTEYTPTACLWQDGVVEWIHLPHISPKVITPYDIFCTQLIIKGRHRSKELFSKDPDYIVVPYTKVQFDLLLQEKEDWPISLLGFLGEVHFHLPKDPLLTFTLQTAIIFPHMTSTTPLEKGIVIFTDGSANGRSVTYIQGREPIIKENTQNTAQQAEIVAVITAFEEVSQPFNLYTDSKYVTGLFPEIETATLSPRTKIYTELKHLQRLIHKRQEKFYIGHIRGHTGLPGPLAQGNAYADSLTRILTAGKRTADGSEFEKRTADGSEFESPKKKAKVE

SEQ ID NO: 3302 - protein, 2028 aa, synthetic construct
MPAAKRVKLDGGDKKYSIGLDIGTNSVGWAVITDEYKVPSKKFKVLGNTDRHSIKKNLIGALLFDSGETAEATRLKRTARRRYTRRKNRICYLQEIFSNEMAKVDDSFFHRLEESFLVEEDKKHERHPIFGNIVDEVAYHEKYPTIYHLRKKLVDSTDKADLRLIYLALAHMIKFRGHFLIEGDLNPDNSDVDKLFIQLVQTYNQLFEENPINASGVDAKAILSARLSKSRRLENLIAQLPGEKKNGLFGNLIALSLGLTPNFKSNFDLAEDAKLQLSKDTYDDDLDNLLAQIGDQYADLFLAAKNLSDAILLSDILRVNTEITKAPLSASMIKRYDEHHQDLTLLKALVRQQLPEKYKEIFFDQSKNGYAGYIDGGASQEEFYKFIKPILEKMDGTEELLVKLNREDLLRKQRTFDNGSIPHQIHLGELHAILRRQEDFYPFLKDNREKIEKILTFRIPYYVGPLARGNSRFAWMTRKSEETITPWNFEEVVDKGASAQSFIERMTNFDKNLPNEKVLPKHSLLYEYFTVYNELTKVKYVTEGMRKPAFLSGEQKKAIVDLLFKTNRKVTVKQLKEDYFKKIECFDSVEISGVEDRFNASLGTYHDLLKIIKDKDFLDNEENEDILEDIVLTLTLFEDREMIEERLKTYAHLFDDKVMKQLKRRRYTGWGRLSRKLINGIRDKQSGKTILDFLKSDGFANRNFMQLIHDDSLTFKEDIQKAQVSGQGDSLHEHIANLAGSPAIKKGILQTVKVVDELVKVMGRHKPENIVIEMARENQTTQKGQKNSRERMKRIEEGIKELGSQILKEHPVENTQLQNEKLYLYYLQNGRDMYVDQELDINRLSDYDVDHIVPQSFLKDDSIDNKVLTRSDKARGKSDNVPSEEVVKKMKNYWRQLLNAKLITQRKFDNLTKAERGGLSELDKAGFIKRQLVETRQITKHVAQILDSRMNTKYDENDKLIREVKVITLKSKLVSDFRKDFQFYKVREINNYHHAHDAYLNAVVGTALIKKYPKLESEFVYGDYKVYDVRKMIAKSEQEIGKATAKYFFYSNIMNFFKTEITLANGEIRKRPLIETNGETGEIVWDKGRDFATVRKVLSMPQVNIVKKTEVQTGGFSKESILPKRNSDKLIARKKDWDPKKYGGFDSPTVAYSVLVVAKVEKGKSKKLKSVKELLGITIMERSSFEKNPIDFLEAKGYKEVKKDLIIKLPKYSLFELENGRKRMLASAGELQKGNELALPSKYVNFLYLASHYEKLKGSPEDNEQKQLFVEQHKHYLDEIIEQISEFSKRVILADANLDKVLSAYNKHRDKPIREQAENIIHLFTLTNLGAPAAFKYFDTTIDRKRYTSTKEVLDATLIHQSITGLYETRIDLSQLGGDGGGGSGGSGGSGGSGGSGGGRDIMKDIKVRLMTDSPDDSQDLMIGAIESNLFADQISWKSDQPVWLNQWPLKQEKLQALQQLVTEQLQLGHLEESNSPWNTPVFVIKKKSGKWRLLQDLRAVNATMHDMGALQPGLPSPVAVPKGWEIIIIDLQDCFFNIKLHPEDCKRFAFSVPSPNFKRPYQRFQWKVLPQGMKNSPTLCQKFVDKAILTVRDKYQDSYIVHYMDDILLAHPSRSIVDEILTSMIQALNKHGLVVSTEKIQKYDNLKYLGTHIQGDSVSYQKLQIRTDKLRTLNDFQKLLGNINWIRPFLKLTTGELKPLFEILNGDSNPISTRKLTPEACKALQLMNERLSTARVKRLDLSQPWSLCILKTEYTPTACLWQDGVVEWIHLPHISPKVITPYDIFCTQLIIKGRHRSKELFSKDPDYIVVPYTKVQFDLLLQEKEDWPISLLGFLGEVHFHLPKDPLLTFTLQTAIIFPHMTSTTPLEKGIVIFTDGSANGRSVTYIQGREPIIKENTQNTAQQAEIVAVITAFEEVSQPFNLYTDSKYVTGLFPEIETATLSPRTKIYTELKHLQRLIHKRQEKFYIGHIRGHTGLPGPLAQGNAYADSLTRILTAGKRTADGSEFEKRTADGSEFESPKKKAKVE

SEQ ID NO: 3303 - protein, 2028 aa, synthetic construct
MPAAKRVKLDGGDKKYSIGLDIGTNSVGWAVITDEYKVPSKKFKVLGNTDRHSIKKNLIGALLFDSGETAEATRLKRTARRRYTRRKNRICYLQEIFSNEMAKVDDSFFHRLEESFLVEEDKKHERHPIFGNIVDEVAYHEKYPTIYHLRKKLVDSTDKADLRLIYLALAHMIKFRGHFLIEGDLNPDNSDVDKLFIQLVQTYNQLFEENPINASGVDAKAILSARLSKSRRLENLIAQLPGEKKNGLFGNLIALSLGLTPNFKSNFDLAEDAKLQLSKDTYDDDLDNLLAQIGDQYADLFLAAKNLSDAILLSDILRVNTEITKAPLSASMIKRYDEHHQDLTLLKALVRQQLPEKYKEIFFDQSKNGYAGYIDGGASQEEFYKFIKPILEKMDGTEELLVKLNREDLLRKQRTFDNGSIPHQIHLGELHAILRRQEDFYPFLKDNREKIEKILTFRIPYYVGPLARGNSRFAWMTRKSEETITPWNFEEVVDKGASAQSFIERMTNFDKNLPNEKVLPKHSLLYEYFTVYNELTKVKYVTEGMRKPAFLSGEQKKAIVDLLFKTNRKVTVKQLKEDYFKKIECFDSVEISGVEDRFNASLGTYHDLLKIIKDKDFLDNEENEDILEDIVLTLTLFEDREMIEERLKTYAHLFDDKVMKQLKRRRYTGWGRLSRKLINGIRDKQSGKTILDFLKSDGFANRNFMQLIHDDSLTFKEDIQKAQVSGQGDSLHEHIANLAGSPAIKKGILQTVKVVDELVKVMGRHKPENIVIEMARENQTTQKGQKNSRERMKRIEEGIKELGSQILKEHPVENTQLQNEKLYLYYLQNGRDMYVDQELDINRLSDYDVDHIVPQSFLKDDSIDNKVLTRSDKARGKSDNVPSEEVVKKMKNYWRQLLNAKLITQRKFDNLTKAERGGLSELDKAGFIKRQLVETRQITKHVAQILDSRMNTKYDENDKLIREVKVITLKSKLVSDFRKDFQFYKVREINNYHHAHDAYLNAVVGTALIKKYPKLESEFVYGDYKVYDVRKMIAKSEQEIGKATAKYFFYSNIMNFFKTEITLANGEIRKRPLIETNGETGEIVWDKGRDFATVRKVLSMPQVNIVKKTEVQTGGFSKESILPKRNSDKLIARKKDWDPKKYGGFDSPTVAYSVLVVAKVEKGKSKKLKSVKELLGITIMERSSFEKNPIDFLEAKGYKEVKKDLIIKLPKYSLFELENGRKRMLASAGELQKGNELALPSKYVNFLYLASHYEKLKGSPEDNEQKQLFVEQHKHYLDEIIEQISEFSKRVILADANLDKVLSAYNKHRDKPIREQAENIIHLFTLTNLGAPAAFKYFDTTIDRKRYTSTKEVLDATLIHQSITGLYETRIDLSQLGGDGGGSSGSSGSSGSSGSSGGGRDIMKDIKVRLMTDSPDDSQDLMIGAIESNLFADQISWKSDQPVWLNQWPLKQEKLQALQQLVTEQLQLGHLEESNSPWNTPVFVIKKKSGKWRLLQDLRAVNATMHDMGALQPGLPSPVAVPKGWEIIIIDLQDCFFNIKLHPEDCKRFAFSVPSPNFKRPYQRFQWKVLPQGMKNSPTLCQKFVDKAILTVRDKYQDSYIVHYMDDILLAHPSRSIVDEILTSMIQALNKHGLVVSTEKIQKYDNLKYLGTHIQGDSVSYQKLQIRTDKLRTLNDFQKLLGNINWIRPFLKLTTGELKPLFEILNGDSNPISTRKLTPEACKALQLMNERLSTARVKRLDLSQPWSLCILKTEYTPTACLWQDGVVEWIHLPHISPKVITPYDIFCTQLIIKGRHRSKELFSKDPDYIVVPYTKVQFDLLLQEKEDWPISLLGFLGEVHFHLPKDPLLTFTLQTAIIFPHMTSTTPLEKGIVIFTDGSANGRSVTYIQGREPIIKENTQNTAQQAEIVAVITAFEEVSQPFNLYTDSKYVTGLFPEIETATLSPRTKIYTELKHLQRLIHKRQEKFYIGHIRGHTGLPGPLAQGNAYADSLTRILTAGKRTADGSEFEKRTADGSEFESPKKKAKVE

SEQ ID NO: 3304 - protein, 2022 aa, synthetic construct; identical to SEQ ID NO: 3221

SEQ ID NO: 3305 - protein, 2022 aa, synthetic construct
MPAAKRVKLDGGDKKYSIGLDIGTNSVGWAVITDEYKVPSKKFKVLGNTDRHSIKKNLIGALLFDSGETAEATRLKRTARRRYTRRKNRICYLQEIFSNEMAKVDDSFFHRLEESFLVEEDKKHERHPIFGNIVDEVAYHEKYPTIYHLRKKLVDSTDKADLRLIYLALAHMIKFRGHFLIEGDLNPDNSDVDKLFIQLVQTYNQLFEENPINASGVDAKAILSARLSKSRRLENLIAQLPGEKKNGLFGNLIALSLGLTPNFKSNFDLAEDAKLQLSKDTYDDDLDNLLAQIGDQYADLFLAAKNLSDAILLSDILRVNTEITKAPLSASMIKRYDEHHQDLTLLKALVRQQLPEKYKEIFFDQSKNGYAGYIDGGASQEEFYKFIKPILEKMDGTEELLVKLNREDLLRKQRTFDNGSIPHQIHLGELHAILRRQEDFYPFLKDNREKIEKILTFRIPYYVGPLARGNSRFAWMTRKSEETITPWNFEEVVDKGASAQSFIERMTNFDKNLPNEKVLPKHSLLYEYFTVYNELTKVKYVTEGMRKPAFLSGEQKKAIVDLLFKTNRKVTVKQLKEDYFKKIECFDSVEISGVEDRFNASLGTYHDLLKIIKDKDFLDNEENEDILEDIVLTLTLFEDREMIEERLKTYAHLFDDKVMKQLKRRRYTGWGRLSRKLINGIRDKQSGKTILDFLKSDGFANRNFMQLIHDDSLTFKEDIQKAQVSGQGDSLHEHIANLAGSPAIKKGILQTVKVVDELVKVMGRHKPENIVIEMARENQTTQKGQKNSRERMKRIEEGIKELGSQILKEHPVENTQLQNEKLYLYYLQNGRDMYVDQELDINRLSDYDVDHIVPQSFLKDDSIDNKVLTRSDKARGKSDNVPSEEVVKKMKNYWRQLLNAKLITQRKFDNLTKAERGGLSELDKAGFIKRQLVETRQITKHVAQILDSRMNTKYDENDKLIREVKVITLKSKLVSDFRKDFQFYKVREINNYHHAHDAYLNAVVGTALIKKYPKLESEFVYGDYKVYDVRKMIAKSEQEIGKATAKYFFYSNIMNFFKTEITLANGEIRKRPLIETNGETGEIVWDKGRDFATVRKVLSMPQVNIVKKTEVQTGGFSKESILPKRNSDKLIARKKDWDPKKYGGFDSPTVAYSVLVVAKVEKGKSKKLKSVKELLGITIMERSSFEKNPIDFLEAKGYKEVKKDLIIKLPKYSLFELENGRKRMLASAGELQKGNELALPSKYVNFLYLASHYEKLKGSPEDNEQKQLFVEQHKHYLDEIIEQISEFSKRVILADANLDKVLSAYNKHRDKPIREQAENIIHLFTLTNLGAPAAFKYFDTTIDRKRYTSTKEVLDATLIHQSITGLYETRIDLSQLGGDGGGSSGGSPAPGGGRDIMKDIKVRLMTDSPDDSQDLMIGAIESNLFADQISWKSDQPVWLNQWPLKQEKLQALQQLVTEQLQLGHLEESNSPWNTPVFVIKKKSGKWRLLQDLRAVNATMHDMGALQPGLPSPVAVPKGWEIIIIDLQDCFFNIKLHPEDCKRFAFSVPSPNFKRPYQRFQWKVLPQGMKNSPTLCQKFVDKAILTVRDKYQDSYIVHYMDDILLAHPSRSIVDEILTSMIQALNKHGLVVSTEKIQKYDNLKYLGTHIQGDSVSYQKLQIRTDKLRTLNDFQKLLGNINWIRPFLKLTTGELKPLFEILNGDSNPISTRKLTPEACKALQLMNERLSTARVKRLDLSQPWSLCILKTEYTPTACLWQDGVVEWIHLPHISPKVITPYDIFCTQLIIKGRHRSKELFSKDPDYIVVPYTKVQFDLLLQEKEDWPISLLGFLGEVHFHLPKDPLLTFTLQTAIIFPHMTSTTPLEKGIVIFTDGSANGRSVTYIQGREPIIKENTQNTAQQAEIVAVITAFEEVSQPFNLYTDSKYVTGLFPEIETATLSPRTKIYTELKHLQRLIHKRQEKFYIGHIRGHTGLPGPLAQGNAYADSLTRILTAGKRTADGSEFEKRTADGSEFESPKKKAKVE

SEQ ID NO: 3306 - protein, 2024 aa, synthetic construct
MPAAKRVKLDGGDKKYSIGLDIGTNSVGWAVITDEYKVPSKKFKVLGNTDRHSIKKNLIGALLFDSGETAEATRLKRTARRRYTRRKNRICYLQEIFSNEMAKVDDSFFHRLEESFLVEEDKKHERHPIFGNIVDEVAYHEKYPTIYHLRKKLVDSTDKADLRLIYLALAHMIKFRGHFLIEGDLNPDNSDVDKLFIQLVQTYNQLFEENPINASGVDAKAILSARLSKSRRLENLIAQLPGEKKNGLFGNLIALSLGLTPNFKSNFDLAEDAKLQLSKDTYDDDLDNLLAQIGDQYADLFLAAKNLSDAILLSDILRVNTEITKAPLSASMIKRYDEHHQDLTLLKALVRQQLPEKYKEIFFDQSKNGYAGYIDGGASQEEFYKFIKPILEKMDGTEELLVKLNREDLLRKQRTFDNGSIPHQIHLGELHAILRRQEDFYPFLKDNREKIEKILTFRIPYYVGPLARGNSRFAWMTRKSEETITPWNFEEVVDKGASAQSFIERMTNFDKNLPNEKVLPKHSLLYEYFTVYNELTKVKYVTEGMRKPAFLSGEQKKAIVDLLFKTNRKVTVKQLKEDYFKKIECFDSVEISGVEDRFNASLGTYHDLLKIIKDKDFLDNEENEDILEDIVLTLTLFEDREMIEERLKTYAHLFDDKVMKQLKRRRYTGWGRLSRKLINGIRDKQSGKTILDFLKSDGFANRNFMQLIHDDSLTFKEDIQKAQVSGQGDSLHEHIANLAGSPAIKKGILQTVKVVDELVKVMGRHKPENIVIEMARENQTTQKGQKNSRERMKRIEEGIKELGSQILKEHPVENTQLQNEKLYLYYLQNGRDMYVDQELDINRLSDYDVDHIVPQSFLKDDSIDNKVLTRSDKARGKSDNVPSEEVVKKMKNYWRQLLNAKLITQRKFDNLTKAERGGLSELDKAGFIKRQLVETRQITKHVAQILDSRMNTKYDENDKLIREVKVITLKSKLVSDFRKDFQFYKVREINNYHHAHDAYLNAVVGTALIKKYPKLESEFVYGDYKVYDVRKMIAKSEQEIGKATAKYFFYSNIMNFFKTEITLANGEIRKRPLIETNGETGEIVWDKGRDFATVRKVLSMPQVNIVKKTEVQTGGFSKESILPKRNSDKLIARKKDWDPKKYGGFDSPTVAYSVLVVAKVEKGKSKKLKSVKELLGITIMERSSFEKNPIDFLEAKGYKEVKKDLIIKLPKYSLFELENGRKRMLASAGELQKGNELALPSKYVNFLYLASHYEKLKGSPEDNEQKQLFVEQHKHYLDEIIEQISEFSKRVILADANLDKVLSAYNKHRDKPIREQAENIIHLFTLTNLGAPAAFKYFDTTIDRKRYTSTKEVLDATLIHQSITGLYETRIDLSQLGGDGGEAAAKGGGGSSGGGRDIMKDIKVRLMTDSPDDSQDLMIGAIESNLFADQISWKSDQPVWLNQWPLKQEKLQALQQLVTEQLQLGHLEESNSPWNTPVFVIKKKSGKWRLLQDLRAVNATMHDMGALQPGLPSPVAVPKGWEIIIIDLQDCFFNIKLHPEDCKRFAFSVPSPNFKRPYQRFQWKVLPQGMKNSPTLCQKFVDKAILTVRDKYQDSYIVHYMDDILLAHPSRSIVDEILTSMIQALNKHGLVVSTEKIQKYDNLKYLGTHIQGDSVSYQKLQIRTDKLRTLNDFQKLLGNINWIRPFLKLTTGELKPLFEILNGDSNPISTRKLTPEACKALQLMNERLSTARVKRLDLSQPWSLCILKTEYTPTACLWQDGVVEWIHLPHISPKVITPYDIFCTQLIIKGRHRSKELFSKDPDYIVVPYTKVQFDLLLQEKEDWPISLLGFLGEVHFHLPKDPLLTFTLQTAIIFPHMTSTTPLEKGIVIFTDGSANGRSVTYIQGREPIIKENTQNTAQQAEIVAVITAFEEVSQPFNLYTDSKYVTGLFPEIETATLSPRTKIYTELKHLQRLIHKRQEKFYIGHIRGHTGLPGPLAQGNAYADSLTRILTAGKRTADGSEFEKRTADGSEFESPKKKAKVE

SEQ ID NO: 3307 - protein, 2021 aa, synthetic construct
MPAAKRVKLDGGDKKYSIGLDIGTNSVGWAVITDEYKVPSKKFKVLGNTDRHSIKKNLIGALLFDSGETAEATRLKRTARRRYTRRKNRICYLQEIFSNEMAKVDDSFFHRLEESFLVEEDKKHERHPIFGNIVDEVAYHEKYPTIYHLRKKLVDSTDKADLRLIYLALAHMIKFRGHFLIEGDLNPDNSDVDKLFIQLVQTYNQLFEENPINASGVDAKAILSARLSKSRRLENLIAQLPGEKKNGLFGNLIALSLGLTPNFKSNFDLAEDAKLQLSKDTYDDDLDNLLAQIGDQYADLFLAAKNLSDAILLSDILRVNTEITKAPLSASMIKRYDEHHQDLTLLKALVRQQLPEKYKEIFFDQSKNGYAGYIDGGASQEEFYKFIKPILEKMDGTEELLVKLNREDLLRKQRTFDNGSIPHQIHLGELHAILRRQEDFYPFLKDNREKIEKILTFRIPYYVGPLARGNSRFAWMTRKSEETITPWNFEEVVDKGASAQSFIERMTNFDKNLPNEKVLPKHSLLYEYFTVYNELTKVKYVTEGMRKPAFLSGEQKKAIVDLLFKTNRKVTVKQLKEDYFKKIECFDSVEISGVEDRFNASLGTYHDLLKIIKDKDFLDNEENEDILEDIVLTLTLFEDREMIEERLKTYAHLFDDKVMKQLKRRRYTGWGRLSRKLINGIRDKQSGKTILDFLKSDGFANRNFMQLIHDDSLTFKEDIQKAQVSGQGDSLHEHIANLAGSPAIKKGILQTVKVVDELVKVMGRHKPENIVIEMARENQTTQKGQKNSRERMKRIEEGIKELGSQILKEHPVENTQLQNEKLYLYYLQNGRDMYVDQELDINRLSDYDVDHIVPQSFLKDDSIDNKVLTRSDKARGKSDNVPSEEVVKKMKNYWRQLLNAKLITQRKFDNLTKAERGGLSELDKAGFIKRQLVETRQITKHVAQILDSRMNTKYDENDKLIREVKVITLKSKLVSDFRKDFQFYKVREINNYHHAHDAYLNAVVGTALIKKYPKLESEFVYGDYKVYDVRKMIAKSEQEIGKATAKYFFYSNIMNFFKTEITLANGEIRKRPLIETNGETGEIVWDKGRDFATVRKVLSMPQVNIVKKTEVQTGGFSKESILPKRNSDKLIARKKDWDPKKYGGFDSPTVAYSVLVVAKVEKGKSKKLKSVKELLGITIMERSSFEKNPIDFLEAKGYKEVKKDLIIKLPKYSLFELENGRKRMLASAGELQKGNELALPSKYVNFLYLASHYEKLKGSPEDNEQKQLFVEQHKHYLDEIIEQISEFSKRVILADANLDKVLSAYNKHRDKPIREQAENIIHLFTLTNLGAPAAFKYFDTTIDRKRYTSTKEVLDATLIHQSITGLYETRIDLSQLGGDGGGSSEAAAKGGGRDIMKDIKVRLMTDSPDDSQDLMIGAIESNLFADQISWKSDQPVWLNQWPLKQEKLQALQQLVTEQLQLGHLEESNSPWNTPVFVIKKKSGKWRLLQDLRAVNATMHDMGALQPGLPSPVAVPKGWEIIIIDLQDCFFNIKLHPEDCKRFAFSVPSPNFKRPYQRFQWKVLPQGMKNSPTLCQKFVDKAILTVRDKYQDSYIVHYMDDILLAHPSRSIVDEILTSMIQALNKHGLVVSTEKIQKYDNLKYLGTHIQGDSVSYQKLQIRTDKLRTLNDFQKLLGNINWIRPFLKLTTGELKPLFEILNGDSNPISTRKLTPEACKALQLMNERLSTARVKRLDLSQPWSLCILKTEYTPTACLWQDGVVEWIHLPHISPKVITPYDIFCTQLIIKGRHRSKELFSKDPDYIVVPYTKVQFDLLLQEKEDWPISLLGFLGEVHFHLPKDPLLTFTLQTAIIFPHMTSTTPLEKGIVIFTDGSANGRSVTYIQGREPIIKENTQNTAQQAEIVAVITAFEEVSQPFNLYTDSKYVTGLFPEIETATLSPRTKIYTELKHLQRLIHKRQEKFYIGHIRGHTGLPGPLAQGNAYADSLTRILTAGKRTADGSEFEKRTADGSEFESPKKKAKVE

SEQ ID NO: 3308 - protein, 2022 aa, synthetic construct; identical to SEQ ID NO: 3224

SEQ ID NO: 3309 - protein, 2024 aa, synthetic construct
MPAAKRVKLDGGDKKYSIGLDIGTNSVGWAVITDEYKVPSKKFKVLGNTDRHSIKKNLIGALLFDSGETAEATRLKRTARRRYTRRKNRICYLQEIFSNEMAKVDDSFFHRLEESFLVEEDKKHERHPIFGNIVDEVAYHEKYPTIYHLRKKLVDSTDKADLRLIYLALAHMIKFRGHFLIEGDLNPDNSDVDKLFIQLVQTYNQLFEENPINASGVDAKAILSARLSKSRRLENLIAQLPGEKKNGLFGNLIALSLGLTPNFKSNFDLAEDAKLQLSKDTYDDDLDNLLAQIGDQYADLFLAAKNLSDAILLSDILRVNTEITKAPLSASMIKRYDEHHQDLTLLKALVRQQLPEKYKEIFFDQSKNGYAGYIDGGASQEEFYKFIKPILEKMDGTEELLVKLNREDLLRKQRTFDNGSIPHQIHLGELHAILRRQEDFYPFLKDNREKIEKILTFRIPYYVGPLARGNSRFAWMTRKSEETITPWNFEEVVDKGASAQSFIERMTNFDKNLPNEKVLPKHSLLYEYFTVYNELTKVKYVTEGMRKPAFLSGEQKKAIVDLLFKTNRKVTVKQLKEDYFKKIECFDSVEISGVEDRFNASLGTYHDLLKIIKDKDFLDNEENEDILEDIVLTLTLFEDREMIEERLKTYAHLFDDKVMKQLKRRRYTGWGRLSRKLINGIRDKQSGKTILDFLKSDGFANRNFMQLIHDDSLTFKEDIQKAQVSGQGDSLHEHIANLAGSPAIKKGILQTVKVVDELVKVMGRHKPENIVIEMARENQTTQKGQKNSRERMKRIEEGIKELGSQILKEHPVENTQLQNEKLYLYYLQNGRDMYVDQELDINRLSDYDVDHIVPQSFLKDDSIDNKVLTRSDKARGKSDNVPSEEVVKKMKNYWRQLLNAKLITQRKFDNLTKAERGGLSELDKAGFIKRQLVETRQITKHVAQILDSRMNTKYDENDKLIREVKVITLKSKLVSDFRKDFQFYKVREINNYHHAHDAYLNAVVGTALIKKYPKLESEFVYGDYKVYDVRKMIAKSEQEIGKATAKYFFYSNIMNFFKTEITLANGEIRKRPLIETNGETGEIVWDKGRDFATVRKVLSMPQVNIVKKTEVQTGGFSKESILPKRNSDKLIARKKDWDPKKYGGFDSPTVAYSVLVVAKVEKGKSKKLKSVKELLGITIMERSSFEKNPIDFLEAKGYKEVKKDLIIKLPKYSLFELENGRKRMLASAGELQKGNELALPSKYVNFLYLASHYEKLKGSPEDNEQKQLFVEQHKHYLDEIIEQISEFSKRVILADANLDKVLSAYNKHRDKPIREQAENIIHLFTLTNLGAPAAFKYFDTTIDRKRYTSTKEVLDATLIHQSITGLYETRIDLSQLGGDGGPAPAPAPAPAPGGGRDIMKDIKVRLMTDSPDDSQDLMIGAIESNLFADQISWKSDQPVWLNQWPLKQEKLQALQQLVTEQLQLGHLEESNSPWNTPVFVIKKKSGKWRLLQDLRAVNATMHDMGALQPGLPSPVAVPKGWEIIIIDLQDCFFNIKLHPEDCKRFAFSVPSPNFKRPYQRFQWKVLPQGMKNSPTLCQKFVDKAILTVRDKYQDSYIVHYMDDILLAHPSRSIVDEILTSMIQALNKHGLVVSTEKIQKYDNLKYLGTHIQGDSVSYQKLQIRTDKLRTLNDFQKLLGNINWIRPFLKLTTGELKPLFEILNGDSNPISTRKLTPEACKALQLMNERLSTARVKRLDLSQPWSLCILKTEYTPTACLWQDGVVEWIHLPHISPKVITPYDIFCTQLIIKGRHRSKELFSKDPDYIVVPYTKVQFDLLLQEKEDWPISLLGFLGEVHFHLPKDPLLTFTLQTAIIFPHMTSTTPLEKGIVIFTDGSANGRSVTYIQGREPIIKENTQNTAQQAEIVAVITAFEEVSQPFNLYTDSKYVTGLFPEIETATLSPRTKIYTELKHLQRLIHKRQEKFYIGHIRGHTGLPGPLAQGNAYADSLTRILTAGKRTADGSEFEKRTADGSEFESPKKKAKVE

SEQ ID NO: 3310 - protein, 2024 aa, synthetic construct
MPAAKRVKLDGGDKKYSIGLDIGTNSVGWAVITDEYKVPSKKFKVLGNTDRHSIKKNLIGALLFDSGETAEATRLKRTARRRYTRRKNRICYLQEIFSNEMAKVDDSFFHRLEESFLVEEDKKHERHPIFGNIVDEVAYHEKYPTIYHLRKKLVDSTDKADLRLIYLALAHMIKFRGHFLIEGDLNPDNSDVDKLFIQLVQTYNQLFEENPINASGVDAKAILSARLSKSRRLENLIAQLPGEKKNGLFGNLIALSLGLTPNFKSNFDLAEDAKLQLSKDTYDDDLDNLLAQIGDQYADLFLAAKNLSDAILLSDILRVNTEITKAPLSASMIKRYDEHHQDLTLLKALVRQQLPEKYKEIFFDQSKNGYAGYIDGGASQEEFYKFIKPILEKMDGTEELLVKLNREDLLRKQRTFDNGSIPHQIHLGELHAILRRQEDFYPFLKDNREKIEKILTFRIPYYVGPLARGNSRFAWMTRKSEETITPWNFEEVVDKGASAQSFIERMTNFDKNLPNEKVLPKHSLLYEYFTVYNELTKVKYVTEGMRKPAFLSGEQKKAIVDLLFKTNRKVTVKQLKEDYFKKIECFDSVEISGVEDRFNASLGTYHDLLKIIKDKDFLDNEENEDILEDIVLTLTLFEDREMIEERLKTYAHLFDDKVMKQLKRRRYTGWGRLSRKLINGIRDKQSGKTILDFLKSDGFANRNFMQLIHDDSLTFKEDIQKAQVSGQGDSLHEHIANLAGSPAIKKGILQTVKVVDELVKVMGRHKPENIVIEMARENQTTQKGQKNSRERMKRIEEGIKELGSQILKEHPVENTQLQNEKLYLYYLQNGRDMYVDQELDINRLSDYDVDHIVPQSFLKDDSIDNKVLTRSDKARGKSDNVPSEEVVKKMKNYWRQLLNAKLITQRKFDNLTKAERGGLSELDKAGFIKRQLVETRQITKHVAQILDSRMNTKYDENDKLIREVKVITLKSKLVSDFRKDFQFYKVREINNYHHAHDAYLNAVVGTALIKKYPKLESEFVYGDYKVYDVRKMIAKSEQEIGKATAKYFFYSNIMNFFKTEITLANGEIRKRPLIETNGETGEIVWDKGRDFATVRKVLSMPQVNIVKKTEVQTGGFSKESILPKRNSDKLIARKKDWDPKKYGGFDSPTVAYSVLVVAKVEKGKSKKLKSVKELLGITIMERSSFEKNPIDFLEAKGYKEVKKDLIIKLPKYSLFELENGRKRMLASAGELQKGNELALPSKYVNFLYLASHYEKLKGSPEDNEQKQLFVEQHKHYLDEIIEQISEFSKRVILADANLDKVLSAYNKHRDKPIREQAENIIHLFTLTNLGAPAAFKYFDTTIDRKRYTSTKEVLDATLIHQSITGLYETRIDLSQLGGDGGGSSEAAAKGGSGGGRDIMKDIKVRLMTDSPDDSQDLMIGAIESNLFADQISWKSDQPVWLNQWPLKQEKLQALQQLVTEQLQLGHLEESNSPWNTPVFVIKKKSGKWRLLQDLRAVNATMHDMGALQPGLPSPVAVPKGWEIIIIDLQDCFFNIKLHPEDCKRFAFSVPSPNFKRPYQRFQWKVLPQGMKNSPTLCQKFVDKAILTVRDKYQDSYIVHYMDDILLAHPSRSIVDEILTSMIQALNKHGLVVSTEKIQKYDNLKYLGTHIQGDSVSYQKLQIRTDKLRTLNDFQKLLGNINWIRPFLKLTTGELKPLFEILNGDSNPISTRKLTPEACKALQLMNERLSTARVKRLDLSQPWSLCILKTEYTPTACLWQDGVVEWIHLPHISPKVITPYDIFCTQLIIKGRHRSKELFSKDPDYIVVPYTKVQFDLLLQEKEDWPISLLGFLGEVHFHLPKDPLLTFTLQTAIIFPHMTSTTPLEKGIVIFTDGSANGRSVTYIQGREPIIKENTQNTAQQAEIVAVITAFEEVSQPFNLYTDSKYVTGLFPEIETATLSPRTKIYTELKHLQRLIHKRQEKFYIGHIRGHTGLPGPLAQGNAYADSLTRILTAGKRTADGSEFEKRTADGSEFESPKKKAKVE

SEQ ID NO: 3311 - protein, 2024 aa, synthetic construct
MPAAKRVKLDGGDKKYSIGLDIGTNSVGWAVITDEYKVPSKKFKVLGNTDRHSIKKNLIGALLFDSGETAEATRLKRTARRRYTRRKNRICYLQEIFSNEMAKVDDSFFHRLEESFLVEEDKKHERHPIFGNIVDEVAYHEKYPTIYHLRKKLVDSTDKADLRLIYLALAHMIKFRGHFLIEGDLNPDNSDVDKLFIQLVQTYNQLFEENPINASGVDAKAILSARLSKSRRLENLIAQLPGEKKNGLFGNLIALSLGLTPNFKSNFDLAEDAKLQLSKDTYDDDLDNLLAQIGDQYADLFLAAKNLSDAILLSDILRVNTEITKAPLSASMIKRYDEHHQDLTLLKALVRQQLPEKYKEIFFDQSKNGYAGYIDGGASQEEFYKFIKPILEKMDGTEELLVKLNREDLLRKQRTFDNGSIPHQIHLGELHAILRRQEDFYPFLKDNREKIEKILTFRIPYYVGPLARGNSRFAWMTRKSEETITPWNFEEVVDKGASAQSFIERMTNFDKNLPNEKVLPKHSLLYEYFTVYNELTKVKYVTEGMRKPAFLSGEQKKAIVDLLFKTNRKVTVKQLKEDYFKKIECFDSVEISGVEDRFNASLGTYHDLLKIIKDKDFLDNEENEDILEDIVLTLTLFEDREMIEERLKTYAHLFDDKVMKQLKRRRYTGWGRLSRKLINGIRDKQSGKTILDFLKSDGFANRNFMQLIHDDSLTFKEDIQKAQVSGQGDSLHEHIANLAGSPAIKKGILQTVKVVDELVKVMGRHKPENIVIEMARENQTTQKGQKNSRERMKRIEEGIKELGSQILKEHPVENTQLQNEKLYLYYLQNGRDMYVDQELDINRLSDYDVDHIVPQSFLKDDSIDNKVLTRSDKARGKSDNVPSEEVVKKMKNYWRQLLNAKLITQRKFDNLTKAERGGLSELDKAGFIKRQLVETRQITKHVAQILDSRMNTKYDENDKLIREVKVITLKSKLVSDFRKDFQFYKVREINNYHHAHDAYLNAVVGTALIKKYPKLESEFVYGDYKVYDVRKMIAKSEQEIGKATAKYFFYSNIMNFFKTEITLANGEIRKRPLIETNGETGEIVWDKGRDFATVRKVLSMPQVNIVKKTEVQTGGFSKESILPKRNSDKLIARKKDWDPKKYGGFDSPTVAYSVLVVAKVEKGKSKKLKSVKELLGITIMERSSFEKNPIDFLEAKGYKEVKKDLIIKLPKYSLFELENGRKRMLASAGELQKGNELALPSKYVNFLYLASHYEKLKGSPEDNEQKQLFVEQHKHYLDEIIEQISEFSKRVILADANLDKVLSAYNKHRDKPIREQAENIIHLFTLTNLGAPAAFKYFDTTIDRKRYTSTKEVLDATLIHQSITGLYETRIDLSQLGGDGGGGGGSSEAAAKGGGRDIMKDIKVRLMTDSPDDSQDLMIGAIESNLFADQISWKSDQPVWLNQWPLKQEKLQALQQLVTEQLQLGHLEESNSPWNTPVFVIKKKSGKWRLLQDLRAVNATMHDMGALQPGLPSPVAVPKGWEIIIIDLQDCFFNIKLHPEDCKRFAFSVPSPNFKRPYQRFQWKVLPQGMKNSPTLCQKFVDKAILTVRDKYQDSYIVHYMDDILLAHPSRSIVDEILTSMIQALNKHGLVVSTEKIQKYDNLKYLGTHIQGDSVSYQKLQIRTDKLRTLNDFQKLLGNINWIRPFLKLTTGELKPLFEILNGDSNPISTRKLTPEACKALQLMNERLSTARVKRLDLSQPWSLCILKTEYTPTACLWQDGVVEWIHLPHISPKVITPYDIFCTQLIIKGRHRSKELFSKDPDYIVVPYTKVQFDLLLQEKEDWPISLLGFLGEVHFHLPKDPLLTFTLQTAIIFPHMTSTTPLEKGIVIFTDGSANGRSVTYIQGREPIIKENTQNTAQQAEIVAVITAFEEVSQPFNLYTDSKYVTGLFPEIETATLSPRTKIYTELKHLQRLIHKRQEKFYIGHIRGHTGLPGPLAQGNAYADSLTRILTAGKRTADGSEFEKRTADGSEFESPKKKAKVE

SEQ ID NO: 3312 - protein, 2022 aa, synthetic construct; identical to SEQ ID NO: 3229

SEQ ID NO: 3313 - protein, 2021 aa, synthetic construct; identical to SEQ ID NO: 3208

SEQ ID NO: 3314 - protein, 2024 aa, synthetic construct
MPAAKRVKLDGGDKKYSIGLDIGTNSVGWAVITDEYKVPSKKFKVLGNTDRHSIKKNLIGALLFDSGETAEATRLKRTARRRYTRRKNRICYLQEIFSNEMAKVDDSFFHRLEESFLVEEDKKHERHPIFGNIVDEVAYHEKYPTIYHLRKKLVDSTDKADLRLIYLALAHMIKFRGHFLIEGDLNPDNSDVDKLFIQLVQTYNQLFEENPINASGVDAKAILSARLSKSRRLENLIAQLPGEKKNGLFGNLIALSLGLTPNFKSNFDLAEDAKLQLSKDTYDDDLDNLLAQIGDQYADLFLAAKNLSDAILLSDILRVNTEITKAPLSASMIKRYDEHHQDLTLLKALVRQQLPEKYKEIFFDQSKNGYAGYIDGGASQEEFYKFIKPILEKMDGTEELLVKLNREDLLRKQRTFDNGSIPHQIHLGELHAILRRQEDFYPFLKDNREKIEKILTFRIPYYVGPLARGNSRFAWMTRKSEETITPWNFEEVVDKGASAQSFIERMTNFDKNLPNEKVLPKHSLLYEYFTVYNELTKVKYVTEGMRKPAFLSGEQKKAIVDLLFKTNRKVTVKQLKEDYFKKIECFDSVEISGVEDRFNASLGTYHDLLKIIKDKDFLDNEENEDILEDIVLTLTLFEDREMIEERLKTYAHLFDDKVMKQLKRRRYTGWGRLSRKLINGIRDKQSGKTILDFLKSDGFANRNFMQLIHDDSLTFKEDIQKAQVSGQGDSLHEHIANLAGSPAIKKGILQTVKVVDELVKVMGRHKPENIVIEMARENQTTQKGQKNSRERMKRIEEGIKELGSQILKEHPVENTQLQNEKLYLYYLQNGRDMYVDQELDINRLSDYDVDHIVPQSFLKDDSIDNKVLTRSDKARGKSDNVPSEEVVKKMKNYWRQLLNAKLITQRKFDNLTKAERGGLSELDKAGFIKRQLVETRQITKHVAQILDSRMNTKYDENDKLIREVKVITLKSKLVSDFRKDFQFYKVREINNYHHAHDAYLNAVVGTALIKKYPKLESEFVYGDYKVYDVRKMIAKSEQEIGKATAKYFFYSNIMNFFKTEITLANGEIRKRPLIETNGETGEIVWDKGRDFATVRKVLSMPQVNIVKKTEVQTGGFSKESILPKRNSDKLIARKKDWDPKKYGGFDSPTVAYSVLVVAKVEKGKSKKLKSVKELLGITIMERSSFEKNPIDFLEAKGYKEVKKDLIIKLPKYSLFELENGRKRMLASAGELQKGNELALPSKYVNFLYLASHYEKLKGSPEDNEQKQLFVEQHKHYLDEIIEQISEFSKRVILADANLDKVLSAYNKHRDKPIREQAENIIHLFTLTNLGAPAAFKYFDTTIDRKRYTSTKEVLDATLIHQSITGLYETRIDLSQLGGDGGGSSGGSEAAAKGGGRDIMKDIKVRLMTDSPDDSQDLMIGAIESNLFADQISWKSDQPVWLNQWPLKQEKLQALQQLVTEQLQLGHLEESNSPWNTPVFVIKKKSGKWRLLQDLRAVNATMHDMGALQPGLPSPVAVPKGWEIIIIDLQDCFFNIKLHPEDCKRFAFSVPSPNFKRPYQRFQWKVLPQGMKNSPTLCQKFVDKAILTVRDKYQDSYIVHYMDDILLAHPSRSIVDEILTSMIQALNKHGLVVSTEKIQKYDNLKYLGTHIQGDSVSYQKLQIRTDKLRTLNDFQKLLGNINWIRPFLKLTTGELKPLFEILNGDSNPISTRKLTPEACKALQLMNERLSTARVKRLDLSQPWSLCILKTEYTPTACLWQDGVVEWIHLPHISPKVITPYDIFCTQLIIKGRHRSKELFSKDPDYIVVPYTKVQFDLLLQEKEDWPISLLGFLGEVHFHLPKDPLLTFTLQTAIIFPHMTSTTPLEKGIVIFTDGSANGRSVTYIQGREPIIKENTQNTAQQAEIVAVITAFEEVSQPFNLYTDSKYVTGLFPEIETATLSPRTKIYTELKHLQRLIHKRQEKFYIGHIRGHTGLPGPLAQGNAYADSLTRILTAGKRTADGSEFEKRTADGSEFESPKKKAKVE

SEQ ID NO: 3315 - protein, 2022 aa, synthetic construct; identical to SEQ ID NO: 3199

SEQ ID NO: 3316 - protein, 2022 aa, synthetic construct
MPAAKRVKLDGGDKKYSIGLDIGTNSVGWAVITDEYKVPSKKFKVLGNTDRHSIKKNLIGALLFDSGETAEATRLKRTARRRYTRRKNRICYLQEIFSNEMAKVDDSFFHRLEESFLVEEDKKHERHPIFGNIVDEVAYHEKYPTIYHLRKKLVDSTDKADLRLIYLALAHMIKFRGHFLIEGDLNPDNSDVDKLFIQLVQTYNQLFEENPINASGVDAKAILSARLSKSRRLENLIAQLPGEKKNGLFGNLIALSLGLTPNFKSNFDLAEDAKLQLSKDTYDDDLDNLLAQIGDQYADLFLAAKNLSDAILLSDILRVNTEITKAPLSASMIKRYDEHHQDLTLLKALVRQQLPEKYKEIFFDQSKNGYAGYIDGGASQEEFYKFIKPILEKMDGTEELLVKLNREDLLRKQRTFDNGSIPHQIHLGELHAILRRQEDFYPFLKDNREKIEKILTFRIPYYVGPLARGNSRFAWMTRKSEETITPWNFEEVVDKGASAQSFIERMTNFDKNLPNEKVLPKHSLLYEYFTVYNELTKVKYVTEGMRKPAFLSGEQKKAIVDLLFKTNRKVTVKQLKEDYFKKIECFDSVEISGVEDRFNASLGTYHDLLKIIKDKDFLDNEENEDILEDIVLTLTLFEDREMIEERLKTYAHLFDDKVMKQLKRRRYTGWGRLSRKLINGIRDKQSGKTILDFLKSDGFANRNFMQLIHDDSLTFKEDIQKAQVSGQGDSLHEHIANLAGSPAIKKGILQTVKVVDELVKVMGRHKPENIVIEMARENQTTQKGQKNSRERMKRIEEGIKELGSQILKEHPVENTQLQNEKLYLYYLQNGRDMYVDQELDINRLSDYDVDHIVPQSFLKDDSIDNKVLTRSDKARGKSDNVPSEEVVKKMKNYWRQLLNAKLITQRKFDNLTKAERGGLSELDKAGFIKRQLVETRQITKHVAQILDSRMNTKYDENDKLIREVKVITLKSKLVSDFRKDFQFYKVREINNYHHAHDAYLNAVVGTALIKKYPKLESEFVYGDYKVYDVRKMIAKSEQEIGKATAKYFFYSNIMNFFKTEITLANGEIRKRPLIETNGETGEIVWDKGRDFATVRKVLSMPQVNIVKKTEVQTGGFSKESILPKRNSDKLIARKKDWDPKKYGGFDSPTVAYSVLVVAKVEKGKSKKLKSVKELLGITIMERSSFEKNPIDFLEAKGYKEVKKDLIIKLPKYSLFELENGRKRMLASAGELQKGNELALPSKYVNFLYLASHYEKLKGSPEDNEQKQLFVEQHKHYLDEIIEQISEFSKRVILADANLDKVLSAYNKHRDKPIREQAENIIHLFTLTNLGAPAAFKYFDTTIDRKRYTSTKEVLDATLIHQSITGLYETRIDLSQLGGDGGGGSGGSGGSGGGRDIMKDIKVRLMTDSPDDSQDLMIGAIESNLFADQISWKSDQPVWLNQWPLKQEKLQALQQLVTEQLQLGHLEESNSPWNTPVFVIKKKSGKWRLLQDLRAVNATMHDMGALQPGLPSPVAVPKGWEIIIIDLQDCFFNIKLHPEDCKRFAFSVPSPNFKRPYQRFQWKVLPQGMKNSPTLCQKFVDKAILTVRDKYQDSYIVHYMDDILLAHPSRSIVDEILTSMIQALNKHGLVVSTEKIQKYDNLKYLGTHIQGDSVSYQKLQIRTDKLRTLNDFQKLLGNINWIRPFLKLTTGELKPLFEILNGDSNPISTRKLTPEACKALQLMNERLSTARVKRLDLSQPWSLCILKTEYTPTACLWQDGVVEWIHLPHISPKVITPYDIFCTQLIIKGRHRSKELFSKDPDYIVVPYTKVQFDLLLQEKEDWPISLLGFLGEVHFHLPKDPLLTFTLQTAIIFPHMTSTTPLEKGIVIFTDGSANGRSVTYIQGREPIIKENTQNTAQQAEIVAVITAFEEVSQPFNLYTDSKYVTGLFPEIETATLSPRTKIYTELKHLQRLIHKRQEKFYIGHIRGHTGLPGPLAQGNAYADSLTRILTAGKRTADGSEFEKRTADGSEFESPKKKAKVE

SEQ ID NO: 3317 - protein, 2025 aa, synthetic construct
MPAAKRVKLDGGDKKYSIGLDIGTNSVGWAVITDEYKVPSKKFKVLGNTDRHSIKKNLIGALLFDSGETAEATRLKRTARRRYTRRKNRICYLQEIFSNEMAKVDDSFFHRLEESFLVEEDKKHERHPIFGNIVDEVAYHEKYPTIYHLRKKLVDSTDKADLRLIYLALAHMIKFRGHFLIEGDLNPDNSDVDKLFIQLVQTYNQLFEENPINASGVDAKAILSARLSKSRRLENLIAQLPGEKKNGLFGNLIALSLGLTPNFKSNFDLAEDAKLQLSKDTYDDDLDNLLAQIGDQYADLFLAAKNLSDAILLSDILRVNTEITKAPLSASMIKRYDEHHQDLTLLKALVRQQLPEKYKEIFFDQSKNGYAGYIDGGASQEEFYKFIKPILEKMDGTEELLVKLNREDLLRKQRTFDNGSIPHQIHLGELHAILRRQEDFYPFLKDNREKIEKILTFRIPYYVGPLARGNSRFAWMTRKSEETITPWNFEEVVDKGASAQSFIERMTNFDKNLPNEKVLPKHSLLYEYFTVYNELTKVKYVTEGMRKPAFLSGEQKKAIVDLLFKTNRKVTVKQLKEDYFKKIECFDSVEISGVEDRFNASLGTYHDLLKIIKDKDFLDNEENEDILEDIVLTLTLFEDREMIEERLKTYAHLFDDKVMKQLKRRRYTGWGRLSRKLINGIRDKQSGKTILDFLKSDGFANRNFMQLIHDDSLTFKEDIQKAQVSGQGDSLHEHIANLAGSPAIKKGILQTVKVVDELVKVMGRHKPENIVIEMARENQTTQKGQKNSRERMKRIEEGIKELGSQILKEHPVENTQLQNEKLYLYYLQNGRDMYVDQELDINRLSDYDVDHIVPQSFLKDDSIDNKVLTRSDKARGKSDNVPSEEVVKKMKNYWRQLLNAKLITQRKFDNLTKAERGGLSELDKAGFIKRQLVETRQITKHVAQILDSRMNTKYDENDKLIREVKVITLKSKLVSDFRKDFQFYKVREINNYHHAHDAYLNAVVGTALIKKYPKLESEFVYGDYKVYDVRKMIAKSEQEIGKATAKYFFYSNIMNFFKTEITLANGEIRKRPLIETNGETGEIVWDKGRDFATVRKVLSMPQVNIVKKTEVQTGGFSKESILPKRNSDKLIARKKDWDPKKYGGFDSPTVAYSVLVVAKVEKGKSKKLKSVKELLGITIMERSSFEKNPIDFLEAKGYKEVKKDLIIKLPKYSLFELENGRKRMLASAGELQKGNELALPSKYVNFLYLASHYEKLKGSPEDNEQKQLFVEQHKHYLDEIIEQISEFSKRVILADANLDKVLSAYNKHRDKPIREQAENIIHLFTLTNLGAPAAFKYFDTTIDRKRYTSTKEVLDATLIHQSITGLYETRIDLSQLGGDGGGGSGGSGGSGGSGGGRDIMKDIKVRLMTDSPDDSQDLMIGAIESNLFADQISWKSDQPVWLNQWPLKQEKLQALQQLVTEQLQLGHLEESNSPWNTPVFVIKKKSGKWRLLQDLRAVNATMHDMGALQPGLPSPVAVPKGWEIIIIDLQDCFFNIKLHPEDCKRFAFSVPSPNFKRPYQRFQWKVLPQGMKNSPTLCQKFVDKAILTVRDKYQDSYIVHYMDDILLAHPSRSIVDEILTSMIQALNKHGLVVSTEKIQKYDNLKYLGTHIQGDSVSYQKLQIRTDKLRTLNDFQKLLGNINWIRPFLKLTTGELKPLFEILNGDSNPISTRKLTPEACKALQLMNERLSTARVKRLDLSQPWSLCILKTEYTPTACLWQDGVVEWIHLPHISPKVITPYDIFCTQLIIKGRHRSKELFSKDPDYIVVPYTKVQFDLLLQEKEDWPISLLGFLGEVHFHLPKDPLLTFTLQTAIIFPHMTSTTPLEKGIVIFTDGSANGRSVTYIQGREPIIKENTQNTAQQAEIVAVITAFEEVSQPFNLYTDSKYVTGLFPEIETATLSPRTKIYTELKHLQRLIHKRQEKFYIGHIRGHTGLPGPLAQGNAYADSLTRILTAGKRTADGSEFEKRTADGSEFESPKKKAKVE

SEQ ID NO: 3318 - protein, 2024 aa, synthetic construct; identical to SEQ ID NO: 3207

SEQ ID NO: 3319 - protein, 2016 aa, synthetic construct; identical to SEQ ID NO: 3210

SEQ ID NO: 3320 - protein, 2024 aa, synthetic construct
MPAAKRVKLDGGDKKYSIGLDIGTNSVGWAVITDEYKVPSKKFKVLGNTDRHSIKKNLIGALLFDSGETAEATRLKRTARRRYTRRKNRICYLQEIFSNEMAKVDDSFFHRLEESFLVEEDKKHERHPIFGNIVDEVAYHEKYPTIYHLRKKLVDSTDKADLRLIYLALAHMIKFRGHFLIEGDLNPDNSDVDKLFIQLVQTYNQLFEENPINASGVDAKAILSARLSKSRRLENLIAQLPGEKKNGLFGNLIALSLGLTPNFKSNFDLAEDAKLQLSKDTYDDDLDNLLAQIGDQYADLFLAAKNLSDAILLSDILRVNTEITKAPLSASMIKRYDEHHQDLTLLKALVRQQLPEKYKEIFFDQSKNGYAGYIDGGASQEEFYKFIKPILEKMDGTEELLVKLNREDLLRKQRTFDNGSIPHQIHLGELHAILRRQEDFYPFLKDNREKIEKILTFRIPYYVGPLARGNSRFAWMTRKSEETITPWNFEEVVDKGASAQSFIERMTNFDKNLPNEKVLPKHSLLYEYFTVYNELTKVKYVTEGMRKPAFLSGEQKKAIVDLLFKTNRKVTVKQLKEDYFKKIECFDSVEISGVEDRFNASLGTYHDLLKIIKDKDFLDNEENEDILEDIVLTLTLFEDREMIEERLKTYAHLFDDKVMKQLKRRRYTGWGRLSRKLINGIRDKQSGKTILDFLKSDGFANRNFMQLIHDDSLTFKEDIQKAQVSGQGDSLHEHIANLAGSPAIKKGILQTVKVVDELVKVMGRHKPENIVIEMARENQTTQKGQKNSRERMKRIEEGIKELGSQILKEHPVENTQLQNEKLYLYYLQNGRDMYVDQELDINRLSDYDVDHIVPQSFLKDDSIDNKVLTRSDKARGKSDNVPSEEVVKKMKNYWRQLLNAKLITQRKFDNLTKAERGGLSELDKAGFIKRQLVETRQITKHVAQILDSRMNTKYDENDKLIREVKVITLKSKLVSDFRKDFQFYKVREINNYHHAHDAYLNAVVGTALIKKYPKLESEFVYGDYKVYDVRKMIAKSEQEIGKATAKYFFYSNIMNFFKTEITLANGEIRKRPLIETNGETGEIVWDKGRDFATVRKVLSMPQVNIVKKTEVQTGGFSKESILPKRNSDKLIARKKDWDPKKYGGFDSPTVAYSVLVVAKVEKGKSKKLKSVKELLGITIMERSSFEKNPIDFLEAKGYKEVKKDLIIKLPKYSLFELENGRKRMLASAGELQKGNELALPSKYVNFLYLASHYEKLKGSPEDNEQKQLFVEQHKHYLDEIIEQISEFSKRVILADANLDKVLSAYNKHRDKPIREQAENIIHLFTLTNLGAPAAFKYFDTTIDRKRYTSTKEVLDATLIHQSITGLYETRIDLSQLGGDGGGGSPAPEAAAKGGGRDIMKDIKVRLMTDSPDDSQDLMIGAIESNLFADQISWKSDQPVWLNQWPLKQEKLQALQQLVTEQLQLGHLEESNSPWNTPVFVIKKKSGKWRLLQDLRAVNATMHDMGALQPGLPSPVAVPKGWEIIIIDLQDCFFNIKLHPEDCKRFAFSVPSPNFKRPYQRFQWKVLPQGMKNSPTLCQKFVDKAILTVRDKYQDSYIVHYMDDILLAHPSRSIVDEILTSMIQALNKHGLVVSTEKIQKYDNLKYLGTHIQGDSVSYQKLQIRTDKLRTLNDFQKLLGNINWIRPFLKLTTGELKPLFEILNGDSNPISTRKLTPEACKALQLMNERLSTARVKRLDLSQPWSLCILKTEYTPTACLWQDGVVEWIHLPHISPKVITPYDIFCTQLIIKGRHRSKELFSKDPDYIVVPYTKVQFDLLLQEKEDWPISLLGFLGEVHFHLPKDPLLTFTLQTAIIFPHMTSTTPLEKGIVIFTDGSANGRSVTYIQGREPIIKENTQNTAQQAEIVAVITAFEEVSQPFNLYTDSKYVTGLFPEIETATLSPRTKIYTELKHLQRLIHKRQEKFYIGHIRGHTGLPGPLAQGNAYADSLTRILTAGKRTADGSEFEKRTADGSEFESPKKKAKVE

SEQ ID NO: 3321 - protein, 2022 aa, synthetic construct; identical to SEQ ID NO: 3215

SEQ ID NO: 3322 - protein, 2024 aa, synthetic construct; identical to SEQ ID NO: 3232

SEQ ID NO: 3323 - protein, 2024 aa, synthetic construct; identical to SEQ ID NO: 3235

SEQ ID NO: 3324 - protein, 2024 aa, synthetic construct; identical to SEQ ID NO: 3236

SEQ ID NO: 3325 - protein, 2024 aa, synthetic construct
MPAAKRVKLDGGDKKYSIGLDIGTNSVGWAVITDEYKVPSKKFKVLGNTDRHSIKKNLIGALLFDSGETAEATRLKRTARRRYTRRKNRICYLQEIFSNEMAKVDDSFFHRLEESFLVEEDKKHERHPIFGNIVDEVAYHEKYPTIYHLRKKLVDSTDKADLRLIYLALAHMIKFRGHFLIEGDLNPDNSDVDKLFIQLVQTYNQLFEENPINASGVDAKAILSARLSKSRRLENLIAQLPGEKKNGLFGNLIALSLGLTPNFKSNFDLAEDAKLQLSKDTYDDDLDNLLAQIGDQYADLFLAAKNLSDAILLSDILRVNTEITKAPLSASMIKRYDEHHQDLTLLKALVRQQLPEKYKEIFFDQSKNGYAGYIDGGASQEEFYKFIKPILEKMDGTEELLVKLNREDLLRKQRTFDNGSIPHQIHLGELHAILRRQEDFYPFLKDNREKIEKILTFRIPYYVGPLARGNSRFAWMTRKSEETITPWNFEEVVDKGASAQSFIERMTNFDKNLPNEKVLPKHSLLYEYFTVYNELTKVKYVTEGMRKPAFLSGEQKKAIVDLLFKTNRKVTVKQLKEDYFKKIECFDSVEISGVEDRFNASLGTYHDLLKIIKDKDFLDNEENEDILEDIVLTLTLFEDREMIEERLKTYAHLFDDKVMKQLKRRRYTGWGRLSRKLINGIRDKQSGKTILDFLKSDGFANRNFMQLIHDDSLTFKEDIQKAQVSGQGDSLHEHIANLAGSPAIKKGILQTVKVVDELVKVMGRHKPENIVIEMARENQTTQKGQKNSRERMKRIEEGIKELGSQILKEHPVENTQLQNEKLYLYYLQNGRDMYVDQELDINRLSDYDVDHIVPQSFLKDDSIDNKVLTRSDKARGKSDNVPSEEVVKKMKNYWRQLLNAKLITQRKFDNLTKAERGGLSELDKAGFIKRQLVETRQITKHVAQILDSRMNTKYDENDKLIREVKVITLKSKLVSDFRKDFQFYKVREINNYHHAHDAYLNAVVGTALIKKYPKLESEFVYGDYKVYDVRKMIAKSEQEIGKATAKYFFYSNIMNFFKTEITLANGEIRKRPLIETNGETGEIVWDKGRDFATVRKVLSMPQVNIVKKTEVQTGGFSKESILPKRNSDKLIARKKDWDPKKYGGFDSPTVAYSVLVVAKVEKGKSKKLKSVKELLGITIMERSSFEKNPIDFLEAKGYKEVKKDLIIKLPKYSLFELENGRKRMLASAGELQKGNELALPSKYVNFLYLASHYEKLKGSPEDNEQKQLFVEQHKHYLDEIIEQISEFSKRVILADANLDKVLSAYNKHRDKPIREQAENIIHLFTLTNLGAPAAFKYFDTTIDRKRYTSTKEVLDATLIHQSITGLYETRIDLSQLGGDGGGGGGGSEAAAKGGGRDIMKDIKVRLMTDSPDDSQDLMIGAIESNLFADQISWKSDQPVWLNQWPLKQEKLQALQQLVTEQLQLGHLEESNSPWNTPVFVIKKKSGKWRLLQDLRAVNATMHDMGALQPGLPSPVAVPKGWEIIIIDLQDCFFNIKLHPEDCKRFAFSVPSPNFKRPYQRFQWKVLPQGMKNSPTLCQKFVDKAILTVRDKYQDSYIVHYMDDILLAHPSRSIVDEILTSMIQALNKHGLVVSTEKIQKYDNLKYLGTHIQGDSVSYQKLQIRTDKLRTLNDFQKLLGNINWIRPFLKLTTGELKPLFEILNGDSNPISTRKLTPEACKALQLMNERLSTARVKRLDLSQPWSLCILKTEYTPTACLWQDGVVEWIHLPHISPKVITPYDIFCTQLIIKGRHRSKELFSKDPDYIVVPYTKVQFDLLLQEKEDWPISLLGFLGEVHFHLPKDPLLTFTLQTAIIFPHMTSTTPLEKGIVIFTDGSANGRSVTYIQGREPIIKENTQNTAQQAEIVAVITAFEEVSQPFNLYTDSKYVTGLFPEIETATLSPRTKIYTELKHLQRLIHKRQEKFYIGHIRGHTGLPGPLAQGNAYADSLTRILTAGKRTADGSEFEKRTADGSEFESPKKKAKVE

SEQ ID NO: 3326 - protein, 2024 aa, synthetic construct
MPAAKRVKLDGGDKKYSIGLDIGTNSVGWAVITDEYKVPSKKFKVLGNTDRHSIKKNLIGALLFDSGETAEATRLKRTARRRYTRRKNRICYLQEIFSNEMAKVDDSFFHRLEESFLVEEDKKHERHPIFGNIVDEVAYHEKYPTIYHLRKKLVDSTDKADLRLIYLALAHMIKFRGHFLIEGDLNPDNSDVDKLFIQLVQTYNQLFEENPINASGVDAKAILSARLSKSRRLENLIAQLPGEKKNGLFGNLIALSLGLTPNFKSNFDLAEDAKLQLSKDTYDDDLDNLLAQIGDQYADLFLAAKNLSDAILLSDILRVNTEITKAPLSASMIKRYDEHHQDLTLLKALVRQQLPEKYKEIFFDQSKNGYAGYIDGGASQEEFYKFIKPILEKMDGTEELLVKLNREDLLRKQRTFDNGSIPHQIHLGELHAILRRQEDFYPFLKDNREKIEKILTFRIPYYVGPLARGNSRFAWMTRKSEETITPWNFEEVVDKGASAQSFIERMTNFDKNLPNEKVLPKHSLLYEYFTVYNELTKVKYVTEGMRKPAFLSGEQKKAIVDLLFKTNRKVTVKQLKEDYFKKIECFDSVEISGVEDRFNASLGTYHDLLKIIKDKDFLDNEENEDILEDIVLTLTLFEDREMIEERLKTYAHLFDDKVMKQLKRRRYTGWGRLSRKLINGIRDKQSGKTILDFLKSDGFANRNFMQLIHDDSLTFKEDIQKAQVSGQGDSLHEHIANLAGSPAIKKGILQTVKVVDELVKVMGRHKPENIVIEMARENQTTQKGQKNSRERMKRIEEGIKELGSQILKEHPVENTQLQNEKLYLYYLQNGRDMYVDQELDINRLSDYDVDHIVPQSFLKDDSIDNKVLTRSDKARGKSDNVPSEEVVKKMKNYWRQLLNAKLITQRKFDNLTKAERGGLSELDKAGFIKRQLVETRQITKHVAQILDSRMNTKYDENDKLIREVKVITLKSKLVSDFRKDFQFYKVREINNYHHAHDAYLNAVVGTALIKKYPKLESEFVYGDYKVYDVRKMIAKSEQEIGKATAKYFFYSNIMNFFKTEITLANGEIRKRPLIETNGETGEIVWDKGRDFATVRKVLSMPQVNIVKKTEVQTGGFSKESILPKRNSDKLIARKKDWDPKKYGGFDSPTVAYSVLVVAKVEKGKSKKLKSVKELLGITIMERSSFEKNPIDFLEAKGYKEVKKDLIIKLPKYSLFELENGRKRMLASAGELQKGNELALPSKYVNFLYLASHYEKLKGSPEDNEQKQLFVEQHKHYLDEIIEQISEFSKRVILADANLDKVLSAYNKHRDKPIREQAENIIHLFTLTNLGAPAAFKYFDTTIDRKRYTSTKEVLDATLIHQSITGLYETRIDLSQLGGDGGGGSEAAAKGSSGGGRDIMKDIKVRLMTDSPDDSQDLMIGAIESNLFADQISWKSDQPVWLNQWPLKQEKLQALQQLVTEQLQLGHLEESNSPWNTPVFVIKKKSGKWRLLQDLRAVNATMHDMGALQPGLPSPVAVPKGWEIIIIDLQDCFFNIKLHPEDCKRFAFSVPSPNFKRPYQRFQWKVLPQGMKNSPTLCQKFVDKAILTVRDKYQDSYIVHYMDDILLAHPSRSIVDEILTSMIQALNKHGLVVSTEKIQKYDNLKYLGTHIQGDSVSYQKLQIRTDKLRTLNDFQKLLGNINWIRPFLKLTTGELKPLFEILNGDSNPISTRKLTPEACKALQLMNERLSTARVKRLDLSQPWSLCILKTEYTPTACLWQDGVVEWIHLPHISPKVITPYDIFCTQLIIKGRHRSKELFSKDPDYIVVPYTKVQFDLLLQEKEDWPISLLGFLGEVHFHLPKDPLLTFTLQTAIIFPHMTSTTPLEKGIVIFTDGSANGRSVTYIQGREPIIKENTQNTAQQAEIVAVITAFEEVSQPFNLYTDSKYVTGLFPEIETATLSPRTKIYTELKHLQRLIHKRQEKFYIGHIRGHTGLPGPLAQGNAYADSLTRILTAGKRTADGSEFEKRTADGSEFESPKKKAKVE

SEQ ID NO: 3327 - protein, 2018 aa, synthetic construct
MPAAKRVKLDGGDKKYSIGLDIGTNSVGWAVITDEYKVPSKKFKVLGNTDRHSIKKNLIGALLFDSGETAEATRLKRTARRRYTRRKNRICYLQEIFSNEMAKVDDSFFHRLEESFLVEEDKKHERHPIFGNIVDEVAYHEKYPTIYHLRKKLVDSTDKADLRLIYLALAHMIKFRGHFLIEGDLNPDNSDVDKLFIQLVQTYNQLFEENPINASGVDAKAILSARLSKSRRLENLIAQLPGEKKNGLFGNLIALSLGLTPNFKSNFDLAEDAKLQLSKDTYDDDLDNLLAQIGDQYADLFLAAKNLSDAILLSDILRVNTEITKAPLSASMIKRYDEHHQDLTLLKALVRQQLPEKYKEIFFDQSKNGYAGYIDGGASQEEFYKFIKPILEKMDGTEELLVKLNREDLLRKQRTFDNGSIPHQIHLGELHAILRRQEDFYPFLKDNREKIEKILTFRIPYYVGPLARGNSRFAWMTRKSEETITPWNFEEVVDKGASAQSFIERMTNFDKNLPNEKVLPKHSLLYEYFTVYNELTKVKYVTEGMRKPAFLSGEQKKAIVDLLFKTNRKVTVKQLKEDYFKKIECFDSVEISGVEDRFNASLGTYHDLLKIIKDKDFLDNEENEDILEDIVLTLTLFEDREMIEERLKTYAHLFDDKVMKQLKRRRYTGWGRLSRKLINGIRDKQSGKTILDFLKSDGFANRNFMQLIHDDSLTFKEDIQKAQVSGQGDSLHEHIANLAGSPAIKKGILQTVKVVDELVKVMGRHKPENIVIEMARENQTTQKGQKNSRERMKRIEEGIKELGSQILKEHPVENTQLQNEKLYLYYLQNGRDMYVDQELDINRLSDYDVDHIVPQSFLKDDSIDNKVLTRSDKARGKSDNVPSEEVVKKMKNYWRQLLNAKLITQRKFDNLTKAERGGLSELDKAGFIKRQLVETRQITKHVAQILDSRMNTKYDENDKLIREVKVITLKSKLVSDFRKDFQFYKVREINNYHHAHDAYLNAVVGTALIKKYPKLESEFVYGDYKVYDVRKMIAKSEQEIGKATAKYFFYSNIMNFFKTEITLANGEIRKRPLIETNGETGEIVWDKGRDFATVRKVLSMPQVNIVKKTEVQTGGFSKESILPKRNSDKLIARKKDWDPKKYGGFDSPTVAYSVLVVAKVEKGKSKKLKSVKELLGITIMERSSFEKNPIDFLEAKGYKEVKKDLIIKLPKYSLFELENGRKRMLASAGELQKGNELALPSKYVNFLYLASHYEKLKGSPEDNEQKQLFVEQHKHYLDEIIEQISEFSKRVILADANLDKVLSAYNKHRDKPIREQAENIIHLFTLTNLGAPAAFKYFDTTIDRKRYTSTKEVLDATLIHQSITGLYETRIDLSQLGGDGGPAPAPGGGRDIMKDIKVRLMTDSPDDSQDLMIGAIESNLFADQISWKSDQPVWLNQWPLKQEKLQALQQLVTEQLQLGHLEESNSPWNTPVFVIKKKSGKWRLLQDLRAVNATMHDMGALQPGLPSPVAVPKGWEIIIIDLQDCFFNIKLHPEDCKRFAFSVPSPNFKRPYQRFQWKVLPQGMKNSPTLCQKFVDKAILTVRDKYQDSYIVHYMDDILLAHPSRSIVDEILTSMIQALNKHGLVVSTEKIQKYDNLKYLGTHIQGDSVSYQKLQIRTDKLRTLNDFQKLLGNINWIRPFLKLTTGELKPLFEILNPDSNPISTRKLTPEACKALQLMNERLSTARVKRLDLSQPWSLCILKTEYTPTACLWQDGVVEWIHLPHISPKVITPYDIFCTQLIIKGRHRSKELFSKDPDYIVVPYTKVQFDLLLQEKEDWPISLLGFLGEVHFHLPKDPLLTFTLQTAIIFPHMTSTTPLEKGIVIFTDGSANGRSVTYIQGREPIIKENTQNTAQQAEIVAVITAFEEVSQPFNLYTDSKYVTGLFPEIETATLSPRTKIYTELKHLQRLIHKRQEKFYIGHIRGHTGLPGPLAQGNAYADSLTRILTAGKRTADGSEFEKRTADGSEFESPKKKAKVE

SEQ ID NO: 3328 - protein, 2028 aa, synthetic construct
MPAAKRVKLDGGDKKYSIGLDIGTNSVGWAVITDEYKVPSKKFKVLGNTDRHSIKKNLIGALLFDSGETAEATRLKRTARRRYTRRKNRICYLQEIFSNEMAKVDDSFFHRLEESFLVEEDKKHERHPIFGNIVDEVAYHEKYPTIYHLRKKLVDSTDKADLRLIYLALAHMIKFRGHFLIEGDLNPDNSDVDKLFIQLVQTYNQLFEENPINASGVDAKAILSARLSKSRRLENLIAQLPGEKKNGLFGNLIALSLGLTPNFKSNFDLAEDAKLQLSKDTYDDDLDNLLAQIGDQYADLFLAAKNLSDAILLSDILRVNTEITKAPLSASMIKRYDEHHQDLTLLKALVRQQLPEKYKEIFFDQSKNGYAGYIDGGASQEEFYKFIKPILEKMDGTEELLVKLNREDLLRKQRTFDNGSIPHQIHLGELHAILRRQEDFYPFLKDNREKIEKILTFRIPYYVGPLARGNSRFAWMTRKSEETITPWNFEEVVDKGASAQSFIERMTNFDKNLPNEKVLPKHSLLYEYFTVYNELTKVKYVTEGMRKPAFLSGEQKKAIVDLLFKTNRKVTVKQLKEDYFKKIECFDSVEISGVEDRFNASLGTYHDLLKIIKDKDFLDNEENEDILEDIVLTLTLFEDREMIEERLKTYAHLFDDKVMKQLKRRRYTGWGRLSRKLINGIRDKQSGKTILDFLKSDGFANRNFMQLIHDDSLTFKEDIQKAQVSGQGDSLHEHIANLAGSPAIKKGILQTVKVVDELVKVMGRHKPENIVIEMARENQTTQKGQKNSRERMKRIEEGIKELGSQILKEHPVENTQLQNEKLYLYYLQNGRDMYVDQELDINRLSDYDVDHIVPQSFLKDDSIDNKVLTRSDKARGKSDNVPSEEVVKKMKNYWRQLLNAKLITQRKFDNLTKAERGGLSELDKAGFIKRQLVETRQITKHVAQILDSRMNTKYDENDKLIREVKVITLKSKLVSDFRKDFQFYKVREINNYHHAHDAYLNAVVGTALIKKYPKLESEFVYGDYKVYDVRKMIAKSEQEIGKATAKYFFYSNIMNFFKTEITLANGEIRKRPLIETNGETGEIVWDKGRDFATVRKVLSMPQVNIVKKTEVQTGGFSKESILPKRNSDKLIARKKDWDPKKYGGFDSPTVAYSVLVVAKVEKGKSKKLKSVKELLGITIMERSSFEKNPIDFLEAKGYKEVKKDLIIKLPKYSLFELENGRKRMLASAGELQKGNELALPSKYVNFLYLASHYEKLKGSPEDNEQKQLFVEQHKHYLDEIIEQISEFSKRVILADANLDKVLSAYNKHRDKPIREQAENIIHLFTLTNLGAPAAFKYFDTTIDRKRYTSTKEVLDATLIHQSITGLYETRIDLSQLGGDGGGGGGSEAAAKGGGGSGGGRDIMKDIKVRLMTDSPDDSQDLMIGAIESNLFADQISWKSDQPVWLNQWPLKQEKLQALQQLVTEQLQLGHLEESNSPWNTPVFVIKKKSGKWRLLQDLRAVNATMHDMGALQPGLPSPVAVPKGWEIIIIDLQDCFFNIKLHPEDCKRFAFSVPSPNFKRPYQRFQWKVLPQGMKNSPTLCQKFVDKAILTVRDKYQDSYIVHYMDDILLAHPSRSIVDEILTSMIQALNKHGLVVSTEKIQKYDNLKYLGTHIQGDSVSYQKLQIRTDKLRTLNDFQKLLGNINWIRPFLKLTTGELKPLFEILNPDSNPISTRKLTPEACKALQLMNERLSTARVKRLDLSQPWSLCILKTEYTPTACLWQDGVVEWIHLPHISPKVITPYDIFCTQLIIKGRHRSKELFSKDPDYIVVPYTKVQFDLLLQEKEDWPISLLGFLGEVHFHLPKDPLLTFTLQTAIIFPHMTSTTPLEKGIVIFTDGSANGRSVTYIQGREPIIKENTQNTAQQAEIVAVITAFEEVSQPFNLYTDSKYVTGLFPEIETATLSPRTKIYTELKHLQRLIHKRQEKFYIGHIRGHTGLPGPLAQGNAYADSLTRILTAGKRTADGSEFEKRTADGSEFESPKKKAKVE

SEQ ID NO: 3329 - protein, 2022 aa, synthetic construct
MPAAKRVKLDGGDKKYSIGLDIGTNSVGWAVITDEYKVPSKKFKVLGNTDRHSIKKNLIGALLFDSGETAEATRLKRTARRRYTRRKNRICYLQEIFSNEMAKVDDSFFHRLEESFLVEEDKKHERHPIFGNIVDEVAYHEKYPTIYHLRKKLVDSTDKADLRLIYLALAHMIKFRGHFLIEGDLNPDNSDVDKLFIQLVQTYNQLFEENPINASGVDAKAILSARLSKSRRLENLIAQLPGEKKNGLFGNLIALSLGLTPNFKSNFDLAEDAKLQLSKDTYDDDLDNLLAQIGDQYADLFLAAKNLSDAILLSDILRVNTEITKAPLSASMIKRYDEHHQDLTLLKALVRQQLPEKYKEIFFDQSKNGYAGYIDGGASQEEFYKFIKPILEKMDGTEELLVKLNREDLLRKQRTFDNGSIPHQIHLGELHAILRRQEDFYPFLKDNREKIEKILTFRIPYYVGPLARGNSRFAWMTRKSEETITPWNFEEVVDKGASAQSFIERMTNFDKNLPNEKVLPKHSLLYEYFTVYNELTKVKYVTEGMRKPAFLSGEQKKAIVDLLFKTNRKVTVKQLKEDYFKKIECFDSVEISGVEDRFNASLGTYHDLLKIIKDKDFLDNEENEDILEDIVLTLTLFEDREMIEERLKTYAHLFDDKVMKQLKRRRYTGWGRLSRKLINGIRDKQSGKTILDFLKSDGFANRNFMQLIHDDSLTFKEDIQKAQVSGQGDSLHEHIANLAGSPAIKKGILQTVKVVDELVKVMGRHKPENIVIEMARENQTTQKGQKNSRERMKRIEEGIKELGSQILKEHPVENTQLQNEKLYLYYLQNGRDMYVDQELDINRLSDYDVDHIVPQSFLKDDSIDNKVLTRSDKARGKSDNVPSEEVVKKMKNYWRQLLNAKLITQRKFDNLTKAERGGLSELDKAGFIKRQLVETRQITKHVAQILDSRMNTKYDENDKLIREVKVITLKSKLVSDFRKDFQFYKVREINNYHHAHDAYLNAVVGTALIKKYPKLESEFVYGDYKVYDVRKMIAKSEQEIGKATAKYFFYSNIMNFFKTEITLANGEIRKRPLIETNGETGEIVWDKGRDFATVRKVLSMPQVNIVKKTEVQTGGFSKESILPKRNSDKLIARKKDWDPKKYGGFDSPTVAYSVLVVAKVEKGKSKKLKSVKELLGITIMERSSFEKNPIDFLEAKGYKEVKKDLIIKLPKYSLFELENGRKRMLASAGELQKGNELALPSKYVNFLYLASHYEKLKGSPEDNEQKQLFVEQHKHYLDEIIEQISEFSKRVILADANLDKVLSAYNKHRDKPIREQAENIIHLFTLTNLGAPAAFKYFDTTIDRKRYTSTKEVLDATLIHQSITGLYETRIDLSQLGGDGGGGSGGGGSSGGGRDIMKDIKVRLMTDSPDDSQDLMIGAIESNLFADQISWKSDQPVWLNQWPLKQEKLQALQQLVTEQLQLGHLEESNSPWNTPVFVIKKKSGKWRLLQDLRAVNATMHDMGALQPGLPSPVAVPKGWEIIIIDLQDCFFNIKLHPEDCKRFAFSVPSPNFKRPYQRFQWKVLPQGMKNSPTLCQKFVDKAILTVRDKYQDSYIVHYMDDILLAHPSRSIVDEILTSMIQALNKHGLVVSTEKIQKYDNLKYLGTHIQGDSVSYQKLQIRTDKLRTLNDFQKLLGNINWIRPFLKLTTGELKPLFEILNPDSNPISTRKLTPEACKALQLMNERLSTARVKRLDLSQPWSLCILKTEYTPTACLWQDGVVEWIHLPHISPKVITPYDIFCTQLIIKGRHRSKELFSKDPDYIVVPYTKVQFDLLLQEKEDWPISLLGFLGEVHFHLPKDPLLTFTLQTAIIFPHMTSTTPLEKGIVIFTDGSANGRSVTYIQGREPIIKENTQNTAQQAEIVAVITAFEEVSQPFNLYTDSKYVTGLFPEIETATLSPRTKIYTELKHLQRLIHKRQEKFYIGHIRGHTGLPGPLAQGNAYADSLTRILTAGKRTADGSEFEKRTADGSEFESPKKKAKVE

SEQ ID NO: 3330 - protein, 2033 aa, synthetic construct
MPAAKRVKLDGGDKKYSIGLDIGTNSVGWAVITDEYKVPSKKFKVLGNTDRHSIKKNLIGALLFDSGETAEATRLKRTARRRYTRRKNRICYLQEIFSNEMAKVDDSFFHRLEESFLVEEDKKHERHPIFGNIVDEVAYHEKYPTIYHLRKKLVDSTDKADLRLIYLALAHMIKFRGHFLIEGDLNPDNSDVDKLFIQLVQTYNQLFEENPINASGVDAKAILSARLSKSRRLENLIAQLPGEKKNGLFGNLIALSLGLTPNFKSNFDLAEDAKLQLSKDTYDDDLDNLLAQIGDQYADLFLAAKNLSDAILLSDILRVNTEITKAPLSASMIKRYDEHHQDLTLLKALVRQQLPEKYKEIFFDQSKNGYAGYIDGGASQEEFYKFIKPILEKMDGTEELLVKLNREDLLRKQRTFDNGSIPHQIHLGELHAILRRQEDFYPFLKDNREKIEKILTFRIPYYVGPLARGNSRFAWMTRKSEETITPWNFEEVVDKGASAQSFIERMTNFDKNLPNEKVLPKHSLLYEYFTVYNELTKVKYVTEGMRKPAFLSGEQKKAIVDLLFKTNRKVTVKQLKEDYFKKIECFDSVEISGVEDRFNASLGTYHDLLKIIKDKDFLDNEENEDILEDIVLTLTLFEDREMIEERLKTYAHLFDDKVMKQLKRRRYTGWGRLSRKLINGIRDKQSGKTILDFLKSDGFANRNFMQLIHDDSLTFKEDIQKAQVSGQGDSLHEHIANLAGSPAIKKGILQTVKVVDELVKVMGRHKPENIVIEMARENQTTQKGQKNSRERMKRIEEGIKELGSQILKEHPVENTQLQNEKLYLYYLQNGRDMYVDQELDINRLSDYDVDHIVPQSFLKDDSIDNKVLTRSDKARGKSDNVPSEEVVKKMKNYWRQLLNAKLITQRKFDNLTKAERGGLSELDKAGFIKRQLVETRQITKHVAQILDSRMNTKYDENDKLIREVKVITLKSKLVSDFRKDFQFYKVREINNYHHAHDAYLNAVVGTALIKKYPKLESEFVYGDYKVYDVRKMIAKSEQEIGKATAKYFFYSNIMNFFKTEITLANGEIRKRPLIETNGETGEIVWDKGRDFATVRKVLSMPQVNIVKKTEVQTGGFSKESILPKRNSDKLIARKKDWDPKKYGGFDSPTVAYSVLVVAKVEKGKSKKLKSVKELLGITIMERSSFEKNPIDFLEAKGYKEVKKDLIIKLPKYSLFELENGRKRMLASAGELQKGNELALPSKYVNFLYLASHYEKLKGSPEDNEQKQLFVEQHKHYLDEIIEQISEFSKRVILADANLDKVLSAYNKHRDKPIREQAENIIHLFTLTNLGAPAAFKYFDTTIDRKRYTSTKEVLDATLIHQSITGLYETRIDLSQLGGDGGEAAAKEAAAKEAAAKEAAAKGGGRDIMKDIKVRLMTDSPDDSQDLMIGAIESNLFADQISWKSDQPVWLNQWPLKQEKLQALQQLVTEQLQLGHLEESNSPWNTPVFVIKKKSGKWRLLQDLRAVNATMHDMGALQPGLPSPVAPPKGWEIIIIDLQDCFFNIKLHPEDCKRFAFSVPSPNFKRPYQRFQWKVLPQGMKNSPTLCQKFVDKAILTVRDKYQDSYIVHYMDDILLAHPSRSIVDEILTSMIQALNKHGLVVSTEKIQKYDNLKYLGTHIQGDSVSYQKLQIRTDKLRTLNDFQKLLGNINWIRPFLKLTTGELKPLFEILNPDSNPISTRKLTPEACKALQLMNERLSTARVKRLDLSQPWSLCILKTEYTPTACLWQDGVVEWIHLPHISPKVITPYDIFCTQLIIKGRHRSKELFSKDPDYIVVPYTKVQFDLLLQEKEDWPISLLGFLGEVHFHLPKDPLLTFTLQTAIIFPHMTSTTPLEKGIVIFTDGSANGRSVTYIQGREPIIKENTQNTAQQAEIVAVITAFEEVSQPFNLYTDSKYVTGLFPEIETATLSPRTKIYTELKHLQRLIHKRQEKFYIGHIRGHTGLPGPLAQGNAYADSLTRILTAGKRTADGSEFEKRTADGSEFESPKKKAKVE

SEQ ID NO: 3331 - protein, 2022 aa, synthetic construct
MPAAKRVKLDGGDKKYSIGLDIGTNSVGWAVITDEYKVPSKKFKVLGNTDRHSIKKNLIGALLFDSGETAEATRLKRTARRRYTRRKNRICYLQEIFSNEMAKVDDSFFHRLEESFLVEEDKKHERHPIFGNIVDEVAYHEKYPTIYHLRKKLVDSTDKADLRLIYLALAHMIKFRGHFLIEGDLNPDNSDVDKLFIQLVQTYNQLFEENPINASGVDAKAILSARLSKSRRLENLIAQLPGEKKNGLFGNLIALSLGLTPNFKSNFDLAEDAKLQLSKDTYDDDLDNLLAQIGDQYADLFLAAKNLSDAILLSDILRVNTEITKAPLSASMIKRYDEHHQDLTLLKALVRQQLPEKYKEIFFDQSKNGYAGYIDGGASQEEFYKFIKPILEKMDGTEELLVKLNREDLLRKQRTFDNGSIPHQIHLGELHAILRRQEDFYPFLKDNREKIEKILTFRIPYYVGPLARGNSRFAWMTRKSEETITPWNFEEVVDKGASAQSFIERMTNFDKNLPNEKVLPKHSLLYEYFTVYNELTKVKYVTEGMRKPAFLSGEQKKAIVDLLFKTNRKVTVKQLKEDYFKKIECFDSVEISGVEDRFNASLGTYHDLLKIIKDKDFLDNEENEDILEDIVLTLTLFEDREMIEERLKTYAHLFDDKVMKQLKRRRYTGWGRLSRKLINGIRDKQSGKTILDFLKSDGFANRNFMQLIHDDSLTFKEDIQKAQVSGQGDSLHEHIANLAGSPAIKKGILQTVKVVDELVKVMGRHKPENIVIEMARENQTTQKGQKNSRERMKRIEEGIKELGSQILKEHPVENTQLQNEKLYLYYLQNGRDMYVDQELDINRLSDYDVDHIVPQSFLKDDSIDNKVLTRSDKARGKSDNVPSEEVVKKMKNYWRQLLNAKLITQRKFDNLTKAERGGLSELDKAGFIKRQLVETRQITKHVAQILDSRMNTKYDENDKLIREVKVITLKSKLVSDFRKDFQFYKVREINNYHHAHDAYLNAVVGTALIKKYPKLESEFVYGDYKVYDVRKMIAKSEQEIGKATAKYFFYSNIMNFFKTEITLANGEIRKRPLIETNGETGEIVWDKGRDFATVRKVLSMPQVNIVKKTEVQTGGFSKESILPKRNSDKLIARKKDWDPKKYGGFDSPTVAYSVLVVAKVEKGKSKKLKSVKELLGITIMERSSFEKNPIDFLEAKGYKEVKKDLIIKLPKYSLFELENGRKRMLASAGELQKGNELALPSKYVNFLYLASHYEKLKGSPEDNEQKQLFVEQHKHYLDEIIEQISEFSKRVILADANLDKVLSAYNKHRDKPIREQAENIIHLFTLTNLGAPAAFKYFDTTIDRKRYTSTKEVLDATLIHQSITGLYETRIDLSQLGGDGGGGGGGSPAPGGGRDIMKDIKVRLMTDSPDDSQDLMIGAIESNLFADQISWKSDQPVWLNQWPLKQEKLQALQQLVTEQLQLGHLEESNSPWNTPVFVIKKKSGKWRLLQDLRAVNATMHDMGALQPGLPSPVAPPKGWEIIIIDLQDCFFNIKLHPEDCKRFAFSVPSPNFKRPYQRFQWKVLPQGMKNSPTLCQKFVDKAILTVRDKYQDSYIVHYMDDILLAHPSRSIVDEILTSMIQALNKHGLVVSTEKIQKYDNLKYLGTHIQGDSVSYQKLQIRTDKLRTLNDFQKLLGNINWIRPFLKLTTGELKPLFEILNPDSNPISTRKLTPEACKALQLMNERLSTARVKRLDLSQPWSLCILKTEYTPTACLWQDGVVEWIHLPHISPKVITPYDIFCTQLIIKGRHRSKELFSKDPDYIVVPYTKVQFDLLLQEKEDWPISLLGFLGEVHFHLPKDPLLTFTLQTAIIFPHMTSTTPLEKGIVIFTDGSANGRSVTYIQGREPIIKENTQNTAQQAEIVAVITAFEEVSQPFNLYTDSKYVTGLFPEIETATLSPRTKIYTELKHLQRLIHKRQEKFYIGHIRGHTGLPGPLAQGNAYADSLTRILTAGKRTADGSEFEKRTADGSEFESPKKKAKVE

SEQ ID NO: 3332 - protein, 2024 aa, synthetic construct
MPAAKRVKLDGGDKKYSIGLDIGTNSVGWAVITDEYKVPSKKFKVLGNTDRHSIKKNLIGALLFDSGETAEATRLKRTARRRYTRRKNRICYLQEIFSNEMAKVDDSFFHRLEESFLVEEDKKHERHPIFGNIVDEVAYHEKYPTIYHLRKKLVDSTDKADLRLIYLALAHMIKFRGHFLIEGDLNPDNSDVDKLFIQLVQTYNQLFEENPINASGVDAKAILSARLSKSRRLENLIAQLPGEKKNGLFGNLIALSLGLTPNFKSNFDLAEDAKLQLSKDTYDDDLDNLLAQIGDQYADLFLAAKNLSDAILLSDILRVNTEITKAPLSASMIKRYDEHHQDLTLLKALVRQQLPEKYKEIFFDQSKNGYAGYIDGGASQEEFYKFIKPILEKMDGTEELLVKLNREDLLRKQRTFDNGSIPHQIHLGELHAILRRQEDFYPFLKDNREKIEKILTFRIPYYVGPLARGNSRFAWMTRKSEETITPWNFEEVVDKGASAQSFIERMTNFDKNLPNEKVLPKHSLLYEYFTVYNELTKVKYVTEGMRKPAFLSGEQKKAIVDLLFKTNRKVTVKQLKEDYFKKIECFDSVEISGVEDRFNASLGTYHDLLKIIKDKDFLDNEENEDILEDIVLTLTLFEDREMIEERLKTYAHLFDDKVMKQLKRRRYTGWGRLSRKLINGIRDKQSGKTILDFLKSDGFANRNFMQLIHDDSLTFKEDIQKAQVSGQGDSLHEHIANLAGSPAIKKGILQTVKVVDELVKVMGRHKPENIVIEMARENQTTQKGQKNSRERMKRIEEGIKELGSQILKEHPVENTQLQNEKLYLYYLQNGRDMYVDQELDINRLSDYDVDHIVPQSFLKDDSIDNKVLTRSDKARGKSDNVPSEEVVKKMKNYWRQLLNAKLITQRKFDNLTKAERGGLSELDKAGFIKRQLVETRQITKHVAQILDSRMNTKYDENDKLIREVKVITLKSKLVSDFRKDFQFYKVREINNYHHAHDAYLNAVVGTALIKKYPKLESEFVYGDYKVYDVRKMIAKSEQEIGKATAKYFFYSNIMNFFKTEITLANGEIRKRPLIETNGETGEIVWDKGRDFATVRKVLSMPQVNIVKKTEVQTGGFSKESILPKRNSDKLIARKKDWDPKKYGGFDSPTVAYSVLVVAKVEKGKSKKLKSVKELLGITIMERSSFEKNPIDFLEAKGYKEVKKDLIIKLPKYSLFELENGRKRMLASAGELQKGNELALPSKYVNFLYLASHYEKLKGSPEDNEQKQLFVEQHKHYLDEIIEQISEFSKRVILADANLDKVLSAYNKHRDKPIREQAENIIHLFTLTNLGAPAAFKYFDTTIDRKRYTSTKEVLDATLIHQSITGLYETRIDLSQLGGDGGGSSEAAAKPAPGGGRDIMKDIKVRLMTDSPDDSQDLMIGAIESNLFADQISWKSDQPVWLNQWPLKQEKLQALQQLVTEQLQLGHLEESNSPWNTPVFVIKKKSGKWRLLQDLRAVNATMHDMGALQPGLPSPVAPPKGWEIIIIDLQDCFFNIKLHPEDCKRFAFSVPSPNFKRPYQRFQWKVLPQGMKNSPTLCQKFVDKAILTVRDKYQDSYIVHYMDDILLAHPSRSIVDEILTSMIQALNKHGLVVSTEKIQKYDNLKYLGTHIQGDSVSYQKLQIRTDKLRTLNDFQKLLGNINWIRPFLKLTTGELKPLFEILNPDSNPISTRKLTPEACKALQLMNERLSTARVKRLDLSQPWSLCILKTEYTPTACLWQDGVVEWIHLPHISPKVITPYDIFCTQLIIKGRHRSKELFSKDPDYIVVPYTKVQFDLLLQEKEDWPISLLGFLGEVHFHLPKDPLLTFTLQTAIIFPHMTSTTPLEKGIVIFTDGSANGRSVTYIQGREPIIKENTQNTAQQAEIVAVITAFEEVSQPFNLYTDSKYVTGLFPEIETATLSPRTKIYTELKHLQRLIHKRQEKFYIGHIRGHTGLPGPLAQGNAYADSLTRILTAGKRTADGSEFEKRTADGSEFESPKKKAKVE

SEQ ID NO: 3333-3999 - skipped (667 entries)

SEQ ID NO: 4000 - protein, 1381 aa, synthetic construct
MPAAKRVKLDGGDKKYSIGLDIGTNSVGWAVITDEYKVPSKKFKVLGNTDRHSIKKNLIGALLFDSGETAEATRLKRTARRRYTRRKNRICYLQEIFSNEMAKVDDSFFHRLEESFLVEEDKKHERHPIFGNIVDEVAYHEKYPTIYHLRKKLVDSTDKADLRLIYLALAHMIKFRGHFLIEGDLNPDNSDVDKLFIQLVQTYNQLFEENPINASGVDAKAILSARLSKSRRLENLIAQLPGEKKNGLFGNLIALSLGLTPNFKSNFDLAEDAKLQLSKDTYDDDLDNLLAQIGDQYADLFLAAKNLSDAILLSDILRVNTEITKAPLSASMIKRYDEHHQDLTLLKALVRQQLPEKYKEIFFDQSKNGYAGYIDGGASQEEFYKFIKPILEKMDGTEELLVKLNREDLLRKQRTFDNGSIPHQIHLGELHAILRRQEDFYPFLKDNREKIEKILTFRIPYYVGPLARGNSRFAWMTRKSEETITPWNFEEVVDKGASAQSFIERMTNFDKNLPNEKVLPKHSLLYEYFTVYNELTKVKYVTEGMRKPAFLSGEQKKAIVDLLFKTNRKVTVKQLKEDYFKKIECFDSVEISGVEDRFNASLGTYHDLLKIIKDKDFLDNEENEDILEDIVLTLTLFEDREMIEERLKTYAHLFDDKVMKQLKRRRYTGWGRLSRKLINGIRDKQSGKTILDFLKSDGFANRNFMQLIHDDSLTFKEDIQKAQVSGQGDSLHEHIANLAGSPAIKKGILQTVKVVDELVKVMGRHKPENIVIEMARENQTTQKGQKNSRERMKRIEEGIKELGSQILKEHPVENTQLQNEKLYLYYLQNGRDMYVDQELDINRLSDYDVDHIVPQSFLKDDSIDNKVLTRSDKARGKSDNVPSEEVVKKMKNYWRQLLNAKLITQRKFDNLTKAERGGLSELDKAGFIKRQLVETRQITKHVAQILDSRMNTKYDENDKLIREVKVITLKSKLVSDFRKDFQFYKVREINNYHHAHDAYLNAVVGTALIKKYPKLESEFVYGDYKVYDVRKMIAKSEQEIGKATAKYFFYSNIMNFFKTEITLANGEIRKRPLIETNGETGEIVWDKGRDFATVRKVLSMPQVNIVKKTEVQTGGFSKESILPKRNSDKLIARKKDWDPKKYGGFDSPTVAYSVLVVAKVEKGKSKKLKSVKELLGITIMERSSFEKNPIDFLEAKGYKEVKKDLIIKLPKYSLFELENGRKRMLASAGELQKGNELALPSKYVNFLYLASHYEKLKGSPEDNEQKQLFVEQHKHYLDEIIEQISEFSKRVILADANLDKVLSAYNKHRDKPIREQAENIIHLFTLTNLGAPAAFKYFDTTIDRKRYTSTKEVLDATLIHQSITGLYETRIDLSQLGGDGG

SEQ ID NO: 4001 - protein, 31 aa, synthetic construct
AGKRTADGSEFEKRTADGSEFESPKKKAKVE

SEQ ID NO: 4002 - protein, 2138 aa, synthetic construct; identical to SEQ ID NO: 2892

SEQ ID NO: 4003-4500 - skipped (498 entries)

SEQ ID NO: 4501 - protein, 2096 aa, synthetic construct
MPAAKRVKLDGGDKKYSIGLDIGTNSVGWAVITDEYKVPSKKFKVLGNTDRHSIKKNLIGALLFDSGETAEATRLKRTARRRYTRRKNRICYLQEIFSNEMAKVDDSFFHRLEESFLVEEDKKHERHPIFGNIVDEVAYHEKYPTIYHLRKKLVDSTDKADLRLIYLALAHMIKFRGHFLIEGDLNPDNSDVDKLFIQLVQTYNQLFEENPINASGVDAKAILSARLSKSRRLENLIAQLPGEKKNGLFGNLIALSLGLTPNFKSNFDLAEDAKLQLSKDTYDDDLDNLLAQIGDQYADLFLAAKNLSDAILLSDILRVNTEITKAPLSASMIKRYDEHHQDLTLLKALVRQQLPEKYKEIFFDQSKNGYAGYIDGGASQEEFYKFIKPILEKMDGTEELLVKLNREDLLRKQRTFDNGSIPHQIHLGELHAILRRQEDFYPFLKDNREKIEKILTFRIPYYVGPLARGNSRFAWMTRKSEETITPWNFEEVVDKGASAQSFIERMTNFDKNLPNEKVLPKHSLLYEYFTVYNELTKVKYVTEGMRKPAFLSGEQKKAIVDLLFKTNRKVTVKQLKEDYFKKIECFDSVEISGVEDRFNASLGTYHDLLKIIKDKDFLDNEENEDILEDIVLTLTLFEDREMIEERLKTYAHLFDDKVMKQLKRRRYTGWGRLSRKLINGIRDKQSGKTILDFLKSDGFANRNFMQLIHDDSLTFKEDIQKAQVSGQGDSLHEHIANLAGSPAIKKGILQTVKVVDELVKVMGRHKPENIVIEMARENQTTQKGQKNSRERMKRIEEGIKELGSQILKEHPVENTQLQNEKLYLYYLQNGRDMYVDQELDINRLSDYDVDHIVPQSFLKDDSIDNKVLTRSDKARGKSDNVPSEEVVKKMKNYWRQLLNAKLITQRKFDNLTKAERGGLSELDKAGFIKRQLVETRQITKHVAQILDSRMNTKYDENDKLIREVKVITLKSKLVSDFRKDFQFYKVREINNYHHAHDAYLNAVVGTALIKKYPKLESEFVYGDYKVYDVRKMIAKSEQEIGKATAKYFFYSNIMNFFKTEITLANGEIRKRPLIETNGETGEIVWDKGRDFATVRKVLSMPQVNIVKKTEVQTGGFSKESILPKRNSDKLIARKKDWDPKKYGGFDSPTVAYSVLVVAKVEKGKSKKLKSVKELLGITIMERSSFEKNPIDFLEAKGYKEVKKDLIIKLPKYSLFELENGRKRMLASAGELQKGNELALPSKYVNFLYLASHYEKLKGSPEDNEQKQLFVEQHKHYLDEIIEQISEFSKRVILADANLDKVLSAYNKHRDKPIREQAENIIHLFTLTNLGAPAAFKYFDTTIDRKRYTSTKEVLDATLIHQSITGLYETRIDLSQLGGDGGGGSGGSGGSGGTAPLEEEYRLFLEAPIQNVTLLEQWKREIPKVWAEINPPGLASTQAPIHVQLLSTALPVRVRQYPITLEAKRSLRETIRKFRAAGILRPVHSPWNTPLLPVRKSGTSEYRMVQDLREVNKRVETIHPTVPNPYTLLSLLPPDRIWYSVLDLKDAFFCIPLAPESQLIFAFEWADAEEGESGQLTWTRLPQGFKNSPTLFNEALNRDLQGFRLDHPSVSLLQYVDDLLIAADTQAACLSATRDLLMTLAELGYRVSGKKAQLCQEEVTYLGFKIHKGSRSLSNSRTQAILQIPVPKTKRQVREFLGKIGYCRLFIPGFAELAQPLYAATRPGNDPLVWGEKEEEAFQSLKLALTQPPALALPSLDKPFQLFVEETSGAAKGVLTQALGPWKRPVAYLSKRLDPVAAGWPRCLRAIAAAALLTREASKLTFGQDIEITSSHNLESLLRSPPDKWLTNARITQYQVLLLDPPRVRFKQTAALNPATLLPETDDTLPIHHCLDTLDSLTSTRPDLTDQPLAQAEATLFTDGSSYIRDGKRYAGAAVVTLDSVIWAEPLPIGTSAQKAELIALTKALEWSKDKSVNIYTDSRYAFATLHVHGMIYRERGWLTAGGKAIKNAPEILALLTAVWLPKRVAVMHCKGHQKDDAPTSTGNRRADEVAREVAIRPLSTQATISAGKRTADGSEFEKRTADGSEFESPKKKAKVE

SEQ ID NO: 4502 - protein, 2098 aa, synthetic construct
MPAAKRVKLDGGDKKYSIGLDIGTNSVGWAVITDEYKVPSKKFKVLGNTDRHSIKKNLIGALLFDSGETAEATRLKRTARRRYTRRKNRICYLQEIFSNEMAKVDDSFFHRLEESFLVEEDKKHERHPIFGNIVDEVAYHEKYPTIYHLRKKLVDSTDKADLRLIYLALAHMIKFRGHFLIEGDLNPDNSDVDKLFIQLVQTYNQLFEENPINASGVDAKAILSARLSKSRRLENLIAQLPGEKKNGLFGNLIALSLGLTPNFKSNFDLAEDAKLQLSKDTYDDDLDNLLAQIGDQYADLFLAAKNLSDAILLSDILRVNTEITKAPLSASMIKRYDEHHQDLTLLKALVRQQLPEKYKEIFFDQSKNGYAGYIDGGASQEEFYKFIKPILEKMDGTEELLVKLNREDLLRKQRTFDNGSIPHQIHLGELHAILRRQEDFYPFLKDNREKIEKILTFRIPYYVGPLARGNSRFAWMTRKSEETITPWNFEEVVDKGASAQSFIERMTNFDKNLPNEKVLPKHSLLYEYFTVYNELTKVKYVTEGMRKPAFLSGEQKKAIVDLLFKTNRKVTVKQLKEDYFKKIECFDSVEISGVEDRFNASLGTYHDLLKIIKDKDFLDNEENEDILEDIVLTLTLFEDREMIEERLKTYAHLFDDKVMKQLKRRRYTGWGRLSRKLINGIRDKQSGKTILDFLKSDGFANRNFMQLIHDDSLTFKEDIQKAQVSGQGDSLHEHIANLAGSPAIKKGILQTVKVVDELVKVMGRHKPENIVIEMARENQTTQKGQKNSRERMKRIEEGIKELGSQILKEHPVENTQLQNEKLYLYYLQNGRDMYVDQELDINRLSDYDVDHIVPQSFLKDDSIDNKVLTRSDKARGKSDNVPSEEVVKKMKNYWRQLLNAKLITQRKFDNLTKAERGGLSELDKAGFIKRQLVETRQITKHVAQILDSRMNTKYDENDKLIREVKVITLKSKLVSDFRKDFQFYKVREINNYHHAHDAYLNAVVGTALIKKYPKLESEFVYGDYKVYDVRKMIAKSEQEIGKATAKYFFYSNIMNFFKTEITLANGEIRKRPLIETNGETGEIVWDKGRDFATVRKVLSMPQVNIVKKTEVQTGGFSKESILPKRNSDKLIARKKDWDPKKYGGFDSPTVAYSVLVVAKVEKGKSKKLKSVKELLGITIMERSSFEKNPIDFLEAKGYKEVKKDLIIKLPKYSLFELENGRKRMLASAGELQKGNELALPSKYVNFLYLASHYEKLKGSPEDNEQKQLFVEQHKHYLDEIIEQISEFSKRVILADANLDKVLSAYNKHRDKPIREQAENIIHLFTLTNLGAPAAFKYFDTTIDRKRYTSTKEVLDATLIHQSITGLYETRIDLSQLGGDGGGGSGGSGGSGGSGGSGGVLNLEEEYRLHEKPVPSSIDPSWLQLFPTVWAERAGMGLANQVPPVVVELRSGASPVAVRQYPMSKEAREGIRPHIQRFLDLGVLVPCQSPWNTPLLPVKKPGTNDYRPVQDLREINKRVQDIHPTVPNPYNLLSSLPPSHTWYSVLDLKDAFFCLKLHPNSQPLFAFEWRDPEKGNTGQLTWTRLPQGFKNSPTLFNEALHRDLAPFRALNPQVVLLQYVDDLLVAAPTYRDCKEGTQKLLQELSKLGYRVSAKKAQLCQKEVTYLGYLLKEGKRWLTPARKATVMKIPPPTTPRQVREFLGTAGFCRLWIPGFASLAAPLYPLTKPSIPFIWTEEHQKAFDRIKEALLSAPALALPDLTKPFTLYVDERAGVARGVLTQTLGPWRRPVAYLSKKLDPVASGWPTCLKAVAAVALLLKDADKLTLGQNVTVIASHSLESIVRQPPDRWMTNARMTHYQSLLLNERVSFAPPAVLNPATLLPVESEATPVHRCSEILAEETGTRRDLKDQPLPGVPAWYTDGSSFIAEGKRRAGAAIVDGKRTVWASSLPEGTSAQKAELVALTQALRLAEGKDINIYTDSRYAFATAHIHGAIYKQRGWLTSAGKDIKNKEEILALLEAIHLPKRVAIIHCPGHQKGNDPVATGNRRADEAAKQAALSTRVLAETTKPAGKRTADGSEFEKRTADGSEFESPKKKAKVE

SEQ ID NO: 4503 - protein, 2103 aa, synthetic construct
MPAAKRVKLDGGDKKYSIGLDIGTNSVGWAVITDEYKVPSKKFKVLGNTDRHSIKKNLIGALLFDSGETAEATRLKRTARRRYTRRKNRICYLQEIFSNEMAKVDDSFFHRLEESFLVEEDKKHERHPIFGNIVDEVAYHEKYPTIYHLRKKLVDSTDKADLRLIYLALAHMIKFRGHFLIEGDLNPDNSDVDKLFIQLVQTYNQLFEENPINASGVDAKAILSARLSKSRRLENLIAQLPGEKKNGLFGNLIALSLGLTPNFKSNFDLAEDAKLQLSKDTYDDDLDNLLAQIGDQYADLFLAAKNLSDAILLSDILRVNTEITKAPLSASMIKRYDEHHQDLTLLKALVRQQLPEKYKEIFFDQSKNGYAGYIDGGASQEEFYKFIKPILEKMDGTEELLVKLNREDLLRKQRTFDNGSIPHQIHLGELHAILRRQEDFYPFLKDNREKIEKILTFRIPYYVGPLARGNSRFAWMTRKSEETITPWNFEEVVDKGASAQSFIERMTNFDKNLPNEKVLPKHSLLYEYFTVYNELTKVKYVTEGMRKPAFLSGEQKKAIVDLLFKTNRKVTVKQLKEDYFKKIECFDSVEISGVEDRFNASLGTYHDLLKIIKDKDFLDNEENEDILEDIVLTLTLFEDREMIEERLKTYAHLFDDKVMKQLKRRRYTGWGRLSRKLINGIRDKQSGKTILDFLKSDGFANRNFMQLIHDDSLTFKEDIQKAQVSGQGDSLHEHIANLAGSPAIKKGILQTVKVVDELVKVMGRHKPENIVIEMARENQTTQKGQKNSRERMKRIEEGIKELGSQILKEHPVENTQLQNEKLYLYYLQNGRDMYVDQELDINRLSDYDVDHIVPQSFLKDDSIDNKVLTRSDKARGKSDNVPSEEVVKKMKNYWRQLLNAKLITQRKFDNLTKAERGGLSELDKAGFIKRQLVETRQITKHVAQILDSRMNTKYDENDKLIREVKVITLKSKLVSDFRKDFQFYKVREINNYHHAHDAYLNAVVGTALIKKYPKLESEFVYGDYKVYDVRKMIAKSEQEIGKATAKYFFYSNIMNFFKTEITLANGEIRKRPLIETNGETGEIVWDKGRDFATVRKVLSMPQVNIVKKTEVQTGGFSKESILPKRNSDKLIARKKDWDPKKYGGFDSPTVAYSVLVVAKVEKGKSKKLKSVKELLGITIMERSSFEKNPIDFLEAKGYKEVKKDLIIKLPKYSLFELENGRKRMLASAGELQKGNELALPSKYVNFLYLASHYEKLKGSPEDNEQKQLFVEQHKHYLDEIIEQISEFSKRVILADANLDKVLSAYNKHRDKPIREQAENIIHLFTLTNLGAPAAFKYFDTTIDRKRYTSTKEVLDATLIHQSITGLYETRIDLSQLGGDGGGGSGGSGGSGGSGGSGGSGGLGIEDEYRLHETSTEPDVSLGSTWLSDFPQAWAETGGMGLAVRQAPLIIPLKATSTPVSIQQYPMSHEARLGIKPHIQRLLDQGILVPCQSPWNTPLLPVKKPGTNDYRPVQDLREVNKRVEDIHPTVPNPYNLLSGLPPSHQWYTVLDLKDAFFCLRLHPTSQPLFAFEWRDPGMGISGQLTWTRLPQGFKNSPTLFNEALHRDLADFRIQHPDLILLQYVDDILLAATSELDCQQGTRALLQTLGDLGYRASAKKAQICQKQVKYLGYLLREGQRWLTEARKETVMGQPVPKTPRQLREFLGKAGFCRLFIPGFAEMAAPLYPLTKPGTLFSWGPDQQKAYQEIKQALLTAPALGLPDLTKPFELFVDEKQGYAKGVLTQKLGPWRRPVAYLSKKLDPVAAGWPPCLRMVAAIAVLTKDAGKLTMGQPLVILAPHAVEALVKQPPDRWLSNARMTHYQAMLLDTDRVQFGPVVALNPATLLPLPEEGAPHDCLEILAETHGTRPDLTDQPIPDADHTWYTDGSSFLQEGQRKAGAAVTTETEVIWAGALPAGTSAQRAELIALTQALKMAEGKRLNVYTDSRYAFATAHIHGEIYRRRGWLTSEGREIKNKSEILALLKALFLPKRLSIIHCLGHQKGDSAEARGNRLADQAAREAAIKTPPDTSTLLIAGKRTADGSEFEKRTADGSEFESPKKKAKVE

SEQ ID NO: 4504 - protein, 2110 aa, synthetic construct
MPAAKRVKLDGGDKKYSIGLDIGTNSVGWAVITDEYKVPSKKFKVLGNTDRHSIKKNLIGALLFDSGETAEATRLKRTARRRYTRRKNRICYLQEIFSNEMAKVDDSFFHRLEESFLVEEDKKHERHPIFGNIVDEVAYHEKYPTIYHLRKKLVDSTDKADLRLIYLALAHMIKFRGHFLIEGDLNPDNSDVDKLFIQLVQTYNQLFEENPINASGVDAKAILSARLSKSRRLENLIAQLPGEKKNGLFGNLIALSLGLTPNFKSNFDLAEDAKLQLSKDTYDDDLDNLLAQIGDQYADLFLAAKNLSDAILLSDILRVNTEITKAPLSASMIKRYDEHHQDLTLLKALVRQQLPEKYKEIFFDQSKNGYAGYIDGGASQEEFYKFIKPILEKMDGTEELLVKLNREDLLRKQRTFDNGSIPHQIHLGELHAILRRQEDFYPFLKDNREKIEKILTFRIPYYVGPLARGNSRFAWMTRKSEETITPWNFEEVVDKGASAQSFIERMTNFDKNLPNEKVLPKHSLLYEYFTVYNELTKVKYVTEGMRKPAFLSGEQKKAIVDLLFKTNRKVTVKQLKEDYFKKIECFDSVEISGVEDRFNASLGTYHDLLKIIKDKDFLDNEENEDILEDIVLTLTLFEDREMIEERLKTYAHLFDDKVMKQLKRRRYTGWGRLSRKLINGIRDKQSGKTILDFLKSDGFANRNFMQLIHDDSLTFKEDIQKAQVSGQGDSLHEHIANLAGSPAIKKGILQTVKVVDELVKVMGRHKPENIVIEMARENQTTQKGQKNSRERMKRIEEGIKELGSQILKEHPVENTQLQNEKLYLYYLQNGRDMYVDQELDINRLSDYDVDHIVPQSFLKDDSIDNKVLTRSDKARGKSDNVPSEEVVKKMKNYWRQLLNAKLITQRKFDNLTKAERGGLSELDKAGFIKRQLVETRQITKHVAQILDSRMNTKYDENDKLIREVKVITLKSKLVSDFRKDFQFYKVREINNYHHAHDAYLNAVVGTALIKKYPKLESEFVYGDYKVYDVRKMIAKSEQEIGKATAKYFFYSNIMNFFKTEITLANGEIRKRPLIETNGETGEIVWDKGRDFATVRKVLSMPQVNIVKKTEVQTGGFSKESILPKRNSDKLIARKKDWDPKKYGGFDSPTVAYSVLVVAKVEKGKSKKLKSVKELLGITIMERSSFEKNPIDFLEAKGYKEVKKDLIIKLPKYSLFELENGRKRMLASAGELQKGNELALPSKYVNFLYLASHYEKLKGSPEDNEQKQLFVEQHKHYLDEIIEQISEFSKRVILADANLDKVLSAYNKHRDKPIREQAENIIHLFTLTNLGAPAAFKYFDTTIDRKRYTSTKEVLDATLIHQSITGLYETRIDLSQLGGDGGGGGGSGGGGSGGGGSGGGGSGGGGSGGTLNIEDEHRLHETSKEPDVSLGSTWLSDFPQAWAETGGMGLAVRQAPLIIPLKATSTPVSIKQYPMSQEARLGIKPHIQRLLDQGILVPCQSPWNTPLLPVKKPGTNDYRPVQDLREVNKRVEDIHPTVPNPYNLLSGLPPSHQWYTVLDLKDAFFCLRLHPTSQPLFAFEWRDPEMGISGQLTWTRLPQGFKNSPTLFNEALHRDLADFRIQHPDLILLQYVDDLLLAATSELDCQQGTRALLQTLGNLGYRASAKKAQICQKQVKYLGYLLKEGQRWLTEARKETVMGQPTPKTPRQLREFLGKAGFCRLFIPGFAEMAAPLYPLTKPGTLFNWGPDQQKAYQEIKQALLTAPALGLPDLTKPFELFVDEKQGYAKGVLTQKLGPWRRPVAYLSKKLDPVAAGWPPCLRMVAAIAVLTKDAGKLTMGQPLVILAPHAVEALVKQPPDRWLSNARMTHYQALLLDTDRVQFGPVVALNPATLLPLPEEGLQHNCLDILAEAHGTRPDLTDQPLPDADHTWYTDGSSLLQEGQRKAGAAVTTETEVIWAKALPAGTSAQRAELIALTQALKMAEGKKLNVYTDSRYAFATAHIHGEIYRRRGWLTSEGKEIKNKDEILALLKALFLPKRLSIIHCPGHQKGHSAEARGNRMADQAARKAAITETPDTSTLLAGKRTADGSEFEKRTADGSEFESPKKKAKVE

SEQ ID NO: 4505 - protein, 2094 aa, synthetic construct
MPAAKRVKLDGGDKKYSIGLDIGTNSVGWAVITDEYKVPSKKFKVLGNTDRHSIKKNLIGALLFDSGETAEATRLKRTARRRYTRRKNRICYLQEIFSNEMAKVDDSFFHRLEESFLVEEDKKHERHPIFGNIVDEVAYHEKYPTIYHLRKKLVDSTDKADLRLIYLALAHMIKFRGHFLIEGDLNPDNSDVDKLFIQLVQTYNQLFEENPINASGVDAKAILSARLSKSRRLENLIAQLPGEKKNGLFGNLIALSLGLTPNFKSNFDLAEDAKLQLSKDTYDDDLDNLLAQIGDQYADLFLAAKNLSDAILLSDILRVNTEITKAPLSASMIKRYDEHHQDLTLLKALVRQQLPEKYKEIFFDQSKNGYAGYIDGGASQEEFYKFIKPILEKMDGTEELLVKLNREDLLRKQRTFDNGSIPHQIHLGELHAILRRQEDFYPFLKDNREKIEKILTFRIPYYVGPLARGNSRFAWMTRKSEETITPWNFEEVVDKGASAQSFIERMTNFDKNLPNEKVLPKHSLLYEYFTVYNELTKVKYVTEGMRKPAFLSGEQKKAIVDLLFKTNRKVTVKQLKEDYFKKIECFDSVEISGVEDRFNASLGTYHDLLKIIKDKDFLDNEENEDILEDIVLTLTLFEDREMIEERLKTYAHLFDDKVMKQLKRRRYTGWGRLSRKLINGIRDKQSGKTILDFLKSDGFANRNFMQLIHDDSLTFKEDIQKAQVSGQGDSLHEHIANLAGSPAIKKGILQTVKVVDELVKVMGRHKPENIVIEMARENQTTQKGQKNSRERMKRIEEGIKELGSQILKEHPVENTQLQNEKLYLYYLQNGRDMYVDQELDINRLSDYDVDHIVPQSFLKDDSIDNKVLTRSDKARGKSDNVPSEEVVKKMKNYWRQLLNAKLITQRKFDNLTKAERGGLSELDKAGFIKRQLVETRQITKHVAQILDSRMNTKYDENDKLIREVKVITLKSKLVSDFRKDFQFYKVREINNYHHAHDAYLNAVVGTALIKKYPKLESEFVYGDYKVYDVRKMIAKSEQEIGKATAKYFFYSNIMNFFKTEITLANGEIRKRPLIETNGETGEIVWDKGRDFATVRKVLSMPQVNIVKKTEVQTGGFSKESILPKRNSDKLIARKKDWDPKKYGGFDSPTVAYSVLVVAKVEKGKSKKLKSVKELLGITIMERSSFEKNPIDFLEAKGYKEVKKDLIIKLPKYSLFELENGRKRMLASAGELQKGNELALPSKYVNFLYLASHYEKLKGSPEDNEQKQLFVEQHKHYLDEIIEQISEFSKRVILADANLDKVLSAYNKHRDKPIREQAENIIHLFTLTNLGAPAAFKYFDTTIDRKRYTSTKEVLDATLIHQSITGLYETRIDLSQLGGDGGGSSGSSGSSGGTLNIEDEHRLHETSKEPDVSLGSTWLSDFPQAWAETGGMGLAVRQAPLIIPLKATSTPVSIKQYPMSQEARLGIKPHIQRLLDQGILVPCQSPWNTPLLPVKKPGTNDYRPVQDLREVNKRVEDIHPTVPNPYNLLSGLPPSHQWYTVLDLKDAFFCLRLHPTSQPLFAFEWRDPEMGISGQLTWTRLPQGFKNSPTLFNEALHRDLADFRIQHPDLILLQYVDDLLLAATSELDCQQGTRALLQTLGNLGYRASAKKAQICQKQVKYLGYLLKEGQRWLTEARKETVMGQPTPKTPRQLREFLGTAGFCRLWIPGFAEMAAPLYPLTKPGTLFNWGPDQQKAYQEIKQALLTAPALGLPDLTKPFELFVDEKQGYAKGVLTQKLGPWRRPVAYLSKKLDPVAAGWPPCLRMVAAIAVLTKDAGKLTMGQPLVILAPHAVEALVKQPPDRWLSNARMTHYQALLLDTDRVQFGPVVALNPATLLPLPEEGLQHNCLDILAEAHGTRPDLTDQPLPDADHTWYTDGSSLLQEGQRKAGAAVTTETEVIWAKALPAGTSAQRAELIALTQALKMAEGKKLNVYTDSRYAFATAHIHGEIYRRRGWLTSEGKEIKNKDEILALLKALFLPKRLSIIHCPGHQKGHSAEARGNRMADQAARKAAITETPDTSTLLAGKRTADGSEFEKRTADGSEFESPKKKAKVE

SEQ ID NO: 4506 - protein, 2100 aa, synthetic construct
MPAAKRVKLDGGDKKYSIGLDIGTNSVGWAVITDEYKVPSKKFKVLGNTDRHSIKKNLIGALLFDSGETAEATRLKRTARRRYTRRKNRICYLQEIFSNEMAKVDDSFFHRLEESFLVEEDKKHERHPIFGNIVDEVAYHEKYPTIYHLRKKLVDSTDKADLRLIYLALAHMIKFRGHFLIEGDLNPDNSDVDKLFIQLVQTYNQLFEENPINASGVDAKAILSARLSKSRRLENLIAQLPGEKKNGLFGNLIALSLGLTPNFKSNFDLAEDAKLQLSKDTYDDDLDNLLAQIGDQYADLFLAAKNLSDAILLSDILRVNTEITKAPLSASMIKRYDEHHQDLTLLKALVRQQLPEKYKEIFFDQSKNGYAGYIDGGASQEEFYKFIKPILEKMDGTEELLVKLNREDLLRKQRTFDNGSIPHQIHLGELHAILRRQEDFYPFLKDNREKIEKILTFRIPYYVGPLARGNSRFAWMTRKSEETITPWNFEEVVDKGASAQSFIERMTNFDKNLPNEKVLPKHSLLYEYFTVYNELTKVKYVTEGMRKPAFLSGEQKKAIVDLLFKTNRKVTVKQLKEDYFKKIECFDSVEISGVEDRFNASLGTYHDLLKIIKDKDFLDNEENEDILEDIVLTLTLFEDREMIEERLKTYAHLFDDKVMKQLKRRRYTGWGRLSRKLINGIRDKQSGKTILDFLKSDGFANRNFMQLIHDDSLTFKEDIQKAQVSGQGDSLHEHIANLAGSPAIKKGILQTVKVVDELVKVMGRHKPENIVIEMARENQTTQKGQKNSRERMKRIEEGIKELGSQILKEHPVENTQLQNEKLYLYYLQNGRDMYVDQELDINRLSDYDVDHIVPQSFLKDDSIDNKVLTRSDKARGKSDNVPSEEVVKKMKNYWRQLLNAKLITQRKFDNLTKAERGGLSELDKAGFIKRQLVETRQITKHVAQILDSRMNTKYDENDKLIREVKVITLKSKLVSDFRKDFQFYKVREINNYHHAHDAYLNAVVGTALIKKYPKLESEFVYGDYKVYDVRKMIAKSEQEIGKATAKYFFYSNIMNFFKTEITLANGEIRKRPLIETNGETGEIVWDKGRDFATVRKVLSMPQVNIVKKTEVQTGGFSKESILPKRNSDKLIARKKDWDPKKYGGFDSPTVAYSVLVVAKVEKGKSKKLKSVKELLGITIMERSSFEKNPIDFLEAKGYKEVKKDLIIKLPKYSLFELENGRKRMLASAGELQKGNELALPSKYVNFLYLASHYEKLKGSPEDNEQKQLFVEQHKHYLDEIIEQISEFSKRVILADANLDKVLSAYNKHRDKPIREQAENIIHLFTLTNLGAPAAFKYFDTTIDRKRYTSTKEVLDATLIHQSITGLYETRIDLSQLGGDGGEAAAKEAAAKEAAAKGGTLNIEDEYRLHETSKEPDVPLGSTWLSDFPQAWAETGGMGLAVRQAPLIIPLKATSTPVSIKQYPMSQEARLGIKPHIQRLLDQGILVPCQSPWNTPLLPVKKPGTNDYRPVQDLREVNKRVEDIHPTVPNPYNLLSGLPPSHQWYTVLDLKDAFFCLRLHPTSQPLFAFEWRDPEMGISGQLTWTRLPQGFKNSPTLFNEALHRDLADFRIQHPDLILLQYVDDLLLAATSEQDCQRGTRALLQTLGNLGYRASAKKAQICQKQVKYLGYLLKEGQRWLTEARKETVMGQPTPKTPRQLREFLGKAGFCRLFIPGFAEMAAPLYPLTKPGTLFNWGPDQQKAYQEIKQALLTAPALGLPDLTKPFELFVDEKQGYAKGVLTQKLGPWRRPVAYLSKKLDPVAAGWPPCLRMVAAIAVLTKDAGKLTMGQPLVILAPHAVEALVKQPPDRWLSNARMTHYQAMLLDTDRVQFGPVVALNPATLLPLPEKEAPHDCLEILAETHGTRPDLTDQPIPDADYTWYTDGSSFLQEGQRRAGAAVTTETEVIWARALPAGTSAQRAELIALTQALKMAEGKKLNVYTDSRYAFATAHVHGEIYRRRGWLTSEGREIKNKNEILALLKALFLPKRLSIIHCPGHQKGNSAEARGNRMADQAAREAAMKAVLETSTLLAGKRTADGSEFEKRTADGSEFESPKKKAKVE

SEQ ID NO: 4507 - protein, 2110 aa, synthetic construct
MPAAKRVKLDGGDKKYSIGLDIGTNSVGWAVITDEYKVPSKKFKVLGNTDRHSIKKNLIGALLFDSGETAEATRLKRTARRRYTRRKNRICYLQEIFSNEMAKVDDSFFHRLEESFLVEEDKKHERHPIFGNIVDEVAYHEKYPTIYHLRKKLVDSTDKADLRLIYLALAHMIKFRGHFLIEGDLNPDNSDVDKLFIQLVQTYNQLFEENPINASGVDAKAILSARLSKSRRLENLIAQLPGEKKNGLFGNLIALSLGLTPNFKSNFDLAEDAKLQLSKDTYDDDLDNLLAQIGDQYADLFLAAKNLSDAILLSDILRVNTEITKAPLSASMIKRYDEHHQDLTLLKALVRQQLPEKYKEIFFDQSKNGYAGYIDGGASQEEFYKFIKPILEKMDGTEELLVKLNREDLLRKQRTFDNGSIPHQIHLGELHAILRRQEDFYPFLKDNREKIEKILTFRIPYYVGPLARGNSRFAWMTRKSEETITPWNFEEVVDKGASAQSFIERMTNFDKNLPNEKVLPKHSLLYEYFTVYNELTKVKYVTEGMRKPAFLSGEQKKAIVDLLFKTNRKVTVKQLKEDYFKKIECFDSVEISGVEDRFNASLGTYHDLLKIIKDKDFLDNEENEDILEDIVLTLTLFEDREMIEERLKTYAHLFDDKVMKQLKRRRYTGWGRLSRKLINGIRDKQSGKTILDFLKSDGFANRNFMQLIHDDSLTFKEDIQKAQVSGQGDSLHEHIANLAGSPAIKKGILQTVKVVDELVKVMGRHKPENIVIEMARENQTTQKGQKNSRERMKRIEEGIKELGSQILKEHPVENTQLQNEKLYLYYLQNGRDMYVDQELDINRLSDYDVDHIVPQSFLKDDSIDNKVLTRSDKARGKSDNVPSEEVVKKMKNYWRQLLNAKLITQRKFDNLTKAERGGLSELDKAGFIKRQLVETRQITKHVAQILDSRMNTKYDENDKLIREVKVITLKSKLVSDFRKDFQFYKVREINNYHHAHDAYLNAVVGTALIKKYPKLESEFVYGDYKVYDVRKMIAKSEQEIGKATAKYFFYSNIMNFFKTEITLANGEIRKRPLIETNGETGEIVWDKGRDFATVRKVLSMPQVNIVKKTEVQTGGFSKESILPKRNSDKLIARKKDWDPKKYGGFDSPTVAYSVLVVAKVEKGKSKKLKSVKELLGITIMERSSFEKNPIDFLEAKGYKEVKKDLIIKLPKYSLFELENGRKRMLASAGELQKGNELALPSKYVNFLYLASHYEKLKGSPEDNEQKQLFVEQHKHYLDEIIEQISEFSKRVILADANLDKVLSAYNKHRDKPIREQAENIIHLFTLTNLGAPAAFKYFDTTIDRKRYTSTKEVLDATLIHQSITGLYETRIDLSQLGGDGGEAAAKEAAAKEAAAKEAAAKEAAAKGGTLNIEDEYRLHETSKEPDVSLGSTWLSDFPQAWAETGGMGLAVRQAPLIIPLKATSTPVSIKQYPMSQEARLGIKPHIQRLLDQGILVPCQSPWNTPLLPVKKPGTNDYRPVQDLREVNKRVEDIHPTVPNPYNLLSGLPPSHQWYTVLDLKDAFFCLRLHPTSQPLFAFEWRDPEMGISGQLTWTRLPQGFKNSPTLFNEALHRDLAGFRIQHPDLILLQYVDDLLLAATSELDCQQGTRALLQTLGDLGYRASAKKAQICQKQVKYLGYLLKEGQRWLTEARKETVMGQPIPKTPRQLREFLGTAGFCRLWIPGFAEMAAPLYPLTKPGTLFNWGPDQQKAFQEIKQALLTAPALGLPDLTKPFELFVDEKQGYAKGVLTQKLGPWRRPVAYLSKKLDPVAAGWPPCLRMVAAIAVLTKDAGKLTMGQPLVILAPHAVEALVKQPPDRWLSNARMTHYQALLLDTDRVQFGPVVALNPATLLPLPEEGLQHDCLDILAEAHGTRSDLMDQPLPDADHTWYTDGSSFLQEGQRKAGAAVTTETEVIWARALPAGTSAQRAELIALTQALKMAEGKKLNVYTDSRYAFATAHIHGEIYRRRGWLTSEGKEIKNKDEILALLKALFLPKRLSIIHCPGHQKGNSAEARGNRMADQAAREVATRETPETSTLLAGKRTADGSEFEKRTADGSEFESPKKKAKVE

SEQ ID NO: 4508 - protein, 2112 aa, synthetic construct
MPAAKRVKLDGGDKKYSIGLDIGTNSVGWAVITDEYKVPSKKFKVLGNTDRHSIKKNLIGALLFDSGETAEATRLKRTARRRYTRRKNRICYLQEIFSNEMAKVDDSFFHRLEESFLVEEDKKHERHPIFGNIVDEVAYHEKYPTIYHLRKKLVDSTDKADLRLIYLALAHMIKFRGHFLIEGDLNPDNSDVDKLFIQLVQTYNQLFEENPINASGVDAKAILSARLSKSRRLENLIAQLPGEKKNGLFGNLIALSLGLTPNFKSNFDLAEDAKLQLSKDTYDDDLDNLLAQIGDQYADLFLAAKNLSDAILLSDILRVNTEITKAPLSASMIKRYDEHHQDLTLLKALVRQQLPEKYKEIFFDQSKNGYAGYIDGGASQEEFYKFIKPILEKMDGTEELLVKLNREDLLRKQRTFDNGSIPHQIHLGELHAILRRQEDFYPFLKDNREKIEKILTFRIPYYVGPLARGNSRFAWMTRKSEETITPWNFEEVVDKGASAQSFIERMTNFDKNLPNEKVLPKHSLLYEYFTVYNELTKVKYVTEGMRKPAFLSGEQKKAIVDLLFKTNRKVTVKQLKEDYFKKIECFDSVEISGVEDRFNASLGTYHDLLKIIKDKDFLDNEENEDILEDIVLTLTLFEDREMIEERLKTYAHLFDDKVMKQLKRRRYTGWGRLSRKLINGIRDKQSGKTILDFLKSDGFANRNFMQLIHDDSLTFKEDIQKAQVSGQGDSLHEHIANLAGSPAIKKGILQTVKVVDELVKVMGRHKPENIVIEMARENQTTQKGQKNSRERMKRIEEGIKELGSQILKEHPVENTQLQNEKLYLYYLQNGRDMYVDQELDINRLSDYDVDHIVPQSFLKDDSIDNKVLTRSDKARGKSDNVPSEEVVKKMKNYWRQLLNAKLITQRKFDNLTKAERGGLSELDKAGFIKRQLVETRQITKHVAQILDSRMNTKYDENDKLIREVKVITLKSKLVSDFRKDFQFYKVREINNYHHAHDAYLNAVVGTALIKKYPKLESEFVYGDYKVYDVRKMIAKSEQEIGKATAKYFFYSNIMNFFKTEITLANGEIRKRPLIETNGETGEIVWDKGRDFATVRKVLSMPQVNIVKKTEVQTGGFSKESILPKRNSDKLIARKKDWDPKKYGGFDSPTVAYSVLVVAKVEKGKSKKLKSVKELLGITIMERSSFEKNPIDFLEAKGYKEVKKDLIIKLPKYSLFELENGRKRMLASAGELQKGNELALPSKYVNFLYLASHYEKLKGSPEDNEQKQLFVEQHKHYLDEIIEQISEFSKRVILADANLDKVLSAYNKHRDKPIREQAENIIHLFTLTNLGAPAAFKYFDTTIDRKRYTSTKEVLDATLIHQSITGLYETRIDLSQLGGDGGPAPAPAPGGTLNIEDEYRLHETSKEPDVSLGSTWLSDFPQAWAETGGMGLAVRQAPLIIPLKATSTPVSIKQYPMSQEARLGIKPHIQRLLDQGILVPCQSPWNTPLLPVKKPGTNDYRPVQDLREVNKRVEDIHPTVPNPYNLLSGLPPSHQWYTVLDLKDAFFCLRLHPTSQPLFAFEWRDPEMGISGQLTWTRLPQGFKNSPTLFNEALHRDLADFRIQHPDLILLQYVDDLLLAATSELDCQQGTRALLQTLGNLGYRASAKKAQICQKQVKYLGYLLKEGQRWLTEARKETVMGQPTPKTPRQLREFLGKAGFCRLFIPGFAEMAAPLYPLTKPGTLFNWGPDQQKAYQEIKQALLTAPALGLPDLTKPFELFVDEKQGYAKGVLTQKLGPWRRPVAYLSKKLDPVAAGWPPCLRMVAAIAVLTKDAGKLTMGQPLVILAPHAVEALVKQPPDRWLSNARMTHYQALLLDTDRVQFGPVVALNPATLLPLPEEGLQHNCLDILAEAHGTRPDLTDQPLPDADHTWYTDGSSLLQEGQRKAGAAVTTETEVIWAKALPAGTSAQRAELIALTQALKMAEGKKLNVYTDSRYAFATAHIHGEIYRRRGWLTSEGKEIKNKDEILALLKALFLPKRLSIIHCPGHQKGHSAEARGNRMADQAARKAAITETPDTSTLLIENSSPSGGSKRTADGSEFEAGKRTADGSEFEKRTADGSEFESPKKKAKVE

SEQ ID NO: 4509 - protein, 2096 aa, synthetic construct
MPAAKRVKLDGGDKKYSIGLDIGTNSVGWAVITDEYKVPSKKFKVLGNTDRHSIKKNLIGALLFDSGETAEATRLKRTARRRYTRRKNRICYLQEIFSNEMAKVDDSFFHRLEESFLVEEDKKHERHPIFGNIVDEVAYHEKYPTIYHLRKKLVDSTDKADLRLIYLALAHMIKFRGHFLIEGDLNPDNSDVDKLFIQLVQTYNQLFEENPINASGVDAKAILSARLSKSRRLENLIAQLPGEKKNGLFGNLIALSLGLTPNFKSNFDLAEDAKLQLSKDTYDDDLDNLLAQIGDQYADLFLAAKNLSDAILLSDILRVNTEITKAPLSASMIKRYDEHHQDLTLLKALVRQQLPEKYKEIFFDQSKNGYAGYIDGGASQEEFYKFIKPILEKMDGTEELLVKLNREDLLRKQRTFDNGSIPHQIHLGELHAILRRQEDFYPFLKDNREKIEKILTFRIPYYVGPLARGNSRFAWMTRKSEETITPWNFEEVVDKGASAQSFIERMTNFDKNLPNEKVLPKHSLLYEYFTVYNELTKVKYVTEGMRKPAFLSGEQKKAIVDLLFKTNRKVTVKQLKEDYFKKIECFDSVEISGVEDRFNASLGTYHDLLKIIKDKDFLDNEENEDILEDIVLTLTLFEDREMIEERLKTYAHLFDDKVMKQLKRRRYTGWGRLSRKLINGIRDKQSGKTILDFLKSDGFANRNFMQLIHDDSLTFKEDIQKAQVSGQGDSLHEHIANLAGSPAIKKGILQTVKVVDELVKVMGRHKPENIVIEMARENQTTQKGQKNSRERMKRIEEGIKELGSQILKEHPVENTQLQNEKLYLYYLQNGRDMYVDQELDINRLSDYDVDHIVPQSFLKDDSIDNKVLTRSDKARGKSDNVPSEEVVKKMKNYWRQLLNAKLITQRKFDNLTKAERGGLSELDKAGFIKRQLVETRQITKHVAQILDSRMNTKYDENDKLIREVKVITLKSKLVSDFRKDFQFYKVREINNYHHAHDAYLNAVVGTALIKKYPKLESEFVYGDYKVYDVRKMIAKSEQEIGKATAKYFFYSNIMNFFKTEITLANGEIRKRPLIETNGETGEIVWDKGRDFATVRKVLSMPQVNIVKKTEVQTGGFSKESILPKRNSDKLIARKKDWDPKKYGGFDSPTVAYSVLVVAKVEKGKSKKLKSVKELLGITIMERSSFEKNPIDFLEAKGYKEVKKDLIIKLPKYSLFELENGRKRMLASAGELQKGNELALPSKYVNFLYLASHYEKLKGSPEDNEQKQLFVEQHKHYLDEIIEQISEFSKRVILADANLDKVLSAYNKHRDKPIREQAENIIHLFTLTNLGAPAAFKYFDTTIDRKRYTSTKEVLDATLIHQSITGLYETRIDLSQLGGDGGPAPAPAPAPAPAPGGVLNLEEEYRLHEKPVPSSIDPSWLQLFPTVWAERAGMGLANQVPPVVVELRSGASPVAVRQYPMSKEAREGIRPHIQRFLDLGVLVPCQSPWNTPLLPVKKPGTNDYRPVQDLREINKRVQDIHPTVPNPYNLLSSLPPSHTWYSVLDLKDAFFCLKLHPNSQPLFAFEWRDPEKGNTGQLTWTRLPQGFKNSPTLFNEALHRDLAPFRALNPQVVLLQYVDDLLVAAPTYRDCKEGTQKLLQELSKLGYRVSAKKAQLCQKEVTYLGYLLKEGKRWLTPARKATVMKIPPPTTPRQVREFLGTAGFCRLWIPGFASLAAPLYPLTKPSIPFIWTEEHQKAFDRIKEALLSAPALALPDLTKPFTLYVDERAGVARGVLTQTLGPWRRPVAYLSKKLDPVASGWPTCLKAVAAVALLLKDADKLTLGQNVTVIASHSLESIVRQPPDRWMTNARMTHYQSLLLNERVSFAPPAVLNPATLLPVESEATPVHRCSEILAEETGTRRDLKDQPLPGVPAWYTDGSSFIAEGKRRAGAAIVDGKRTVWASSLPEGTSAQKAELVALTQALRLAEGKDINIYTDSRYAFATAHIHGAIYKQRGWLTSAGKDIKNKEEILALLEAIHLPKRVAIIHCPGHQKGNDPVATGNRRADEAAKQAALSTRVLAETTKPAGKRTADGSEFEKRTADGSEFESPKKKAKVE

SEQ ID NO: 4510 - protein, 2098 aa, synthetic construct
MPAAKRVKLDGGDKKYSIGLDIGTNSVGWAVITDEYKVPSKKFKVLGNTDRHSIKKNLIGALLFDSGETAEATRLKRTARRRYTRRKNRICYLQEIFSNEMAKVDDSFFHRLEESFLVEEDKKHERHPIFGNIVDEVAYHEKYPTIYHLRKKLVDSTDKADLRLIYLALAHMIKFRGHFLIEGDLNPDNSDVDKLFIQLVQTYNQLFEENPINASGVDAKAILSARLSKSRRLENLIAQLPGEKKNGLFGNLIALSLGLTPNFKSNFDLAEDAKLQLSKDTYDDDLDNLLAQIGDQYADLFLAAKNLSDAILLSDILRVNTEITKAPLSASMIKRYDEHHQDLTLLKALVRQQLPEKYKEIFFDQSKNGYAGYIDGGASQEEFYKFIKPILEKMDGTEELLVKLNREDLLRKQRTFDNGSIPHQIHLGELHAILRRQEDFYPFLKDNREKIEKILTFRIPYYVGPLARGNSRFAWMTRKSEETITPWNFEEVVDKGASAQSFIERMTNFDKNLPNEKVLPKHSLLYEYFTVYNELTKVKYVTEGMRKPAFLSGEQKKAIVDLLFKTNRKVTVKQLKEDYFKKIECFDSVEISGVEDRFNASLGTYHDLLKIIKDKDFLDNEENEDILEDIVLTLTLFEDREMIEERLKTYAHLFDDKVMKQLKRRRYTGWGRLSRKLINGIRDKQSGKTILDFLKSDGFANRNFMQLIHDDSLTFKEDIQKAQVSGQGDSLHEHIANLAGSPAIKKGILQTVKVVDELVKVMGRHKPENIVIEMARENQTTQKGQKNSRERMKRIEEGIKELGSQILKEHPVENTQLQNEKLYLYYLQNGRDMYVDQELDINRLSDYDVDHIVPQSFLKDDSIDNKVLTRSDKARGKSDNVPSEEVVKKMKNYWRQLLNAKLITQRKFDNLTKAERGGLSELDKAGFIKRQLVETRQITKHVAQILDSRMNTKYDENDKLIREVKVITLKSKLVSDFRKDFQFYKVREINNYHHAHDAYLNAVVGTALIKKYPKLESEFVYGDYKVYDVRKMIAKSEQEIGKATAKYFFYSNIMNFFKTEITLANGEIRKRPLIETNGETGEIVWDKGRDFATVRKVLSMPQVNIVKKTEVQTGGFSKESILPKRNSDKLIARKKDWDPKKYGGFDSPTVAYSVLVVAKVEKGKSKKLKSVKELLGITIMERSSFEKNPIDFLEAKGYKEVKKDLIIKLPKYSLFELENGRKRMLASAGELQKGNELALPSKYVNFLYLASHYEKLKGSPEDNEQKQLFVEQHKHYLDEIIEQISEFSKRVILADANLDKVLSAYNKHRDKPIREQAENIIHLFTLTNLGAPAAFKYFDTTIDRKRYTSTKEVLDATLIHQSITGLYETRIDLSQLGGDGGPAPAPAPAPAPAPGGTLNIEDEYRLHETSKEPDVPLGSTWLSDFPQAWAETGGMGLAVRQAPLIIPLKATSTPVSIKQYPMSQEARLGIKPHIQRLLDQGILVPCQSPWNTPLLPVKKPGTNDYRPVQDLREVNKRVEDIHPTVPNPYNLLSGLPPSHQWYTVLDLKDAFFCLRLHPTSQPLFAFEWRDPEMGISGQLTWTRLPQGFKNSPTLFNEALHRDLADFRIQHPDLILLQYVDDLLLAATSEQDCQRGTRALLQTLGNLGYRASAKKAQICQKQVKYLGYLLKEGQRWLTEARKETVMGQPTPKTPRQLREFLGTAGFCRLWIPGFAEMAAPLYPLTKPGTLFNWGPDQQKAYQEIKQALLTAPALGLPDLTKPFELFVDEKQGYAKGVLTQKLGPWRRPVAYLSKKLDPVAAGWPPCLRMVAAIAVLTKDAGKLTMGQPLVILAPHAVEALVKQPPDRWLSNARMTHYQAMLLDTDRVQFGPVVALNPATLLPLPEKEAPHDCLEILAETHGTRPDLTDQPIPDADYTWYTDGSSFLQEGQRRAGAAVTTETEVIWARALPAGTSAQRAELIALTQALKMAEGKKLNVYTDSRYAFATAHVHGEIYRRRGWLTSEGREIKNKNEILALLKALFLPKRLSIIHCPGHQKGNSAEARGNRMADQAAREAAMKAVLETSTLLAGKRTADGSEFEKRTADGSEFESPKKKAKVE

SEQ ID NO: 4511 - protein, 2091 aa, synthetic construct
MPAAKRVKLDGGDKKYSIGLDIGTNSVGWAVITDEYKVPSKKFKVLGNTDRHSIKKNLIGALLFDSGETAEATRLKRTARRRYTRRKNRICYLQEIFSNEMAKVDDSFFHRLEESFLVEEDKKHERHPIFGNIVDEVAYHEKYPTIYHLRKKLVDSTDKADLRLIYLALAHMIKFRGHFLIEGDLNPDNSDVDKLFIQLVQTYNQLFEENPINASGVDAKAILSARLSKSRRLENLIAQLPGEKKNGLFGNLIALSLGLTPNFKSNFDLAEDAKLQLSKDTYDDDLDNLLAQIGDQYADLFLAAKNLSDAILLSDILRVNTEITKAPLSASMIKRYDEHHQDLTLLKALVRQQLPEKYKEIFFDQSKNGYAGYIDGGASQEEFYKFIKPILEKMDGTEELLVKLNREDLLRKQRTFDNGSIPHQIHLGELHAILRRQEDFYPFLKDNREKIEKILTFRIPYYVGPLARGNSRFAWMTRKSEETITPWNFEEVVDKGASAQSFIERMTNFDKNLPNEKVLPKHSLLYEYFTVYNELTKVKYVTEGMRKPAFLSGEQKKAIVDLLFKTNRKVTVKQLKEDYFKKIECFDSVEISGVEDRFNASLGTYHDLLKIIKDKDFLDNEENEDILEDIVLTLTLFEDREMIEERLKTYAHLFDDKVMKQLKRRRYTGWGRLSRKLINGIRDKQSGKTILDFLKSDGFANRNFMQLIHDDSLTFKEDIQKAQVSGQGDSLHEHIANLAGSPAIKKGILQTVKVVDELVKVMGRHKPENIVIEMARENQTTQKGQKNSRERMKRIEEGIKELGSQILKEHPVENTQLQNEKLYLYYLQNGRDMYVDQELDINRLSDYDVDHIVPQSFLKDDSIDNKVLTRSDKARGKSDNVPSEEVVKKMKNYWRQLLNAKLITQRKFDNLTKAERGGLSELDKAGFIKRQLVETRQITKHVAQILDSRMNTKYDENDKLIREVKVITLKSKLVSDFRKDFQFYKVREINNYHHAHDAYLNAVVGTALIKKYPKLESEFVYGDYKVYDVRKMIAKSEQEIGKATAKYFFYSNIMNFFKTEITLANGEIRKRPLIETNGETGEIVWDKGRDFATVRKVLSMPQVNIVKKTEVQTGGFSKESILPKRNSDKLIARKKDWDPKKYGGFDSPTVAYSVLVVAKVEKGKSKKLKSVKELLGITIMERSSFEKNPIDFLEAKGYKEVKKDLIIKLPKYSLFELENGRKRMLASAGELQKGNELALPSKYVNFLYLASHYEKLKGSPEDNEQKQLFVEQHKHYLDEIIEQISEFSKRVILADANLDKVLSAYNKHRDKPIREQAENIIHLFTLTNLGAPAAFKYFDTTIDRKRYTSTKEVLDATLIHQSITGLYETRIDLSQLGGDGGGGGGGSGGLGIEDEYRLHETSTEPDVSLGSTWLSDFPQAWAETGGMGLAVRQAPLIIPLKATSTPVSIQQYPMSHEARLGIKPHIQRLLDQGILVPCQSPWNTPLLPVKKPGTNDYRPVQDLREVNKRVEDIHPTVPNPYNLLSGLPPSHQWYTVLDLKDAFFCLRLHPTSQPLFAFEWRDPGMGISGQLTWTRLPQGFKNSPTLFNEALHRDLADFRIQHPDLILLQYVDDILLAATSELDCQQGTRALLQTLGDLGYRASAKKAQICQKQVKYLGYLLREGQRWLTEARKETVMGQPVPKTPRQLREFLGKAGFCRLFIPGFAEMAAPLYPLTKPGTLFSWGPDQQKAYQEIKQALLTAPALGLPDLTKPFELFVDEKQGYAKGVLTQKLGPWRRPVAYLSKKLDPVAAGWPPCLRMVAAIAVLTKDAGKLTMGQPLVILAPHAVEALVKQPPDRWLSNARMTHYQAMLLDTDRVQFGPVVALNPATLLPLPEEGAPHDCLEILAETHGTRPDLTDQPIPDADHTWYTDGSSFLQEGQRKAGAAVTTETEVIWAGALPAGTSAQRAELIALTQALKMAEGKRLNVYTDSRYAFATAHIHGEIYRRRGWLTSEGREIKNKSEILALLKALFLPKRLSIIHCLGHQKGDSAEARGNRLADQAAREAAIKTPPDTSTLLIAGKRTADGSEFEKRTADGSEFESPKKKAKVE

SEQ ID NO: 4512 - protein, 2093 aa, synthetic construct
MPAAKRVKLDGGDKKYSIGLDIGTNSVGWAVITDEYKVPSKKFKVLGNTDRHSIKKNLIGALLFDSGETAEATRLKRTARRRYTRRKNRICYLQEIFSNEMAKVDDSFFHRLEESFLVEEDKKHERHPIFGNIVDEVAYHEKYPTIYHLRKKLVDSTDKADLRLIYLALAHMIKFRGHFLIEGDLNPDNSDVDKLFIQLVQTYNQLFEENPINASGVDAKAILSARLSKSRRLENLIAQLPGEKKNGLFGNLIALSLGLTPNFKSNFDLAEDAKLQLSKDTYDDDLDNLLAQIGDQYADLFLAAKNLSDAILLSDILRVNTEITKAPLSASMIKRYDEHHQDLTLLKALVRQQLPEKYKEIFFDQSKNGYAGYIDGGASQEEFYKFIKPILEKMDGTEELLVKLNREDLLRKQRTFDNGSIPHQIHLGELHAILRRQEDFYPFLKDNREKIEKILTFRIPYYVGPLARGNSRFAWMTRKSEETITPWNFEEVVDKGASAQSFIERMTNFDKNLPNEKVLPKHSLLYEYFTVYNELTKVKYVTEGMRKPAFLSGEQKKAIVDLLFKTNRKVTVKQLKEDYFKKIECFDSVEISGVEDRFNASLGTYHDLLKIIKDKDFLDNEENEDILEDIVLTLTLFEDREMIEERLKTYAHLFDDKVMKQLKRRRYTGWGRLSRKLINGIRDKQSGKTILDFLKSDGFANRNFMQLIHDDSLTFKEDIQKAQVSGQGDSLHEHIANLAGSPAIKKGILQTVKVVDELVKVMGRHKPENIVIEMARENQTTQKGQKNSRERMKRIEEGIKELGSQILKEHPVENTQLQNEKLYLYYLQNGRDMYVDQELDINRLSDYDVDHIVPQSFLKDDSIDNKVLTRSDKARGKSDNVPSEEVVKKMKNYWRQLLNAKLITQRKFDNLTKAERGGLSELDKAGFIKRQLVETRQITKHVAQILDSRMNTKYDENDKLIREVKVITLKSKLVSDFRKDFQFYKVREINNYHHAHDAYLNAVVGTALIKKYPKLESEFVYGDYKVYDVRKMIAKSEQEIGKATAKYFFYSNIMNFFKTEITLANGEIRKRPLIETNGETGEIVWDKGRDFATVRKVLSMPQVNIVKKTEVQTGGFSKESILPKRNSDKLIARKKDWDPKKYGGFDSPTVAYSVLVVAKVEKGKSKKLKSVKELLGITIMERSSFEKNPIDFLEAKGYKEVKKDLIIKLPKYSLFELENGRKRMLASAGELQKGNELALPSKYVNFLYLASHYEKLKGSPEDNEQKQLFVEQHKHYLDEIIEQISEFSKRVILADANLDKVLSAYNKHRDKPIREQAENIIHLFTLTNLGAPAAFKYFDTTIDRKRYTSTKEVLDATLIHQSITGLYETRIDLSQLGGDGGEAAAKGSSGGLGIEDEYRLHETSTEPDVSLGSTWLSDFPQAWAETGGMGLAVRQAPLIIPLKATSTPVSIQQYPMSHEARLGIKPHIQRLLDQGILVPCQSPWNTPLLPVKKPGTNDYRPVQDLREVNKRVEDIHPTVPNPYNLLSGLPPSHQWYTVLDLKDAFFCLRLHPTSQPLFAFEWRDPGMGISGQLTWTRLPQGFKNSPTLFNEALHRDLADFRIQHPDLILLQYVDDILLAATSELDCQQGTRALLQTLGDLGYRASAKKAQICQKQVKYLGYLLREGQRWLTEARKETVMGQPVPKTPRQLREFLGKAGFCRLFIPGFAEMAAPLYPLTKPGTLFSWGPDQQKAYQEIKQALLTAPALGLPDLTKPFELFVDEKQGYAKGVLTQKLGPWRRPVAYLSKKLDPVAAGWPPCLRMVAAIAVLTKDAGKLTMGQPLVILAPHAVEALVKQPPDRWLSNARMTHYQAMLLDTDRVQFGPVVALNPATLLPLPEEGAPHDCLEILAETHGTRPDLTDQPIPDADHTWYTDGSSFLQEGQRKAGAAVTTETEVIWAGALPAGTSAQRAELIALTQALKMAEGKRLNVYTDSRYAFATAHIHGEIYRRRGWLTSEGREIKNKSEILALLKALFLPKRLSIIHCLGHQKGDSAEARGNRLADQAAREAAIKTPPDTSTLLIAGKRTADGSEFEKRTADGSEFESPKKKAKVE

SEQ ID NO: 4513 - protein, 2091 aa, synthetic construct
MPAAKRVKLDGGDKKYSIGLDIGTNSVGWAVITDEYKVPSKKFKVLGNTDRHSIKKNLIGALLFDSGETAEATRLKRTARRRYTRRKNRICYLQEIFSNEMAKVDDSFFHRLEESFLVEEDKKHERHPIFGNIVDEVAYHEKYPTIYHLRKKLVDSTDKADLRLIYLALAHMIKFRGHFLIEGDLNPDNSDVDKLFIQLVQTYNQLFEENPINASGVDAKAILSARLSKSRRLENLIAQLPGEKKNGLFGNLIALSLGLTPNFKSNFDLAEDAKLQLSKDTYDDDLDNLLAQIGDQYADLFLAAKNLSDAILLSDILRVNTEITKAPLSASMIKRYDEHHQDLTLLKALVRQQLPEKYKEIFFDQSKNGYAGYIDGGASQEEFYKFIKPILEKMDGTEELLVKLNREDLLRKQRTFDNGSIPHQIHLGELHAILRRQEDFYPFLKDNREKIEKILTFRIPYYVGPLARGNSRFAWMTRKSEETITPWNFEEVVDKGASAQSFIERMTNFDKNLPNEKVLPKHSLLYEYFTVYNELTKVKYVTEGMRKPAFLSGEQKKAIVDLLFKTNRKVTVKQLKEDYFKKIECFDSVEISGVEDRFNASLGTYHDLLKIIKDKDFLDNEENEDILEDIVLTLTLFEDREMIEERLKTYAHLFDDKVMKQLKRRRYTGWGRLSRKLINGIRDKQSGKTILDFLKSDGFANRNFMQLIHDDSLTFKEDIQKAQVSGQGDSLHEHIANLAGSPAIKKGILQTVKVVDELVKVMGRHKPENIVIEMARENQTTQKGQKNSRERMKRIEEGIKELGSQILKEHPVENTQLQNEKLYLYYLQNGRDMYVDQELDINRLSDYDVDHIVPQSFLKDDSIDNKVLTRSDKARGKSDNVPSEEVVKKMKNYWRQLLNAKLITQRKFDNLTKAERGGLSELDKAGFIKRQLVETRQITKHVAQILDSRMNTKYDENDKLIREVKVITLKSKLVSDFRKDFQFYKVREINNYHHAHDAYLNAVVGTALIKKYPKLESEFVYGDYKVYDVRKMIAKSEQEIGKATAKYFFYSNIMNFFKTEITLANGEIRKRPLIETNGETGEIVWDKGRDFATVRKVLSMPQVNIVKKTEVQTGGFSKESILPKRNSDKLIARKKDWDPKKYGGFDSPTVAYSVLVVAKVEKGKSKKLKSVKELLGITIMERSSFEKNPIDFLEAKGYKEVKKDLIIKLPKYSLFELENGRKRMLASAGELQKGNELALPSKYVNFLYLASHYEKLKGSPEDNEQKQLFVEQHKHYLDEIIEQISEFSKRVILADANLDKVLSAYNKHRDKPIREQAENIIHLFTLTNLGAPAAFKYFDTTIDRKRYTSTKEVLDATLIHQSITGLYETRIDLSQLGGDGGPAPGSSGGTLNIEDEHRLHETSKEPDVSLGSTWLSDFPQAWAETGGMGLAVRQAPLIIPLKATSTPVSIKQYPMSQEARLGIKPHIQRLLDQGILVPCQSPWNTPLLPVKKPGTNDYRPVQDLREVNKRVEDIHPTVPNPYNLLSGLPPSHQWYTVLDLKDAFFCLRLHPTSQPLFAFEWRDPEMGISGQLTWTRLPQGFKNSPTLFNEALHRDLADFRIQHPDLILLQYVDDLLLAATSELDCQQGTRALLQTLGNLGYRASAKKAQICQKQVKYLGYLLKEGQRWLTEARKETVMGQPTPKTPRQLREFLGKAGFCRLFIPGFAEMAAPLYPLTKPGTLFNWGPDQQKAYQEIKQALLTAPALGLPDLTKPFELFVDEKQGYAKGVLTQKLGPWRRPVAYLSKKLDPVAAGWPPCLRMVAAIAVLTKDAGKLTMGQPLVILAPHAVEALVKQPPDRWLSNARMTHYQALLLDTDRVQFGPVVALNPATLLPLPEEGLQHNCLDILAEAHGTRPDLTDQPLPDADHTWYTDGSSLLQEGQRKAGAAVTTETEVIWAKALPAGTSAQRAELIALTQALKMAEGKKLNVYTDSRYAFATAHIHGEIYRRRGWLTSEGKEIKNKDEILALLKALFLPKRLSIIHCPGHQKGHSAEARGNRMADQAARKAAITETPDTSTLLAGKRTADGSEFEKRTADGSEFESPKKKAKVE

SEQ ID NO: 4514 - protein, 2091 aa, synthetic construct; identical to SEQ ID NO: 4513

SEQ ID NO: 4515 - protein, 2091 aa, synthetic construct
MPAAKRVKLDGGDKKYSIGLDIGTNSVGWAVITDEYKVPSKKFKVLGNTDRHSIKKNLIGALLFDSGETAEATRLKRTARRRYTRRKNRICYLQEIFSNEMAKVDDSFFHRLEESFLVEEDKKHERHPIFGNIVDEVAYHEKYPTIYHLRKKLVDSTDKADLRLIYLALAHMIKFRGHFLIEGDLNPDNSDVDKLFIQLVQTYNQLFEENPINASGVDAKAILSARLSKSRRLENLIAQLPGEKKNGLFGNLIALSLGLTPNFKSNFDLAEDAKLQLSKDTYDDDLDNLLAQIGDQYADLFLAAKNLSDAILLSDILRVNTEITKAPLSASMIKRYDEHHQDLTLLKALVRQQLPEKYKEIFFDQSKNGYAGYIDGGASQEEFYKFIKPILEKMDGTEELLVKLNREDLLRKQRTFDNGSIPHQIHLGELHAILRRQEDFYPFLKDNREKIEKILTFRIPYYVGPLARGNSRFAWMTRKSEETITPWNFEEVVDKGASAQSFIERMTNFDKNLPNEKVLPKHSLLYEYFTVYNELTKVKYVTEGMRKPAFLSGEQKKAIVDLLFKTNRKVTVKQLKEDYFKKIECFDSVEISGVEDRFNASLGTYHDLLKIIKDKDFLDNEENEDILEDIVLTLTLFEDREMIEERLKTYAHLFDDKVMKQLKRRRYTGWGRLSRKLINGIRDKQSGKTILDFLKSDGFANRNFMQLIHDDSLTFKEDIQKAQVSGQGDSLHEHIANLAGSPAIKKGILQTVKVVDELVKVMGRHKPENIVIEMARENQTTQKGQKNSRERMKRIEEGIKELGSQILKEHPVENTQLQNEKLYLYYLQNGRDMYVDQELDINRLSDYDVDHIVPQSFLKDDSIDNKVLTRSDKARGKSDNVPSEEVVKKMKNYWRQLLNAKLITQRKFDNLTKAERGGLSELDKAGFIKRQLVETRQITKHVAQILDSRMNTKYDENDKLIREVKVITLKSKLVSDFRKDFQFYKVREINNYHHAHDAYLNAVVGTALIKKYPKLESEFVYGDYKVYDVRKMIAKSEQEIGKATAKYFFYSNIMNFFKTEITLANGEIRKRPLIETNGETGEIVWDKGRDFATVRKVLSMPQVNIVKKTEVQTGGFSKESILPKRNSDKLIARKKDWDPKKYGGFDSPTVAYSVLVVAKVEKGKSKKLKSVKELLGITIMERSSFEKNPIDFLEAKGYKEVKKDLIIKLPKYSLFELENGRKRMLASAGELQKGNELALPSKYVNFLYLASHYEKLKGSPEDNEQKQLFVEQHKHYLDEIIEQISEFSKRVILADANLDKVLSAYNKHRDKPIREQAENIIHLFTLTNLGAPAAFKYFDTTIDRKRYTSTKEVLDATLIHQSITGLYETRIDLSQLGGDGGEAAAKPAPGGVLNLEEEYRLHEKPVPSSIDPSWLQLFPTVWAERAGMGLANQVPPVVVELRSGASPVAVRQYPMSKEAREGIRPHIQRFLDLGVLVPCQSPWNTPLLPVKKPGTNDYRPVQDLREINKRVQDIHPTVPNPYNLLSSLPPSHTWYSVLDLKDAFFCLKLHPNSQPLFAFEWRDPEKGNTGQLTWTRLPQGFKNSPTLFNEALHRDLAPFRALNPQVVLLQYVDDLLVAAPTYRDCKEGTQKLLQELSKLGYRVSAKKAQLCQKEVTYLGYLLKEGKRWLTPARKATVMKIPPPTTPRQVREFLGKAGFCRLFIPGFASLAAPLYPLTKPSIPFIWTEEHQKAFDRIKEALLSAPALALPDLTKPFTLYVDERAGVARGVLTQTLGPWRRPVAYLSKKLDPVASGWPTCLKAVAAVALLLKDADKLTLGQNVTVIASHSLESIVRQPPDRWMTNARMTHYQSLLLNERVSFAPPAVLNPATLLPVESEATPVHRCSEILAEETGTRRDLKDQPLPGVPAWYTDGSSFIAEGKRRAGAAIVDGKRTVWASSLPEGTSAQKAELVALTQALRLAEGKDINIYTDSRYAFATAHIHGAIYKQRGWLTSAGKDIKNKEEILALLEAIHLPKRVAIIHCPGHQKGNDPVATGNRRADEAAKQAALSTRVLAETTKPAGKRTADGSEFEKRTADGSEFESPKKKAKVE

SEQ ID NO: 4516 - protein, 2093 aa, synthetic construct
MPAAKRVKLDGGDKKYSIGLDIGTNSVGWAVITDEYKVPSKKFKVLGNTDRHSIKKNLIGALLFDSGETAEATRLKRTARRRYTRRKNRICYLQEIFSNEMAKVDDSFFHRLEESFLVEEDKKHERHPIFGNIVDEVAYHEKYPTIYHLRKKLVDSTDKADLRLIYLALAHMIKFRGHFLIEGDLNPDNSDVDKLFIQLVQTYNQLFEENPINASGVDAKAILSARLSKSRRLENLIAQLPGEKKNGLFGNLIALSLGLTPNFKSNFDLAEDAKLQLSKDTYDDDLDNLLAQIGDQYADLFLAAKNLSDAILLSDILRVNTEITKAPLSASMIKRYDEHHQDLTLLKALVRQQLPEKYKEIFFDQSKNGYAGYIDGGASQEEFYKFIKPILEKMDGTEELLVKLNREDLLRKQRTFDNGSIPHQIHLGELHAILRRQEDFYPFLKDNREKIEKILTFRIPYYVGPLARGNSRFAWMTRKSEETITPWNFEEVVDKGASAQSFIERMTNFDKNLPNEKVLPKHSLLYEYFTVYNELTKVKYVTEGMRKPAFLSGEQKKAIVDLLFKTNRKVTVKQLKEDYFKKIECFDSVEISGVEDRFNASLGTYHDLLKIIKDKDFLDNEENEDILEDIVLTLTLFEDREMIEERLKTYAHLFDDKVMKQLKRRRYTGWGRLSRKLINGIRDKQSGKTILDFLKSDGFANRNFMQLIHDDSLTFKEDIQKAQVSGQGDSLHEHIANLAGSPAIKKGILQTVKVVDELVKVMGRHKPENIVIEMARENQTTQKGQKNSRERMKRIEEGIKELGSQILKEHPVENTQLQNEKLYLYYLQNGRDMYVDQELDINRLSDYDVDHIVPQSFLKDDSIDNKVLTRSDKARGKSDNVPSEEVVKKMKNYWRQLLNAKLITQRKFDNLTKAERGGLSELDKAGFIKRQLVETRQITKHVAQILDSRMNTKYDENDKLIREVKVITLKSKLVSDFRKDFQFYKVREINNYHHAHDAYLNAVVGTALIKKYPKLESEFVYGDYKVYDVRKMIAKSEQEIGKATAKYFFYSNIMNFFKTEITLANGEIRKRPLIETNGETGEIVWDKGRDFATVRKVLSMPQVNIVKKTEVQTGGFSKESILPKRNSDKLIARKKDWDPKKYGGFDSPTVAYSVLVVAKVEKGKSKKLKSVKELLGITIMERSSFEKNPIDFLEAKGYKEVKKDLIIKLPKYSLFELENGRKRMLASAGELQKGNELALPSKYVNFLYLASHYEKLKGSPEDNEQKQLFVEQHKHYLDEIIEQISEFSKRVILADANLDKVLSAYNKHRDKPIREQAENIIHLFTLTNLGAPAAFKYFDTTIDRKRYTSTKEVLDATLIHQSITGLYETRIDLSQLGGDGGPAPEAAAKGGLGIEDEYRLHETSTEPDVSLGSTWLSDFPQAWAETGGMGLAVRQAPLIIPLKATSTPVSIQQYPMSHEARLGIKPHIQRLLDQGILVPCQSPWNTPLLPVKKPGTNDYRPVQDLREVNKRVEDIHPTVPNPYNLLSGLPPSHQWYTVLDLKDAFFCLRLHPTSQPLFAFEWRDPGMGISGQLTWTRLPQGFKNSPTLFNEALHRDLADFRIQHPDLILLQYVDDILLAATSELDCQQGTRALLQTLGDLGYRASAKKAQICQKQVKYLGYLLREGQRWLTEARKETVMGQPVPKTPRQLREFLGKAGFCRLFIPGFAEMAAPLYPLTKPGTLFSWGPDQQKAYQEIKQALLTAPALGLPDLTKPFELFVDEKQGYAKGVLTQKLGPWRRPVAYLSKKLDPVAAGWPPCLRMVAAIAVLTKDAGKLTMGQPLVILAPHAVEALVKQPPDRWLSNARMTHYQAMLLDTDRVQFGPVVALNPATLLPLPEEGAPHDCLEILAETHGTRPDLTDQPIPDADHTWYTDGSSFLQEGQRKAGAAVTTETEVIWAGALPAGTSAQRAELIALTQALKMAEGKRLNVYTDSRYAFATAHIHGEIYRRRGWLTSEGREIKNKSEILALLKALFLPKRLSIIHCLGHQKGDSAEARGNRLADQAAREAAIKTPPDTSTLLIAGKRTADGSEFEKRTADGSEFESPKKKAKVE

SEQ ID NO: 4517 - protein, 2094 aa, synthetic construct
MPAAKRVKLDGGDKKYSIGLDIGTNSVGWAVITDEYKVPSKKFKVLGNTDRHSIKKNLIGALLFDSGETAEATRLKRTARRRYTRRKNRICYLQEIFSNEMAKVDDSFFHRLEESFLVEEDKKHERHPIFGNIVDEVAYHEKYPTIYHLRKKLVDSTDKADLRLIYLALAHMIKFRGHFLIEGDLNPDNSDVDKLFIQLVQTYNQLFEENPINASGVDAKAILSARLSKSRRLENLIAQLPGEKKNGLFGNLIALSLGLTPNFKSNFDLAEDAKLQLSKDTYDDDLDNLLAQIGDQYADLFLAAKNLSDAILLSDILRVNTEITKAPLSASMIKRYDEHHQDLTLLKALVRQQLPEKYKEIFFDQSKNGYAGYIDGGASQEEFYKFIKPILEKMDGTEELLVKLNREDLLRKQRTFDNGSIPHQIHLGELHAILRRQEDFYPFLKDNREKIEKILTFRIPYYVGPLARGNSRFAWMTRKSEETITPWNFEEVVDKGASAQSFIERMTNFDKNLPNEKVLPKHSLLYEYFTVYNELTKVKYVTEGMRKPAFLSGEQKKAIVDLLFKTNRKVTVKQLKEDYFKKIECFDSVEISGVEDRFNASLGTYHDLLKIIKDKDFLDNEENEDILEDIVLTLTLFEDREMIEERLKTYAHLFDDKVMKQLKRRRYTGWGRLSRKLINGIRDKQSGKTILDFLKSDGFANRNFMQLIHDDSLTFKEDIQKAQVSGQGDSLHEHIANLAGSPAIKKGILQTVKVVDELVKVMGRHKPENIVIEMARENQTTQKGQKNSRERMKRIEEGIKELGSQILKEHPVENTQLQNEKLYLYYLQNGRDMYVDQELDINRLSDYDVDHIVPQSFLKDDSIDNKVLTRSDKARGKSDNVPSEEVVKKMKNYWRQLLNAKLITQRKFDNLTKAERGGLSELDKAGFIKRQLVETRQITKHVAQILDSRMNTKYDENDKLIREVKVITLKSKLVSDFRKDFQFYKVREINNYHHAHDAYLNAVVGTALIKKYPKLESEFVYGDYKVYDVRKMIAKSEQEIGKATAKYFFYSNIMNFFKTEITLANGEIRKRPLIETNGETGEIVWDKGRDFATVRKVLSMPQVNIVKKTEVQTGGFSKESILPKRNSDKLIARKKDWDPKKYGGFDSPTVAYSVLVVAKVEKGKSKKLKSVKELLGITIMERSSFEKNPIDFLEAKGYKEVKKDLIIKLPKYSLFELENGRKRMLASAGELQKGNELALPSKYVNFLYLASHYEKLKGSPEDNEQKQLFVEQHKHYLDEIIEQISEFSKRVILADANLDKVLSAYNKHRDKPIREQAENIIHLFTLTNLGAPAAFKYFDTTIDRKRYTSTKEVLDATLIHQSITGLYETRIDLSQLGGDGGGSSGGGGGSGGLGIEDEYRLHETSTEPDVSLGSTWLSDFPQAWAETGGMGLAVRQAPLIIPLKATSTPVSIQQYPMSHEARLGIKPHIQRLLDQGILVPCQSPWNTPLLPVKKPGTNDYRPVQDLREVNKRVEDIHPTVPNPYNLLSGLPPSHQWYTVLDLKDAFFCLRLHPTSQPLFAFEWRDPGMGISGQLTWTRLPQGFKNSPTLFNEALHRDLADFRIQHPDLILLQYVDDILLAATSELDCQQGTRALLQTLGDLGYRASAKKAQICQKQVKYLGYLLREGQRWLTEARKETVMGQPVPKTPRQLREFLGKAGFCRLFIPGFAEMAAPLYPLTKPGTLFSWGPDQQKAYQEIKQALLTAPALGLPDLTKPFELFVDEKQGYAKGVLTQKLGPWRRPVAYLSKKLDPVAAGWPPCLRMVAAIAVLTKDAGKLTMGQPLVILAPHAVEALVKQPPDRWLSNARMTHYQAMLLDTDRVQFGPVVALNPATLLPLPEEGAPHDCLEILAETHGTRPDLTDQPIPDADHTWYTDGSSFLQEGQRKAGAAVTTETEVIWAGALPAGTSAQRAELIALTQALKMAEGKRLNVYTDSRYAFATAHIHGEIYRRRGWLTSEGREIKNKSEILALLKALFLPKRLSIIHCLGHQKGDSAEARGNRLADQAAREAAIKTPPDTSTLLIAGKRTADGSEFEKRTADGSEFESPKKKAKVE

SEQ ID NO: 4518 - protein, 2094 aa, synthetic construct
MPAAKRVKLDGGDKKYSIGLDIGTNSVGWAVITDEYKVPSKKFKVLGNTDRHSIKKNLIGALLFDSGETAEATRLKRTARRRYTRRKNRICYLQEIFSNEMAKVDDSFFHRLEESFLVEEDKKHERHPIFGNIVDEVAYHEKYPTIYHLRKKLVDSTDKADLRLIYLALAHMIKFRGHFLIEGDLNPDNSDVDKLFIQLVQTYNQLFEENPINASGVDAKAILSARLSKSRRLENLIAQLPGEKKNGLFGNLIALSLGLTPNFKSNFDLAEDAKLQLSKDTYDDDLDNLLAQIGDQYADLFLAAKNLSDAILLSDILRVNTEITKAPLSASMIKRYDEHHQDLTLLKALVRQQLPEKYKEIFFDQSKNGYAGYIDGGASQEEFYKFIKPILEKMDGTEELLVKLNREDLLRKQRTFDNGSIPHQIHLGELHAILRRQEDFYPFLKDNREKIEKILTFRIPYYVGPLARGNSRFAWMTRKSEETITPWNFEEVVDKGASAQSFIERMTNFDKNLPNEKVLPKHSLLYEYFTVYNELTKVKYVTEGMRKPAFLSGEQKKAIVDLLFKTNRKVTVKQLKEDYFKKIECFDSVEISGVEDRFNASLGTYHDLLKIIKDKDFLDNEENEDILEDIVLTLTLFEDREMIEERLKTYAHLFDDKVMKQLKRRRYTGWGRLSRKLINGIRDKQSGKTILDFLKSDGFANRNFMQLIHDDSLTFKEDIQKAQVSGQGDSLHEHIANLAGSPAIKKGILQTVKVVDELVKVMGRHKPENIVIEMARENQTTQKGQKNSRERMKRIEEGIKELGSQILKEHPVENTQLQNEKLYLYYLQNGRDMYVDQELDINRLSDYDVDHIVPQSFLKDDSIDNKVLTRSDKARGKSDNVPSEEVVKKMKNYWRQLLNAKLITQRKFDNLTKAERGGLSELDKAGFIKRQLVETRQITKHVAQILDSRMNTKYDENDKLIREVKVITLKSKLVSDFRKDFQFYKVREINNYHHAHDAYLNAVVGTALIKKYPKLESEFVYGDYKVYDVRKMIAKSEQEIGKATAKYFFYSNIMNFFKTEITLANGEIRKRPLIETNGETGEIVWDKGRDFATVRKVLSMPQVNIVKKTEVQTGGFSKESILPKRNSDKLIARKKDWDPKKYGGFDSPTVAYSVLVVAKVEKGKSKKLKSVKELLGITIMERSSFEKNPIDFLEAKGYKEVKKDLIIKLPKYSLFELENGRKRMLASAGELQKGNELALPSKYVNFLYLASHYEKLKGSPEDNEQKQLFVEQHKHYLDEIIEQISEFSKRVILADANLDKVLSAYNKHRDKPIREQAENIIHLFTLTNLGAPAAFKYFDTTIDRKRYTSTKEVLDATLIHQSITGLYETRIDLSQLGGDGGGSSGGGGGSGGTLNIEDEYRLHETSKEPDVPLGSTWLSDFPQAWAETGGMGLAVRQAPLIIPLKATSTPVSIKQYPMSQEARLGIKPHIQRLLDQGILVPCQSPWNTPLLPVKKPGTNDYRPVQDLREVNKRVEDIHPTVPNPYNLLSGLPPSHQWYTVLDLKDAFFCLRLHPTSQPLFAFEWRDPEMGISGQLTWTRLPQGFKNSPTLFNEALHRDLADFRIQHPDLILLQYVDDLLLAATSEQDCQRGTRALLQTLGNLGYRASAKKAQICQKQVKYLGYLLKEGQRWLTEARKETVMGQPTPKTPRQLREFLGKAGFCRLFIPGFAEMAAPLYPLTKPGTLFNWGPDQQKAYQEIKQALLTAPALGLPDLTKPFELFVDEKQGYAKGVLTQKLGPWRRPVAYLSKKLDPVAAGWPPCLRMVAAIAVLTKDAGKLTMGQPLVILAPHAVEALVKQPPDRWLSNARMTHYQAMLLDTDRVQFGPVVALNPATLLPLPEKEAPHDCLEILAETHGTRPDLTDQPIPDADYTWYTDGSSFLQEGQRRAGAAVTTETEVIWARALPAGTSAQRAELIALTQALKMAEGKKLNVYTDSRYAFATAHVHGEIYRRRGWLTSEGREIKNKNEILALLKALFLPKRLSIIHCPGHQKGNSAEARGNRMADQAAREAAMKAVLETSTLLAGKRTADGSEFEKRTADGSEFESPKKKAKVE

SEQ ID NO: 4519 - protein, 2096 aa, synthetic construct
MPAAKRVKLDGGDKKYSIGLDIGTNSVGWAVITDEYKVPSKKFKVLGNTDRHSIKKNLIGALLFDSGETAEATRLKRTARRRYTRRKNRICYLQEIFSNEMAKVDDSFFHRLEESFLVEEDKKHERHPIFGNIVDEVAYHEKYPTIYHLRKKLVDSTDKADLRLIYLALAHMIKFRGHFLIEGDLNPDNSDVDKLFIQLVQTYNQLFEENPINASGVDAKAILSARLSKSRRLENLIAQLPGEKKNGLFGNLIALSLGLTPNFKSNFDLAEDAKLQLSKDTYDDDLDNLLAQIGDQYADLFLAAKNLSDAILLSDILRVNTEITKAPLSASMIKRYDEHHQDLTLLKALVRQQLPEKYKEIFFDQSKNGYAGYIDGGASQEEFYKFIKPILEKMDGTEELLVKLNREDLLRKQRTFDNGSIPHQIHLGELHAILRRQEDFYPFLKDNREKIEKILTFRIPYYVGPLARGNSRFAWMTRKSEETITPWNFEEVVDKGASAQSFIERMTNFDKNLPNEKVLPKHSLLYEYFTVYNELTKVKYVTEGMRKPAFLSGEQKKAIVDLLFKTNRKVTVKQLKEDYFKKIECFDSVEISGVEDRFNASLGTYHDLLKIIKDKDFLDNEENEDILEDIVLTLTLFEDREMIEERLKTYAHLFDDKVMKQLKRRRYTGWGRLSRKLINGIRDKQSGKTILDFLKSDGFANRNFMQLIHDDSLTFKEDIQKAQVSGQGDSLHEHIANLAGSPAIKKGILQTVKVVDELVKVMGRHKPENIVIEMARENQTTQKGQKNSRERMKRIEEGIKELGSQILKEHPVENTQLQNEKLYLYYLQNGRDMYVDQELDINRLSDYDVDHIVPQSFLKDDSIDNKVLTRSDKARGKSDNVPSEEVVKKMKNYWRQLLNAKLITQRKFDNLTKAERGGLSELDKAGFIKRQLVETRQITKHVAQILDSRMNTKYDENDKLIREVKVITLKSKLVSDFRKDFQFYKVREINNYHHAHDAYLNAVVGTALIKKYPKLESEFVYGDYKVYDVRKMIAKSEQEIGKATAKYFFYSNIMNFFKTEITLANGEIRKRPLIETNGETGEIVWDKGRDFATVRKVLSMPQVNIVKKTEVQTGGFSKESILPKRNSDKLIARKKDWDPKKYGGFDSPTVAYSVLVVAKVEKGKSKKLKSVKELLGITIMERSSFEKNPIDFLEAKGYKEVKKDLIIKLPKYSLFELENGRKRMLASAGELQKGNELALPSKYVNFLYLASHYEKLKGSPEDNEQKQLFVEQHKHYLDEIIEQISEFSKRVILADANLDKVLSAYNKHRDKPIREQAENIIHLFTLTNLGAPAAFKYFDTTIDRKRYTSTKEVLDATLIHQSITGLYETRIDLSQLGGDGGGGGGGSEAAAKGGTLNIEDEYRLHETSKEPDVPLGSTWLSDFPQAWAETGGMGLAVRQAPLIIPLKATSTPVSIKQYPMSQEARLGIKPHIQRLLDQGILVPCQSPWNTPLLPVKKPGTNDYRPVQDLREVNKRVEDIHPTVPNPYNLLSGLPPSHQWYTVLDLKDAFFCLRLHPTSQPLFAFEWRDPEMGISGQLTWTRLPQGFKNSPTLFNEALHRDLADFRIQHPDLILLQYVDDLLLAATSEQDCQRGTRALLQTLGNLGYRASAKKAQICQKQVKYLGYLLKEGQRWLTEARKETVMGQPTPKTPRQLREFLGKAGFCRLFIPGFAEMAAPLYPLTKPGTLFNWGPDQQKAYQEIKQALLTAPALGLPDLTKPFELFVDEKQGYAKGVLTQKLGPWRRPVAYLSKKLDPVAAGWPPCLRMVAAIAVLTKDAGKLTMGQPLVILAPHAVEALVKQPPDRWLSNARMTHYQAMLLDTDRVQFGPVVALNPATLLPLPEKEAPHDCLEILAETHGTRPDLTDQPIPDADYTWYTDGSSFLQEGQRRAGAAVTTETEVIWARALPAGTSAQRAELIALTQALKMAEGKKLNVYTDSRYAFATAHVHGEIYRRRGWLTSEGREIKNKNEILALLKALFLPKRLSIIHCPGHQKGNSAEARGNRMADQAAREAAMKAVLETSTLLAGKRTADGSEFEKRTADGSEFESPKKKAKVE

SEQ ID NO: 4520 - protein, 2094 aa, synthetic construct
MPAAKRVKLDGGDKKYSIGLDIGTNSVGWAVITDEYKVPSKKFKVLGNTDRHSIKKNLIGALLFDSGETAEATRLKRTARRRYTRRKNRICYLQEIFSNEMAKVDDSFFHRLEESFLVEEDKKHERHPIFGNIVDEVAYHEKYPTIYHLRKKLVDSTDKADLRLIYLALAHMIKFRGHFLIEGDLNPDNSDVDKLFIQLVQTYNQLFEENPINASGVDAKAILSARLSKSRRLENLIAQLPGEKKNGLFGNLIALSLGLTPNFKSNFDLAEDAKLQLSKDTYDDDLDNLLAQIGDQYADLFLAAKNLSDAILLSDILRVNTEITKAPLSASMIKRYDEHHQDLTLLKALVRQQLPEKYKEIFFDQSKNGYAGYIDGGASQEEFYKFIKPILEKMDGTEELLVKLNREDLLRKQRTFDNGSIPHQIHLGELHAILRRQEDFYPFLKDNREKIEKILTFRIPYYVGPLARGNSRFAWMTRKSEETITPWNFEEVVDKGASAQSFIERMTNFDKNLPNEKVLPKHSLLYEYFTVYNELTKVKYVTEGMRKPAFLSGEQKKAIVDLLFKTNRKVTVKQLKEDYFKKIECFDSVEISGVEDRFNASLGTYHDLLKIIKDKDFLDNEENEDILEDIVLTLTLFEDREMIEERLKTYAHLFDDKVMKQLKRRRYTGWGRLSRKLINGIRDKQSGKTILDFLKSDGFANRNFMQLIHDDSLTFKEDIQKAQVSGQGDSLHEHIANLAGSPAIKKGILQTVKVVDELVKVMGRHKPENIVIEMARENQTTQKGQKNSRERMKRIEEGIKELGSQILKEHPVENTQLQNEKLYLYYLQNGRDMYVDQELDINRLSDYDVDHIVPQSFLKDDSIDNKVLTRSDKARGKSDNVPSEEVVKKMKNYWRQLLNAKLITQRKFDNLTKAERGGLSELDKAGFIKRQLVETRQITKHVAQILDSRMNTKYDENDKLIREVKVITLKSKLVSDFRKDFQFYKVREINNYHHAHDAYLNAVVGTALIKKYPKLESEFVYGDYKVYDVRKMIAKSEQEIGKATAKYFFYSNIMNFFKTEITLANGEIRKRPLIETNGETGEIVWDKGRDFATVRKVLSMPQVNIVKKTEVQTGGFSKESILPKRNSDKLIARKKDWDPKKYGGFDSPTVAYSVLVVAKVEKGKSKKLKSVKELLGITIMERSSFEKNPIDFLEAKGYKEVKKDLIIKLPKYSLFELENGRKRMLASAGELQKGNELALPSKYVNFLYLASHYEKLKGSPEDNEQKQLFVEQHKHYLDEIIEQISEFSKRVILADANLDKVLSAYNKHRDKPIREQAENIIHLFTLTNLGAPAAFKYFDTTIDRKRYTSTKEVLDATLIHQSITGLYETRIDLSQLGGDGGGGGGGSPAPGGTLNLEDEYRLYETSAEPEVSPGSTWLSDFPQAWAETGGMGLAVRQAPLIIPLKATSTPVSIKQYPMSQEAKLGIKPHIQRLLDQGILVPCQSPWNTPLLPVKKPGTNDYRPVQDLREVNKRVEDIHPTVPNPYNLLSGLPPSHRWYTVLDLKDAFFCLRLHPTSQPLFAFEWRDPGMGISGQLTWTRLPQGFKNSPTLFNEALHRDLADFRIQHPDLILLQYVDDILLAATSELDCQQGTRALLLTLGNLGYRASAKKAQLCQKQVKYLGYLLKEGQRWLTEARKETVMGQPTPKTPRQLREFLGKAGFCRLFIPGFAEMAAPLYPLTKPGTLFNWGPDQQKAYQEIKQALLTAPALGLPDLTKPFELFVDEKQGYAKGVLTQKLGPWRRPVAYLSKKLDPVAAGWPPCLRMVAAIAVLRKDAGKLTMGQPLVILAPHAVEALVKQPPDRWLSNARMTHYQAMLLDTDRVQFGPVVALNPATLLPLPEEGAPHDCLEILAETHGTRPDLTDQPIPDADHTWYTDGSSFLQEGQRKAGAAVTTETEVIWARALPAGTSAQRAELIALTQALKMAEGKRLNVYTDSRYAFATAHIHGEIYRRRGWLTSEGREIKNKSEILALLKALFLPKRLSIIHCLGHQKGDSAEARGNRLADQAAREAAIKTPPDTSTLLAGKRTADGSEFEKRTADGSEFESPKKKAKVE

SEQ ID NO: 4521 - protein, 2094 aa, synthetic construct
MPAAKRVKLDGGDKKYSIGLDIGTNSVGWAVITDEYKVPSKKFKVLGNTDRHSIKKNLIGALLFDSGETAEATRLKRTARRRYTRRKNRICYLQEIFSNEMAKVDDSFFHRLEESFLVEEDKKHERHPIFGNIVDEVAYHEKYPTIYHLRKKLVDSTDKADLRLIYLALAHMIKFRGHFLIEGDLNPDNSDVDKLFIQLVQTYNQLFEENPINASGVDAKAILSARLSKSRRLENLIAQLPGEKKNGLFGNLIALSLGLTPNFKSNFDLAEDAKLQLSKDTYDDDLDNLLAQIGDQYADLFLAAKNLSDAILLSDILRVNTEITKAPLSASMIKRYDEHHQDLTLLKALVRQQLPEKYKEIFFDQSKNGYAGYIDGGASQEEFYKFIKPILEKMDGTEELLVKLNREDLLRKQRTFDNGSIPHQIHLGELHAILRRQEDFYPFLKDNREKIEKILTFRIPYYVGPLARGNSRFAWMTRKSEETITPWNFEEVVDKGASAQSFIERMTNFDKNLPNEKVLPKHSLLYEYFTVYNELTKVKYVTEGMRKPAFLSGEQKKAIVDLLFKTNRKVTVKQLKEDYFKKIECFDSVEISGVEDRFNASLGTYHDLLKIIKDKDFLDNEENEDILEDIVLTLTLFEDREMIEERLKTYAHLFDDKVMKQLKRRRYTGWGRLSRKLINGIRDKQSGKTILDFLKSDGFANRNFMQLIHDDSLTFKEDIQKAQVSGQGDSLHEHIANLAGSPAIKKGILQTVKVVDELVKVMGRHKPENIVIEMARENQTTQKGQKNSRERMKRIEEGIKELGSQILKEHPVENTQLQNEKLYLYYLQNGRDMYVDQELDINRLSDYDVDHIVPQSFLKDDSIDNKVLTRSDKARGKSDNVPSEEVVKKMKNYWRQLLNAKLITQRKFDNLTKAERGGLSELDKAGFIKRQLVETRQITKHVAQILDSRMNTKYDENDKLIREVKVITLKSKLVSDFRKDFQFYKVREINNYHHAHDAYLNAVVGTALIKKYPKLESEFVYGDYKVYDVRKMIAKSEQEIGKATAKYFFYSNIMNFFKTEITLANGEIRKRPLIETNGETGEIVWDKGRDFATVRKVLSMPQVNIVKKTEVQTGGFSKESILPKRNSDKLIARKKDWDPKKYGGFDSPTVAYSVLVVAKVEKGKSKKLKSVKELLGITIMERSSFEKNPIDFLEAKGYKEVKKDLIIKLPKYSLFELENGRKRMLASAGELQKGNELALPSKYVNFLYLASHYEKLKGSPEDNEQKQLFVEQHKHYLDEIIEQISEFSKRVILADANLDKVLSAYNKHRDKPIREQAENIIHLFTLTNLGAPAAFKYFDTTIDRKRYTSTKEVLDATLIHQSITGLYETRIDLSQLGGDGGPAPGGGGGSGGTLNIEDEHRLHETSKEPDVSLGSTWLSDFPQAWAETGGMGLAVRQAPLIIPLKATSTPVSIKQYPMSQEARLGIKPHIQRLLDQGILVPCQSPWNTPLLPVKKPGTNDYRPVQDLREVNKRVEDIHPTVPNPYNLLSGLPPSHQWYTVLDLKDAFFCLRLHPTSQPLFAFEWRDPEMGISGQLTWTRLPQGFKNSPTLFNEALHRDLADFRIQHPDLILLQYVDDLLLAATSELDCQQGTRALLQTLGNLGYRASAKKAQICQKQVKYLGYLLKEGQRWLTEARKETVMGQPTPKTPRQLREFLGKAGFCRLFIPGFAEMAAPLYPLTKPGTLFNWGPDQQKAYQEIKQALLTAPALGLPDLTKPFELFVDEKQGYAKGVLTQKLGPWRRPVAYLSKKLDPVAAGWPPCLRMVAAIAVLTKDAGKLTMGQPLVILAPHAVEALVKQPPDRWLSNARMTHYQALLLDTDRVQFGPVVALNPATLLPLPEEGLQHNCLDILAEAHGTRPDLTDQPLPDADHTWYTDGSSLLQEGQRKAGAAVTTETEVIWAKALPAGTSAQRAELIALTQALKMAEGKKLNVYTDSRYAFATAHIHGEIYRRRGWLTSEGKEIKNKDEILALLKALFLPKRLSIIHCPGHQKGHSAEARGNRMADQAARKAAITETPDTSTLLAGKRTADGSEFEKRTADGSEFESPKKKAKVE

SEQ ID NO: 4522 - protein, 2096 aa, synthetic construct
MPAAKRVKLDGGDKKYSIGLDIGTNSVGWAVITDEYKVPSKKFKVLGNTDRHSIKKNLIGALLFDSGETAEATRLKRTARRRYTRRKNRICYLQEIFSNEMAKVDDSFFHRLEESFLVEEDKKHERHPIFGNIVDEVAYHEKYPTIYHLRKKLVDSTDKADLRLIYLALAHMIKFRGHFLIEGDLNPDNSDVDKLFIQLVQTYNQLFEENPINASGVDAKAILSARLSKSRRLENLIAQLPGEKKNGLFGNLIALSLGLTPNFKSNFDLAEDAKLQLSKDTYDDDLDNLLAQIGDQYADLFLAAKNLSDAILLSDILRVNTEITKAPLSASMIKRYDEHHQDLTLLKALVRQQLPEKYKEIFFDQSKNGYAGYIDGGASQEEFYKFIKPILEKMDGTEELLVKLNREDLLRKQRTFDNGSIPHQIHLGELHAILRRQEDFYPFLKDNREKIEKILTFRIPYYVGPLARGNSRFAWMTRKSEETITPWNFEEVVDKGASAQSFIERMTNFDKNLPNEKVLPKHSLLYEYFTVYNELTKVKYVTEGMRKPAFLSGEQKKAIVDLLFKTNRKVTVKQLKEDYFKKIECFDSVEISGVEDRFNASLGTYHDLLKIIKDKDFLDNEENEDILEDIVLTLTLFEDREMIEERLKTYAHLFDDKVMKQLKRRRYTGWGRLSRKLINGIRDKQSGKTILDFLKSDGFANRNFMQLIHDDSLTFKEDIQKAQVSGQGDSLHEHIANLAGSPAIKKGILQTVKVVDELVKVMGRHKPENIVIEMARENQTTQKGQKNSRERMKRIEEGIKELGSQILKEHPVENTQLQNEKLYLYYLQNGRDMYVDQELDINRLSDYDVDHIVPQSFLKDDSIDNKVLTRSDKARGKSDNVPSEEVVKKMKNYWRQLLNAKLITQRKFDNLTKAERGGLSELDKAGFIKRQLVETRQITKHVAQILDSRMNTKYDENDKLIREVKVITLKSKLVSDFRKDFQFYKVREINNYHHAHDAYLNAVVGTALIKKYPKLESEFVYGDYKVYDVRKMIAKSEQEIGKATAKYFFYSNIMNFFKTEITLANGEIRKRPLIETNGETGEIVWDKGRDFATVRKVLSMPQVNIVKKTEVQTGGFSKESILPKRNSDKLIARKKDWDPKKYGGFDSPTVAYSVLVVAKVEKGKSKKLKSVKELLGITIMERSSFEKNPIDFLEAKGYKEVKKDLIIKLPKYSLFELENGRKRMLASAGELQKGNELALPSKYVNFLYLASHYEKLKGSPEDNEQKQLFVEQHKHYLDEIIEQISEFSKRVILADANLDKVLSAYNKHRDKPIREQAENIIHLFTLTNLGAPAAFKYFDTTIDRKRYTSTKEVLDATLIHQSITGLYETRIDLSQLGGDGGGGSEAAAKGSSGGTLNIEDEYRLHETSKEPDVPLGSTWLSDFPQAWAETGGMGLAVRQAPLIIPLKATSTPVSIKQYPMSQEARLGIKPHIQRLLDQGILVPCQSPWNTPLLPVKKPGTNDYRPVQDLREVNKRVEDIHPTVPNPYNLLSGLPPSHQWYTVLDLKDAFFCLRLHPTSQPLFAFEWRDPEMGISGQLTWTRLPQGFKNSPTLFNEALHRDLADFRIQHPDLILLQYVDDLLLAATSEQDCQRGTRALLQTLGNLGYRASAKKAQICQKQVKYLGYLLKEGQRWLTEARKETVMGQPTPKTPRQLREFLGKAGFCRLFIPGFAEMAAPLYPLTKPGTLFNWGPDQQKAYQEIKQALLTAPALGLPDLTKPFELFVDEKQGYAKGVLTQKLGPWRRPVAYLSKKLDPVAAGWPPCLRMVAAIAVLTKDAGKLTMGQPLVILAPHAVEALVKQPPDRWLSNARMTHYQAMLLDTDRVQFGPVVALNPATLLPLPEKEAPHDCLEILAETHGTRPDLTDQPIPDADYTWYTDGSSFLQEGQRRAGAAVTTETEVIWARALPAGTSAQRAELIALTQALKMAEGKKLNVYTDSRYAFATAHVHGEIYRRRGWLTSEGREIKNKNEILALLKALFLPKRLSIIHCPGHQKGNSAEARGNRMADQAAREAAMKAVLETSTLLAGKRTADGSEFEKRTADGSEFESPKKKAKVE

SEQ ID NO: 4523 - protein, 2096 aa, synthetic construct
MPAAKRVKLDGGDKKYSIGLDIGTNSVGWAVITDEYKVPSKKFKVLGNTDRHSIKKNLIGALLFDSGETAEATRLKRTARRRYTRRKNRICYLQEIFSNEMAKVDDSFFHRLEESFLVEEDKKHERHPIFGNIVDEVAYHEKYPTIYHLRKKLVDSTDKADLRLIYLALAHMIKFRGHFLIEGDLNPDNSDVDKLFIQLVQTYNQLFEENPINASGVDAKAILSARLSKSRRLENLIAQLPGEKKNGLFGNLIALSLGLTPNFKSNFDLAEDAKLQLSKDTYDDDLDNLLAQIGDQYADLFLAAKNLSDAILLSDILRVNTEITKAPLSASMIKRYDEHHQDLTLLKALVRQQLPEKYKEIFFDQSKNGYAGYIDGGASQEEFYKFIKPILEKMDGTEELLVKLNREDLLRKQRTFDNGSIPHQIHLGELHAILRRQEDFYPFLKDNREKIEKILTFRIPYYVGPLARGNSRFAWMTRKSEETITPWNFEEVVDKGASAQSFIERMTNFDKNLPNEKVLPKHSLLYEYFTVYNELTKVKYVTEGMRKPAFLSGEQKKAIVDLLFKTNRKVTVKQLKEDYFKKIECFDSVEISGVEDRFNASLGTYHDLLKIIKDKDFLDNEENEDILEDIVLTLTLFEDREMIEERLKTYAHLFDDKVMKQLKRRRYTGWGRLSRKLINGIRDKQSGKTILDFLKSDGFANRNFMQLIHDDSLTFKEDIQKAQVSGQGDSLHEHIANLAGSPAIKKGILQTVKVVDELVKVMGRHKPENIVIEMARENQTTQKGQKNSRERMKRIEEGIKELGSQILKEHPVENTQLQNEKLYLYYLQNGRDMYVDQELDINRLSDYDVDHIVPQSFLKDDSIDNKVLTRSDKARGKSDNVPSEEVVKKMKNYWRQLLNAKLITQRKFDNLTKAERGGLSELDKAGFIKRQLVETRQITKHVAQILDSRMNTKYDENDKLIREVKVITLKSKLVSDFRKDFQFYKVREINNYHHAHDAYLNAVVGTALIKKYPKLESEFVYGDYKVYDVRKMIAKSEQEIGKATAKYFFYSNIMNFFKTEITLANGEIRKRPLIETNGETGEIVWDKGRDFATVRKVLSMPQVNIVKKTEVQTGGFSKESILPKRNSDKLIARKKDWDPKKYGGFDSPTVAYSVLVVAKVEKGKSKKLKSVKELLGITIMERSSFEKNPIDFLEAKGYKEVKKDLIIKLPKYSLFELENGRKRMLASAGELQKGNELALPSKYVNFLYLASHYEKLKGSPEDNEQKQLFVEQHKHYLDEIIEQISEFSKRVILADANLDKVLSAYNKHRDKPIREQAENIIHLFTLTNLGAPAAFKYFDTTIDRKRYTSTKEVLDATLIHQSITGLYETRIDLSQLGGDGGEAAAKGGSGSSGGTLNIEDEYRLHETSKEPDVPLGSTWLSDFPQAWAETGGMGLAVRQAPLIIPLKATSTPVSIKQYPMSQEARLGIKPHIQRLLDQGILVPCQSPWNTPLLPVKKPGTNDYRPVQDLREVNKRVEDIHPTVPNPYNLLSGLPPSHQWYTVLDLKDAFFCLRLHPTSQPLFAFEWRDPEMGISGQLTWTRLPQGFKNSPTLFNEALHRDLADFRIQHPDLILLQYVDDLLLAATSEQDCQRGTRALLQTLGNLGYRASAKKAQICQKQVKYLGYLLKEGQRWLTEARKETVMGQPTPKTPRQLREFLGTAGFCRLWIPGFAEMAAPLYPLTKPGTLFNWGPDQQKAYQEIKQALLTAPALGLPDLTKPFELFVDEKQGYAKGVLTQKLGPWRRPVAYLSKKLDPVAAGWPPCLRMVAAIAVLTKDAGKLTMGQPLVILAPHAVEALVKQPPDRWLSNARMTHYQAMLLDTDRVQFGPVVALNPATLLPLPEKEAPHDCLEILAETHGTRPDLTDQPIPDADYTWYTDGSSFLQEGQRRAGAAVTTETEVIWARALPAGTSAQRAELIALTQALKMAEGKKLNVYTDSRYAFATAHVHGEIYRRRGWLTSEGREIKNKNEILALLKALFLPKRLSIIHCPGHQKGNSAEARGNRMADQAAREAAMKAVLETSTLLAGKRTADGSEFEKRTADGSEFESPKKKAKVE

SEQ ID NO: 4524 - protein, 2096 aa, synthetic construct
MPAAKRVKLDGGDKKYSIGLDIGTNSVGWAVITDEYKVPSKKFKVLGNTDRHSIKKNLIGALLFDSGETAEATRLKRTARRRYTRRKNRICYLQEIFSNEMAKVDDSFFHRLEESFLVEEDKKHERHPIFGNIVDEVAYHEKYPTIYHLRKKLVDSTDKADLRLIYLALAHMIKFRGHFLIEGDLNPDNSDVDKLFIQLVQTYNQLFEENPINASGVDAKAILSARLSKSRRLENLIAQLPGEKKNGLFGNLIALSLGLTPNFKSNFDLAEDAKLQLSKDTYDDDLDNLLAQIGDQYADLFLAAKNLSDAILLSDILRVNTEITKAPLSASMIKRYDEHHQDLTLLKALVRQQLPEKYKEIFFDQSKNGYAGYIDGGASQEEFYKFIKPILEKMDGTEELLVKLNREDLLRKQRTFDNGSIPHQIHLGELHAILRRQEDFYPFLKDNREKIEKILTFRIPYYVGPLARGNSRFAWMTRKSEETITPWNFEEVVDKGASAQSFIERMTNFDKNLPNEKVLPKHSLLYEYFTVYNELTKVKYVTEGMRKPAFLSGEQKKAIVDLLFKTNRKVTVKQLKEDYFKKIECFDSVEISGVEDRFNASLGTYHDLLKIIKDKDFLDNEENEDILEDIVLTLTLFEDREMIEERLKTYAHLFDDKVMKQLKRRRYTGWGRLSRKLINGIRDKQSGKTILDFLKSDGFANRNFMQLIHDDSLTFKEDIQKAQVSGQGDSLHEHIANLAGSPAIKKGILQTVKVVDELVKVMGRHKPENIVIEMARENQTTQKGQKNSRERMKRIEEGIKELGSQILKEHPVENTQLQNEKLYLYYLQNGRDMYVDQELDINRLSDYDVDHIVPQSFLKDDSIDNKVLTRSDKARGKSDNVPSEEVVKKMKNYWRQLLNAKLITQRKFDNLTKAERGGLSELDKAGFIKRQLVETRQITKHVAQILDSRMNTKYDENDKLIREVKVITLKSKLVSDFRKDFQFYKVREINNYHHAHDAYLNAVVGTALIKKYPKLESEFVYGDYKVYDVRKMIAKSEQEIGKATAKYFFYSNIMNFFKTEITLANGEIRKRPLIETNGETGEIVWDKGRDFATVRKVLSMPQVNIVKKTEVQTGGFSKESILPKRNSDKLIARKKDWDPKKYGGFDSPTVAYSVLVVAKVEKGKSKKLKSVKELLGITIMERSSFEKNPIDFLEAKGYKEVKKDLIIKLPKYSLFELENGRKRMLASAGELQKGNELALPSKYVNFLYLASHYEKLKGSPEDNEQKQLFVEQHKHYLDEIIEQISEFSKRVILADANLDKVLSAYNKHRDKPIREQAENIIHLFTLTNLGAPAAFKYFDTTIDRKRYTSTKEVLDATLIHQSITGLYETRIDLSQLGGDGGEAAAKGSSGGSGGTLNIEDEYRLHETSKEPDVPLGSTWLSDFPQAWAETGGMGLAVRQAPLIIPLKATSTPVSIKQYPMSQEARLGIKPHIQRLLDQGILVPCQSPWNTPLLPVKKPGTNDYRPVQDLREVNKRVEDIHPTVPNPYNLLSGLPPSHQWYTVLDLKDAFFCLRLHPTSQPLFAFEWRDPEMGISGQLTWTRLPQGFKNSPTLFNEALHRDLADFRIQHPDLILLQYVDDLLLAATSEQDCQRGTRALLQTLGNLGYRASAKKAQICQKQVKYLGYLLKEGQRWLTEARKETVMGQPTPKTPRQLREFLGTAGFCRLWIPGFAEMAAPLYPLTKPGTLFNWGPDQQKAYQEIKQALLTAPALGLPDLTKPFELFVDEKQGYAKGVLTQKLGPWRRPVAYLSKKLDPVAAGWPPCLRMVAAIAVLTKDAGKLTMGQPLVILAPHAVEALVKQPPDRWLSNARMTHYQAMLLDTDRVQFGPVVALNPATLLPLPEKEAPHDCLEILAETHGTRPDLTDQPIPDADYTWYTDGSSFLQEGQRRAGAAVTTETEVIWARALPAGTSAQRAELIALTQALKMAEGKKLNVYTDSRYAFATAHVHGEIYRRRGWLTSEGREIKNKNEILALLKALFLPKRLSIIHCPGHQKGNSAEARGNRMADQAAREAAMKAVLETSTLLAGKRTADGSEFEKRTADGSEFESPKKKAKVE

SEQ ID NO: 4525 - protein, 2094 aa, synthetic construct
MPAAKRVKLDGGDKKYSIGLDIGTNSVGWAVITDEYKVPSKKFKVLGNTDRHSIKKNLIGALLFDSGETAEATRLKRTARRRYTRRKNRICYLQEIFSNEMAKVDDSFFHRLEESFLVEEDKKHERHPIFGNIVDEVAYHEKYPTIYHLRKKLVDSTDKADLRLIYLALAHMIKFRGHFLIEGDLNPDNSDVDKLFIQLVQTYNQLFEENPINASGVDAKAILSARLSKSRRLENLIAQLPGEKKNGLFGNLIALSLGLTPNFKSNFDLAEDAKLQLSKDTYDDDLDNLLAQIGDQYADLFLAAKNLSDAILLSDILRVNTEITKAPLSASMIKRYDEHHQDLTLLKALVRQQLPEKYKEIFFDQSKNGYAGYIDGGASQEEFYKFIKPILEKMDGTEELLVKLNREDLLRKQRTFDNGSIPHQIHLGELHAILRRQEDFYPFLKDNREKIEKILTFRIPYYVGPLARGNSRFAWMTRKSEETITPWNFEEVVDKGASAQSFIERMTNFDKNLPNEKVLPKHSLLYEYFTVYNELTKVKYVTEGMRKPAFLSGEQKKAIVDLLFKTNRKVTVKQLKEDYFKKIECFDSVEISGVEDRFNASLGTYHDLLKIIKDKDFLDNEENEDILEDIVLTLTLFEDREMIEERLKTYAHLFDDKVMKQLKRRRYTGWGRLSRKLINGIRDKQSGKTILDFLKSDGFANRNFMQLIHDDSLTFKEDIQKAQVSGQGDSLHEHIANLAGSPAIKKGILQTVKVVDELVKVMGRHKPENIVIEMARENQTTQKGQKNSRERMKRIEEGIKELGSQILKEHPVENTQLQNEKLYLYYLQNGRDMYVDQELDINRLSDYDVDHIVPQSFLKDDSIDNKVLTRSDKARGKSDNVPSEEVVKKMKNYWRQLLNAKLITQRKFDNLTKAERGGLSELDKAGFIKRQLVETRQITKHVAQILDSRMNTKYDENDKLIREVKVITLKSKLVSDFRKDFQFYKVREINNYHHAHDAYLNAVVGTALIKKYPKLESEFVYGDYKVYDVRKMIAKSEQEIGKATAKYFFYSNIMNFFKTEITLANGEIRKRPLIETNGETGEIVWDKGRDFATVRKVLSMPQVNIVKKTEVQTGGFSKESILPKRNSDKLIARKKDWDPKKYGGFDSPTVAYSVLVVAKVEKGKSKKLKSVKELLGITIMERSSFEKNPIDFLEAKGYKEVKKDLIIKLPKYSLFELENGRKRMLASAGELQKGNELALPSKYVNFLYLASHYEKLKGSPEDNEQKQLFVEQHKHYLDEIIEQISEFSKRVILADANLDKVLSAYNKHRDKPIREQAENIIHLFTLTNLGAPAAFKYFDTTIDRKRYTSTKEVLDATLIHQSITGLYETRIDLSQLGGDGGGGSPAPGSSGGTLNIEDEYRLHETSKEPDVPLGSTWLSDFPQAWAETGGMGLAVRQAPLIIPLKATSTPVSIKQYPMSQEARLGIKPHIQRLLDQGILVPCQSPWNTPLLPVKKPGTNDYRPVQDLREVNKRVEDIHPTVPNPYNLLSGLPPSHQWYTVLDLKDAFFCLRLHPTSQPLFAFEWRDPEMGISGQLTWTRLPQGFKNSPTLFNEALHRDLADFRIQHPDLILLQYVDDLLLAATSEQDCQRGTRALLQTLGNLGYRASAKKAQICQKQVKYLGYLLKEGQRWLTEARKETVMGQPTPKTPRQLREFLGKAGFCRLFIPGFAEMAAPLYPLTKPGTLFNWGPDQQKAYQEIKQALLTAPALGLPDLTKPFELFVDEKQGYAKGVLTQKLGPWRRPVAYLSKKLDPVAAGWPPCLRMVAAIAVLTKDAGKLTMGQPLVILAPHAVEALVKQPPDRWLSNARMTHYQAMLLDTDRVQFGPVVALNPATLLPLPEKEAPHDCLEILAETHGTRPDLTDQPIPDADYTWYTDGSSFLQEGQRRAGAAVTTETEVIWARALPAGTSAQRAELIALTQALKMAEGKKLNVYTDSRYAFATAHVHGEIYRRRGWLTSEGREIKNKNEILALLKALFLPKRLSIIHCPGHQKGNSAEARGNRMADQAAREAAMKAVLETSTLLAGKRTADGSEFEKRTADGSEFESPKKKAKVE

SEQ ID NO: 4526 - protein, 2125 aa, synthetic construct
MPAAKRVKLDGGDKKYSIGLDIGTNSVGWAVITDEYKVPSKKFKVLGNTDRHSIKKNLIGALLFDSGETAEATRLKRTARRRYTRRKNRICYLQEIFSNEMAKVDDSFFHRLEESFLVEEDKKHERHPIFGNIVDEVAYHEKYPTIYHLRKKLVDSTDKADLRLIYLALAHMIKFRGHFLIEGDLNPDNSDVDKLFIQLVQTYNQLFEENPINASGVDAKAILSARLSKSRRLENLIAQLPGEKKNGLFGNLIALSLGLTPNFKSNFDLAEDAKLQLSKDTYDDDLDNLLAQIGDQYADLFLAAKNLSDAILLSDILRVNTEITKAPLSASMIKRYDEHHQDLTLLKALVRQQLPEKYKEIFFDQSKNGYAGYIDGGASQEEFYKFIKPILEKMDGTEELLVKLNREDLLRKQRTFDNGSIPHQIHLGELHAILRRQEDFYPFLKDNREKIEKILTFRIPYYVGPLARGNSRFAWMTRKSEETITPWNFEEVVDKGASAQSFIERMTNFDKNLPNEKVLPKHSLLYEYFTVYNELTKVKYVTEGMRKPAFLSGEQKKAIVDLLFKTNRKVTVKQLKEDYFKKIECFDSVEISGVEDRFNASLGTYHDLLKIIKDKDFLDNEENEDILEDIVLTLTLFEDREMIEERLKTYAHLFDDKVMKQLKRRRYTGWGRLSRKLINGIRDKQSGKTILDFLKSDGFANRNFMQLIHDDSLTFKEDIQKAQVSGQGDSLHEHIANLAGSPAIKKGILQTVKVVDELVKVMGRHKPENIVIEMARENQTTQKGQKNSRERMKRIEEGIKELGSQILKEHPVENTQLQNEKLYLYYLQNGRDMYVDQELDINRLSDYDVDHIVPQSFLKDDSIDNKVLTRSDKARGKSDNVPSEEVVKKMKNYWRQLLNAKLITQRKFDNLTKAERGGLSELDKAGFIKRQLVETRQITKHVAQILDSRMNTKYDENDKLIREVKVITLKSKLVSDFRKDFQFYKVREINNYHHAHDAYLNAVVGTALIKKYPKLESEFVYGDYKVYDVRKMIAKSEQEIGKATAKYFFYSNIMNFFKTEITLANGEIRKRPLIETNGETGEIVWDKGRDFATVRKVLSMPQVNIVKKTEVQTGGFSKESILPKRNSDKLIARKKDWDPKKYGGFDSPTVAYSVLVVAKVEKGKSKKLKSVKELLGITIMERSSFEKNPIDFLEAKGYKEVKKDLIIKLPKYSLFELENGRKRMLASAGELQKGNELALPSKYVNFLYLASHYEKLKGSPEDNEQKQLFVEQHKHYLDEIIEQISEFSKRVILADANLDKVLSAYNKHRDKPIREQAENIIHLFTLTNLGAPAAFKYFDTTIDRKRYTSTKEVLDATLIHQSITGLYETRIDLSQLGGDGGGSSPAPGGSGGLLGRDLLTKLKAQIQFSTEGPQVTWEDRPAMCLVLNLEEEYRLHEKPVPPSIDPSWLQLFPMVWAEKAGMGLANQVPPVVVELKSDASPVAVRQYPMSKEAREGIRPHIQRFLDLGILVPCQSPWNTPLLPVKKPGTNDYRPVQDLREVNKRVQDIHPTVPNPYNLLSSLPPSHTWYSVLDLKDAFFCLKLHPNSQPLFAFEWRDPEKGNTGQLTWTRLPQGFKNSPTLFNEALHRDLASFRALNPQVVMLQYVDDLLVAAPTYRDCKEGTRRLLQELSKLGYRVSAKKAQLCREEVTYLGYLLKGGKRWLTPARKATVMKIPTPTTPRQVREFLGTAGFCRLWIPGFASLAAPLYPLTRPKVPFTWTEAHQEAFGRIKEALLSAPALALPDLTKPFALYVDEKEGVARGVLTQTLGPWRRPVAYLSKKLDPVASGWPTCLKAIAAVALLLKDADKLTLGQNVLVIAPHNLESIVRQPPDRWMTNARMTHYQSLLLNERVSFAPPAILNPATLLPVESDDTPIHICSEILAEETGTRPDLRDQPLPGVPAWYTDGSSFIMDGRRQAGAAIVDNKRTVWASNLPEGTSAQKAELIALTQALRLAEGKSINIYTDSRYAFATAHVHGAIYKQRGWLTSAGKDIKNKEEILALLEAIHLPKRVAIIHCPGHQRGTDPVATGNRKADEAAKQAAQSTRILTETTKNAGKRTADGSEFEKRTADGSEFESPKKKAKVE

SEQ ID NO: 4527 - protein, 2096 aa, synthetic construct
MPAAKRVKLDGGDKKYSIGLDIGTNSVGWAVITDEYKVPSKKFKVLGNTDRHSIKKNLIGALLFDSGETAEATRLKRTARRRYTRRKNRICYLQEIFSNEMAKVDDSFFHRLEESFLVEEDKKHERHPIFGNIVDEVAYHEKYPTIYHLRKKLVDSTDKADLRLIYLALAHMIKFRGHFLIEGDLNPDNSDVDKLFIQLVQTYNQLFEENPINASGVDAKAILSARLSKSRRLENLIAQLPGEKKNGLFGNLIALSLGLTPNFKSNFDLAEDAKLQLSKDTYDDDLDNLLAQIGDQYADLFLAAKNLSDAILLSDILRVNTEITKAPLSASMIKRYDEHHQDLTLLKALVRQQLPEKYKEIFFDQSKNGYAGYIDGGASQEEFYKFIKPILEKMDGTEELLVKLNREDLLRKQRTFDNGSIPHQIHLGELHAILRRQEDFYPFLKDNREKIEKILTFRIPYYVGPLARGNSRFAWMTRKSEETITPWNFEEVVDKGASAQSFIERMTNFDKNLPNEKVLPKHSLLYEYFTVYNELTKVKYVTEGMRKPAFLSGEQKKAIVDLLFKTNRKVTVKQLKEDYFKKIECFDSVEISGVEDRFNASLGTYHDLLKIIKDKDFLDNEENEDILEDIVLTLTLFEDREMIEERLKTYAHLFDDKVMKQLKRRRYTGWGRLSRKLINGIRDKQSGKTILDFLKSDGFANRNFMQLIHDDSLTFKEDIQKAQVSGQGDSLHEHIANLAGSPAIKKGILQTVKVVDELVKVMGRHKPENIVIEMARENQTTQKGQKNSRERMKRIEEGIKELGSQILKEHPVENTQLQNEKLYLYYLQNGRDMYVDQELDINRLSDYDVDHIVPQSFLKDDSIDNKVLTRSDKARGKSDNVPSEEVVKKMKNYWRQLLNAKLITQRKFDNLTKAERGGLSELDKAGFIKRQLVETRQITKHVAQILDSRMNTKYDENDKLIREVKVITLKSKLVSDFRKDFQFYKVREINNYHHAHDAYLNAVVGTALIKKYPKLESEFVYGDYKVYDVRKMIAKSEQEIGKATAKYFFYSNIMNFFKTEITLANGEIRKRPLIETNGETGEIVWDKGRDFATVRKVLSMPQVNIVKKTEVQTGGFSKESILPKRNSDKLIARKKDWDPKKYGGFDSPTVAYSVLVVAKVEKGKSKKLKSVKELLGITIMERSSFEKNPIDFLEAKGYKEVKKDLIIKLPKYSLFELENGRKRMLASAGELQKGNELALPSKYVNFLYLASHYEKLKGSPEDNEQKQLFVEQHKHYLDEIIEQISEFSKRVILADANLDKVLSAYNKHRDKPIREQAENIIHLFTLTNLGAPAAFKYFDTTIDRKRYTSTKEVLDATLIHQSITGLYETRIDLSQLGGDGGEAAAKPAPGGSGGTLNIEDEYRLHETSKEPDVPLGSTWLSDFPQAWAETGGMGLAVRQAPLIIPLKATSTPVSIKQYPMSQEARLGIKPHIQRLLDQGILVPCQSPWNTPLLPVKKPGTNDYRPVQDLREVNKRVEDIHPTVPNPYNLLSGLPPSHQWYTVLDLKDAFFCLRLHPTSQPLFAFEWRDPEMGISGQLTWTRLPQGFKNSPTLFNEALHRDLADFRIQHPDLILLQYVDDLLLAATSEQDCQRGTRALLQTLGNLGYRASAKKAQICQKQVKYLGYLLKEGQRWLTEARKETVMGQPTPKTPRQLREFLGKAGFCRLFIPGFAEMAAPLYPLTKPGTLFNWGPDQQKAYQEIKQALLTAPALGLPDLTKPFELFVDEKQGYAKGVLTQKLGPWRRPVAYLSKKLDPVAAGWPPCLRMVAAIAVLTKDAGKLTMGQPLVILAPHAVEALVKQPPDRWLSNARMTHYQAMLLDTDRVQFGPVVALNPATLLPLPEKEAPHDCLEILAETHGTRPDLTDQPIPDADYTWYTDGSSFLQEGQRRAGAAVTTETEVIWARALPAGTSAQRAELIALTQALKMAEGKKLNVYTDSRYAFATAHVHGEIYRRRGWLTSEGREIKNKNEILALLKALFLPKRLSIIHCPGHQKGNSAEARGNRMADQAAREAAMKAVLETSTLLAGKRTADGSEFEKRTADGSEFESPKKKAKVE

SEQ ID NO: 4528 - protein, 2096 aa, synthetic construct
MPAAKRVKLDGGDKKYSIGLDIGTNSVGWAVITDEYKVPSKKFKVLGNTDRHSIKKNLIGALLFDSGETAEATRLKRTARRRYTRRKNRICYLQEIFSNEMAKVDDSFFHRLEESFLVEEDKKHERHPIFGNIVDEVAYHEKYPTIYHLRKKLVDSTDKADLRLIYLALAHMIKFRGHFLIEGDLNPDNSDVDKLFIQLVQTYNQLFEENPINASGVDAKAILSARLSKSRRLENLIAQLPGEKKNGLFGNLIALSLGLTPNFKSNFDLAEDAKLQLSKDTYDDDLDNLLAQIGDQYADLFLAAKNLSDAILLSDILRVNTEITKAPLSASMIKRYDEHHQDLTLLKALVRQQLPEKYKEIFFDQSKNGYAGYIDGGASQEEFYKFIKPILEKMDGTEELLVKLNREDLLRKQRTFDNGSIPHQIHLGELHAILRRQEDFYPFLKDNREKIEKILTFRIPYYVGPLARGNSRFAWMTRKSEETITPWNFEEVVDKGASAQSFIERMTNFDKNLPNEKVLPKHSLLYEYFTVYNELTKVKYVTEGMRKPAFLSGEQKKAIVDLLFKTNRKVTVKQLKEDYFKKIECFDSVEISGVEDRFNASLGTYHDLLKIIKDKDFLDNEENEDILEDIVLTLTLFEDREMIEERLKTYAHLFDDKVMKQLKRRRYTGWGRLSRKLINGIRDKQSGKTILDFLKSDGFANRNFMQLIHDDSLTFKEDIQKAQVSGQGDSLHEHIANLAGSPAIKKGILQTVKVVDELVKVMGRHKPENIVIEMARENQTTQKGQKNSRERMKRIEEGIKELGSQILKEHPVENTQLQNEKLYLYYLQNGRDMYVDQELDINRLSDYDVDHIVPQSFLKDDSIDNKVLTRSDKARGKSDNVPSEEVVKKMKNYWRQLLNAKLITQRKFDNLTKAERGGLSELDKAGFIKRQLVETRQITKHVAQILDSRMNTKYDENDKLIREVKVITLKSKLVSDFRKDFQFYKVREINNYHHAHDAYLNAVVGTALIKKYPKLESEFVYGDYKVYDVRKMIAKSEQEIGKATAKYFFYSNIMNFFKTEITLANGEIRKRPLIETNGETGEIVWDKGRDFATVRKVLSMPQVNIVKKTEVQTGGFSKESILPKRNSDKLIARKKDWDPKKYGGFDSPTVAYSVLVVAKVEKGKSKKLKSVKELLGITIMERSSFEKNPIDFLEAKGYKEVKKDLIIKLPKYSLFELENGRKRMLASAGELQKGNELALPSKYVNFLYLASHYEKLKGSPEDNEQKQLFVEQHKHYLDEIIEQISEFSKRVILADANLDKVLSAYNKHRDKPIREQAENIIHLFTLTNLGAPAAFKYFDTTIDRKRYTSTKEVLDATLIHQSITGLYETRIDLSQLGGDGGPAPEAAAKGGSGGTLNLEDEYRLYETSAEPEVSPGSTWLSDFPQAWAETGGMGLAVRQAPLIIPLKATSTPVSIKQYPMSQEAKLGIKPHIQRLLDQGILVPCQSPWNTPLLPVKKPGTNDYRPVQDLREVNKRVEDIHPTVPNPYNLLSGLPPSHRWYTVLDLKDAFFCLRLHPTSQPLFAFEWRDPGMGISGQLTWTRLPQGFKNSPTLFNEALHRDLADFRIQHPDLILLQYVDDILLAATSELDCQQGTRALLLTLGNLGYRASAKKAQLCQKQVKYLGYLLKEGQRWLTEARKETVMGQPTPKTPRQLREFLGKAGFCRLFIPGFAEMAAPLYPLTKPGTLFNWGPDQQKAYQEIKQALLTAPALGLPDLTKPFELFVDEKQGYAKGVLTQKLGPWRRPVAYLSKKLDPVAAGWPPCLRMVAAIAVLRKDAGKLTMGQPLVILAPHAVEALVKQPPDRWLSNARMTHYQAMLLDTDRVQFGPVVALNPATLLPLPEEGAPHDCLEILAETHGTRPDLTDQPIPDADHTWYTDGSSFLQEGQRKAGAAVTTETEVIWARALPAGTSAQRAELIALTQALKMAEGKRLNVYTDSRYAFATAHIHGEIYRRRGWLTSEGREIKNKSEILALLKALFLPKRLSIIHCLGHQKGDSAEARGNRLADQAAREAAIKTPPDTSTLLAGKRTADGSEFEKRTADGSEFESPKKKAKVE

SEQ ID NO: 4529 - protein, 2088 aa, synthetic construct
MPAAKRVKLDGGDKKYSIGLDIGTNSVGWAVITDEYKVPSKKFKVLGNTDRHSIKKNLIGALLFDSGETAEATRLKRTARRRYTRRKNRICYLQEIFSNEMAKVDDSFFHRLEESFLVEEDKKHERHPIFGNIVDEVAYHEKYPTIYHLRKKLVDSTDKADLRLIYLALAHMIKFRGHFLIEGDLNPDNSDVDKLFIQLVQTYNQLFEENPINASGVDAKAILSARLSKSRRLENLIAQLPGEKKNGLFGNLIALSLGLTPNFKSNFDLAEDAKLQLSKDTYDDDLDNLLAQIGDQYADLFLAAKNLSDAILLSDILRVNTEITKAPLSASMIKRYDEHHQDLTLLKALVRQQLPEKYKEIFFDQSKNGYAGYIDGGASQEEFYKFIKPILEKMDGTEELLVKLNREDLLRKQRTFDNGSIPHQIHLGELHAILRRQEDFYPFLKDNREKIEKILTFRIPYYVGPLARGNSRFAWMTRKSEETITPWNFEEVVDKGASAQSFIERMTNFDKNLPNEKVLPKHSLLYEYFTVYNELTKVKYVTEGMRKPAFLSGEQKKAIVDLLFKTNRKVTVKQLKEDYFKKIECFDSVEISGVEDRFNASLGTYHDLLKIIKDKDFLDNEENEDILEDIVLTLTLFEDREMIEERLKTYAHLFDDKVMKQLKRRRYTGWGRLSRKLINGIRDKQSGKTILDFLKSDGFANRNFMQLIHDDSLTFKEDIQKAQVSGQGDSLHEHIANLAGSPAIKKGILQTVKVVDELVKVMGRHKPENIVIEMARENQTTQKGQKNSRERMKRIEEGIKELGSQILKEHPVENTQLQNEKLYLYYLQNGRDMYVDQELDINRLSDYDVDHIVPQSFLKDDSIDNKVLTRSDKARGKSDNVPSEEVVKKMKNYWRQLLNAKLITQRKFDNLTKAERGGLSELDKAGFIKRQLVETRQITKHVAQILDSRMNTKYDENDKLIREVKVITLKSKLVSDFRKDFQFYKVREINNYHHAHDAYLNAVVGTALIKKYPKLESEFVYGDYKVYDVRKMIAKSEQEIGKATAKYFFYSNIMNFFKTEITLANGEIRKRPLIETNGETGEIVWDKGRDFATVRKVLSMPQVNIVKKTEVQTGGFSKESILPKRNSDKLIARKKDWDPKKYGGFDSPTVAYSVLVVAKVEKGKSKKLKSVKELLGITIMERSSFEKNPIDFLEAKGYKEVKKDLIIKLPKYSLFELENGRKRMLASAGELQKGNELALPSKYVNFLYLASHYEKLKGSPEDNEQKQLFVEQHKHYLDEIIEQISEFSKRVILADANLDKVLSAYNKHRDKPIREQAENIIHLFTLTNLGAPAAFKYFDTTIDRKRYTSTKEVLDATLIHQSITGLYETRIDLSQLGGDGGPAPEAAAKGGSGGLDDEYRLYSPLVKPDQNIQFWLEQFPQAWAETAGMGLAKQVPPQVIQLKASATPVSVRQYPLSKEAQEGIRPHVQRLIQQGILVPVQSPWNTPLLPVRKPGTNDYRPVQDLREVNKRVQDIHPTVPNPYNLLCALPPQRSWYTVLDLKDAFFCLRLHPTSQPLFAFEWRDPGTGRTGQLTWTRLPQGFKNSPTIFNEALHRDLANFRIQHPQVTLLQYVDDLLLAGATKQDCLEGTKALLLELSDLGYRASAKKAQICRREVTYLGYSLRDGQRWLTEARKKTVVQIPAPTTAKQVREFLGKAGFCRLFIPGFATLAAPLYPLTKPKGEFSWAPEHQKAFDAIKKALLSAPALALPDVTKPFTLYVDERKGVARGVLTQTLGPWRRPVAYLSKKLDPVASGWPVCLKAIAAVAILVKDADKLTLGQNITVIAPHALENIVRQPPDRWMTNARMTHYQSLLLTERVTFAPPAALNPATLLPEETDEPVTHDCHQLLIEETGVRKDLTDIPLTGEVLTWFTDGSSYVVEGKRMAGAAVVDGTRTIWASSLPEGTSAQKAELMALTQALRLAEGKSINIYTDSRYAFATAHVHGAIYKQRGWLTSAGREIKNKEEILSLLEALHLPKRLAIIHCPGHQKAKDPISRGNQMADRVAKQAAQGVNLLPAGKRTADGSEFEKRTADGSEFESPKKKAKVE

SEQ ID NO: 4530 - protein, 2096 aa, synthetic construct
MPAAKRVKLDGGDKKYSIGLDIGTNSVGWAVITDEYKVPSKKFKVLGNTDRHSIKKNLIGALLFDSGETAEATRLKRTARRRYTRRKNRICYLQEIFSNEMAKVDDSFFHRLEESFLVEEDKKHERHPIFGNIVDEVAYHEKYPTIYHLRKKLVDSTDKADLRLIYLALAHMIKFRGHFLIEGDLNPDNSDVDKLFIQLVQTYNQLFEENPINASGVDAKAILSARLSKSRRLENLIAQLPGEKKNGLFGNLIALSLGLTPNFKSNFDLAEDAKLQLSKDTYDDDLDNLLAQIGDQYADLFLAAKNLSDAILLSDILRVNTEITKAPLSASMIKRYDEHHQDLTLLKALVRQQLPEKYKEIFFDQSKNGYAGYIDGGASQEEFYKFIKPILEKMDGTEELLVKLNREDLLRKQRTFDNGSIPHQIHLGELHAILRRQEDFYPFLKDNREKIEKILTFRIPYYVGPLARGNSRFAWMTRKSEETITPWNFEEVVDKGASAQSFIERMTNFDKNLPNEKVLPKHSLLYEYFTVYNELTKVKYVTEGMRKPAFLSGEQKKAIVDLLFKTNRKVTVKQLKEDYFKKIECFDSVEISGVEDRFNASLGTYHDLLKIIKDKDFLDNEENEDILEDIVLTLTLFEDREMIEERLKTYAHLFDDKVMKQLKRRRYTGWGRLSRKLINGIRDKQSGKTILDFLKSDGFANRNFMQLIHDDSLTFKEDIQKAQVSGQGDSLHEHIANLAGSPAIKKGILQTVKVVDELVKVMGRHKPENIVIEMARENQTTQKGQKNSRERMKRIEEGIKELGSQILKEHPVENTQLQNEKLYLYYLQNGRDMYVDQELDINRLSDYDVDHIVPQSFLKDDSIDNKVLTRSDKARGKSDNVPSEEVVKKMKNYWRQLLNAKLITQRKFDNLTKAERGGLSELDKAGFIKRQLVETRQITKHVAQILDSRMNTKYDENDKLIREVKVITLKSKLVSDFRKDFQFYKVREINNYHHAHDAYLNAVVGTALIKKYPKLESEFVYGDYKVYDVRKMIAKSEQEIGKATAKYFFYSNIMNFFKTEITLANGEIRKRPLIETNGETGEIVWDKGRDFATVRKVLSMPQVNIVKKTEVQTGGFSKESILPKRNSDKLIARKKDWDPKKYGGFDSPTVAYSVLVVAKVEKGKSKKLKSVKELLGITIMERSSFEKNPIDFLEAKGYKEVKKDLIIKLPKYSLFELENGRKRMLASAGELQKGNELALPSKYVNFLYLASHYEKLKGSPEDNEQKQLFVEQHKHYLDEIIEQISEFSKRVILADANLDKVLSAYNKHRDKPIREQAENIIHLFTLTNLGAPAAFKYFDTTIDRKRYTSTKEVLDATLIHQSITGLYETRIDLSQLGGDGGGGGEAAAKGSSGGTLNIEDEHRLHETSKEPDVSLGSTWLSDFPQAWAETGGMGLAVRQAPLIIPLKATSTPVSIKQYPMSQEARLGIKPHIQRLLDQGILVPCQSPWNTPLLPVKKPGTNDYRPVQDLREVNKRVEDIHPTVPNPYNLLSGLPPSHQWYTVLDLKDAFFCLRLHPTSQPLFAFEWRDPEMGISGQLTWTRLPQGFKNSPTLFNEALHRDLADFRIQHPDLILLQYVDDLLLAATSELDCQQGTRALLQTLGNLGYRASAKKAQICQKQVKYLGYLLKEGQRWLTEARKETVMGQPTPKTPRQLREFLGTAGFCRLWIPGFAEMAAPLYPLTKPGTLFNWGPDQQKAYQEIKQALLTAPALGLPDLTKPFELFVDEKQGYAKGVLTQKLGPWRRPVAYLSKKLDPVAAGWPPCLRMVAAIAVLTKDAGKLTMGQPLVILAPHAVEALVKQPPDRWLSNARMTHYQALLLDTDRVQFGPVVALNPATLLPLPEEGLQHNCLDILAEAHGTRPDLTDQPLPDADHTWYTDGSSLLQEGQRKAGAAVTTETEVIWAKALPAGTSAQRAELIALTQALKMAEGKKLNVYTDSRYAFATAHIHGEIYRRRGWLTSEGKEIKNKDEILALLKALFLPKRLSIIHCPGHQKGHSAEARGNRMADQAARKAAITETPDTSTLLAGKRTADGSEFEKRTADGSEFESPKKKAKVE

SEQ ID NO: 4531 - protein, 2094 aa, synthetic construct
MPAAKRVKLDGGDKKYSIGLDIGTNSVGWAVITDEYKVPSKKFKVLGNTDRHSIKKNLIGALLFDSGETAEATRLKRTARRRYTRRKNRICYLQEIFSNEMAKVDDSFFHRLEESFLVEEDKKHERHPIFGNIVDEVAYHEKYPTIYHLRKKLVDSTDKADLRLIYLALAHMIKFRGHFLIEGDLNPDNSDVDKLFIQLVQTYNQLFEENPINASGVDAKAILSARLSKSRRLENLIAQLPGEKKNGLFGNLIALSLGLTPNFKSNFDLAEDAKLQLSKDTYDDDLDNLLAQIGDQYADLFLAAKNLSDAILLSDILRVNTEITKAPLSASMIKRYDEHHQDLTLLKALVRQQLPEKYKEIFFDQSKNGYAGYIDGGASQEEFYKFIKPILEKMDGTEELLVKLNREDLLRKQRTFDNGSIPHQIHLGELHAILRRQEDFYPFLKDNREKIEKILTFRIPYYVGPLARGNSRFAWMTRKSEETITPWNFEEVVDKGASAQSFIERMTNFDKNLPNEKVLPKHSLLYEYFTVYNELTKVKYVTEGMRKPAFLSGEQKKAIVDLLFKTNRKVTVKQLKEDYFKKIECFDSVEISGVEDRFNASLGTYHDLLKIIKDKDFLDNEENEDILEDIVLTLTLFEDREMIEERLKTYAHLFDDKVMKQLKRRRYTGWGRLSRKLINGIRDKQSGKTILDFLKSDGFANRNFMQLIHDDSLTFKEDIQKAQVSGQGDSLHEHIANLAGSPAIKKGILQTVKVVDELVKVMGRHKPENIVIEMARENQTTQKGQKNSRERMKRIEEGIKELGSQILKEHPVENTQLQNEKLYLYYLQNGRDMYVDQELDINRLSDYDVDHIVPQSFLKDDSIDNKVLTRSDKARGKSDNVPSEEVVKKMKNYWRQLLNAKLITQRKFDNLTKAERGGLSELDKAGFIKRQLVETRQITKHVAQILDSRMNTKYDENDKLIREVKVITLKSKLVSDFRKDFQFYKVREINNYHHAHDAYLNAVVGTALIKKYPKLESEFVYGDYKVYDVRKMIAKSEQEIGKATAKYFFYSNIMNFFKTEITLANGEIRKRPLIETNGETGEIVWDKGRDFATVRKVLSMPQVNIVKKTEVQTGGFSKESILPKRNSDKLIARKKDWDPKKYGGFDSPTVAYSVLVVAKVEKGKSKKLKSVKELLGITIMERSSFEKNPIDFLEAKGYKEVKKDLIIKLPKYSLFELENGRKRMLASAGELQKGNELALPSKYVNFLYLASHYEKLKGSPEDNEQKQLFVEQHKHYLDEIIEQISEFSKRVILADANLDKVLSAYNKHRDKPIREQAENIIHLFTLTNLGAPAAFKYFDTTIDRKRYTSTKEVLDATLIHQSITGLYETRIDLSQLGGDGGEAAAKGGGGSSGGVLNLEEEYRLHEKPVPSSIDPSWLQLFPTVWAERAGMGLANQVPPVVVELRSGASPVAVRQYPMSKEAREGIRPHIQRFLDLGVLVPCQSPWNTPLLPVKKPGTNDYRPVQDLREINKRVQDIHPTVPNPYNLLSSLPPSHTWYSVLDLKDAFFCLKLHPNSQPLFAFEWRDPEKGNTGQLTWTRLPQGFKNSPTLFNEALHRDLAPFRALNPQVVLLQYVDDLLVAAPTYRDCKEGTQKLLQELSKLGYRVSAKKAQLCQKEVTYLGYLLKEGKRWLTPARKATVMKIPPPTTPRQVREFLGKAGFCRLFIPGFASLAAPLYPLTKPSIPFIWTEEHQKAFDRIKEALLSAPALALPDLTKPFTLYVDERAGVARGVLTQTLGPWRRPVAYLSKKLDPVASGWPTCLKAVAAVALLLKDADKLTLGQNVTVIASHSLESIVRQPPDRWMTNARMTHYQSLLLNERVSFAPPAVLNPATLLPVESEATPVHRCSEILAEETGTRRDLKDQPLPGVPAWYTDGSSFIAEGKRRAGAAIVDGKRTVWASSLPEGTSAQKAELVALTQALRLAEGKDINIYTDSRYAFATAHIHGAIYKQRGWLTSAGKDIKNKEEILALLEAIHLPKRVAIIHCPGHQKGNDPVATGNRRADEAAKQAALSTRVLAETTKPAGKRTADGSEFEKRTADGSEFESPKKKAKVE

SEQ ID NO: 4532 - protein, 2088 aa, synthetic construct
MPAAKRVKLDGGDKKYSIGLDIGTNSVGWAVITDEYKVPSKKFKVLGNTDRHSIKKNLIGALLFDSGETAEATRLKRTARRRYTRRKNRICYLQEIFSNEMAKVDDSFFHRLEESFLVEEDKKHERHPIFGNIVDEVAYHEKYPTIYHLRKKLVDSTDKADLRLIYLALAHMIKFRGHFLIEGDLNPDNSDVDKLFIQLVQTYNQLFEENPINASGVDAKAILSARLSKSRRLENLIAQLPGEKKNGLFGNLIALSLGLTPNFKSNFDLAEDAKLQLSKDTYDDDLDNLLAQIGDQYADLFLAAKNLSDAILLSDILRVNTEITKAPLSASMIKRYDEHHQDLTLLKALVRQQLPEKYKEIFFDQSKNGYAGYIDGGASQEEFYKFIKPILEKMDGTEELLVKLNREDLLRKQRTFDNGSIPHQIHLGELHAILRRQEDFYPFLKDNREKIEKILTFRIPYYVGPLARGNSRFAWMTRKSEETITPWNFEEVVDKGASAQSFIERMTNFDKNLPNEKVLPKHSLLYEYFTVYNELTKVKYVTEGMRKPAFLSGEQKKAIVDLLFKTNRKVTVKQLKEDYFKKIECFDSVEISGVEDRFNASLGTYHDLLKIIKDKDFLDNEENEDILEDIVLTLTLFEDREMIEERLKTYAHLFDDKVMKQLKRRRYTGWGRLSRKLINGIRDKQSGKTILDFLKSDGFANRNFMQLIHDDSLTFKEDIQKAQVSGQGDSLHEHIANLAGSPAIKKGILQTVKVVDELVKVMGRHKPENIVIEMARENQTTQKGQKNSRERMKRIEEGIKELGSQILKEHPVENTQLQNEKLYLYYLQNGRDMYVDQELDINRLSDYDVDHIVPQSFLKDDSIDNKVLTRSDKARGKSDNVPSEEVVKKMKNYWRQLLNAKLITQRKFDNLTKAERGGLSELDKAGFIKRQLVETRQITKHVAQILDSRMNTKYDENDKLIREVKVITLKSKLVSDFRKDFQFYKVREINNYHHAHDAYLNAVVGTALIKKYPKLESEFVYGDYKVYDVRKMIAKSEQEIGKATAKYFFYSNIMNFFKTEITLANGEIRKRPLIETNGETGEIVWDKGRDFATVRKVLSMPQVNIVKKTEVQTGGFSKESILPKRNSDKLIARKKDWDPKKYGGFDSPTVAYSVLVVAKVEKGKSKKLKSVKELLGITIMERSSFEKNPIDFLEAKGYKEVKKDLIIKLPKYSLFELENGRKRMLASAGELQKGNELALPSKYVNFLYLASHYEKLKGSPEDNEQKQLFVEQHKHYLDEIIEQISEFSKRVILADANLDKVLSAYNKHRDKPIREQAENIIHLFTLTNLGAPAAFKYFDTTIDRKRYTSTKEVLDATLIHQSITGLYETRIDLSQLGGDGGGSSGGGPAPGGTLQLDDEYRLYSPLVKPDQNIQFWLEQFPQAWAETAGMGLAKQVPPQVIQLKASATPVSVRQYPLSKEAQEGIRPHVQRLIQQGILVPVQSPWNTPLLPVRKPGTNDYRPVQDLREVNKRVQDIHPTVPNPYNLLCALPPQRSWYTVLDLKDAFFCLRLHPTSQPLFAFEWRDPGTGRTGQLTWTRLPQGFKNSPTIFNEALHRDLANFRIQHPQVTLLQYVDDLLLAGATKQDCLEGTKALLLELSDLGYRASAKKAQICRREVTYLGYSLRDGQRWLTEARKKTVVQIPAPTTAKQVREFLGTAGFCRLWIPGFATLAAPLYPLTKPKGEFSWAPEHQKAFDAIKKALLSAPALALPDVTKPFTLYVDERKGVARGVLTQTLGPWRRPVAYLSKKLDPVASGWPVCLKAIAAVAILVKDADKLTLGQNITVIAPHALENIVRQPPDRWMTNARMTHYQSLLLTERVTFAPPAALNPATLLPEETDEPVTHDCHQLLIEETGVRKDLTDIPLTGEVLTWFTDGSSYVVEGKRMAGAAVVDGTRTIWASSLPEGTSAQKAELMALTQALRLAEGKSINIYTDSRYAFATAHVHGAIYKQRGWLTSAGREIKNKEEILSLLEALHLPKRLAIIHCPGHQKAKDPISRGNQMADRVAKQAAQGVNLLAGKRTADGSEFEKRTADGSEFESPKKKAKVE

SEQ ID NO: 4533 - protein, 2094 aa, synthetic construct
MPAAKRVKLDGGDKKYSIGLDIGTNSVGWAVITDEYKVPSKKFKVLGNTDRHSIKKNLIGALLFDSGETAEATRLKRTARRRYTRRKNRICYLQEIFSNEMAKVDDSFFHRLEESFLVEEDKKHERHPIFGNIVDEVAYHEKYPTIYHLRKKLVDSTDKADLRLIYLALAHMIKFRGHFLIEGDLNPDNSDVDKLFIQLVQTYNQLFEENPINASGVDAKAILSARLSKSRRLENLIAQLPGEKKNGLFGNLIALSLGLTPNFKSNFDLAEDAKLQLSKDTYDDDLDNLLAQIGDQYADLFLAAKNLSDAILLSDILRVNTEITKAPLSASMIKRYDEHHQDLTLLKALVRQQLPEKYKEIFFDQSKNGYAGYIDGGASQEEFYKFIKPILEKMDGTEELLVKLNREDLLRKQRTFDNGSIPHQIHLGELHAILRRQEDFYPFLKDNREKIEKILTFRIPYYVGPLARGNSRFAWMTRKSEETITPWNFEEVVDKGASAQSFIERMTNFDKNLPNEKVLPKHSLLYEYFTVYNELTKVKYVTEGMRKPAFLSGEQKKAIVDLLFKTNRKVTVKQLKEDYFKKIECFDSVEISGVEDRFNASLGTYHDLLKIIKDKDFLDNEENEDILEDIVLTLTLFEDREMIEERLKTYAHLFDDKVMKQLKRRRYTGWGRLSRKLINGIRDKQSGKTILDFLKSDGFANRNFMQLIHDDSLTFKEDIQKAQVSGQGDSLHEHIANLAGSPAIKKGILQTVKVVDELVKVMGRHKPENIVIEMARENQTTQKGQKNSRERMKRIEEGIKELGSQILKEHPVENTQLQNEKLYLYYLQNGRDMYVDQELDINRLSDYDVDHIVPQSFLKDDSIDNKVLTRSDKARGKSDNVPSEEVVKKMKNYWRQLLNAKLITQRKFDNLTKAERGGLSELDKAGFIKRQLVETRQITKHVAQILDSRMNTKYDENDKLIREVKVITLKSKLVSDFRKDFQFYKVREINNYHHAHDAYLNAVVGTALIKKYPKLESEFVYGDYKVYDVRKMIAKSEQEIGKATAKYFFYSNIMNFFKTEITLANGEIRKRPLIETNGETGEIVWDKGRDFATVRKVLSMPQVNIVKKTEVQTGGFSKESILPKRNSDKLIARKKDWDPKKYGGFDSPTVAYSVLVVAKVEKGKSKKLKSVKELLGITIMERSSFEKNPIDFLEAKGYKEVKKDLIIKLPKYSLFELENGRKRMLASAGELQKGNELALPSKYVNFLYLASHYEKLKGSPEDNEQKQLFVEQHKHYLDEIIEQISEFSKRVILADANLDKVLSAYNKHRDKPIREQAENIIHLFTLTNLGAPAAFKYFDTTIDRKRYTSTKEVLDATLIHQSITGLYETRIDLSQLGGDGGPAPGSSGGGGGTLNLEDEYRLYETSAEPEVSPGSTWLSDFPQAWAETGGMGLAVRQAPLIIPLKATSTPVSIKQYPMSQEAKLGIKPHIQRLLDQGILVPCQSPWNTPLLPVKKPGTNDYRPVQDLREVNKRVEDIHPTVPNPYNLLSGLPPSHRWYTVLDLKDAFFCLRLHPTSQPLFAFEWRDPGMGISGQLTWTRLPQGFKNSPTLFNEALHRDLADFRIQHPDLILLQYVDDILLAATSELDCQQGTRALLLTLGNLGYRASAKKAQLCQKQVKYLGYLLKEGQRWLTEARKETVMGQPTPKTPRQLREFLGKAGFCRLFIPGFAEMAAPLYPLTKPGTLFNWGPDQQKAYQEIKQALLTAPALGLPDLTKPFELFVDEKQGYAKGVLTQKLGPWRRPVAYLSKKLDPVAAGWPPCLRMVAAIAVLRKDAGKLTMGQPLVILAPHAVEALVKQPPDRWLSNARMTHYQAMLLDTDRVQFGPVVALNPATLLPLPEEGAPHDCLEILAETHGTRPDLTDQPIPDADHTWYTDGSSFLQEGQRKAGAAVTTETEVIWARALPAGTSAQRAELIALTQALKMAEGKRLNVYTDSRYAFATAHIHGEIYRRRGWLTSEGREIKNKSEILALLKALFLPKRLSIIHCLGHQKGDSAEARGNRLADQAAREAAIKTPPDTSTLLAGKRTADGSEFEKRTADGSEFESPKKKAKVE

SEQ ID NO: 4534 - protein, 2096 aa, synthetic construct
MPAAKRVKLDGGDKKYSIGLDIGTNSVGWAVITDEYKVPSKKFKVLGNTDRHSIKKNLIGALLFDSGETAEATRLKRTARRRYTRRKNRICYLQEIFSNEMAKVDDSFFHRLEESFLVEEDKKHERHPIFGNIVDEVAYHEKYPTIYHLRKKLVDSTDKADLRLIYLALAHMIKFRGHFLIEGDLNPDNSDVDKLFIQLVQTYNQLFEENPINASGVDAKAILSARLSKSRRLENLIAQLPGEKKNGLFGNLIALSLGLTPNFKSNFDLAEDAKLQLSKDTYDDDLDNLLAQIGDQYADLFLAAKNLSDAILLSDILRVNTEITKAPLSASMIKRYDEHHQDLTLLKALVRQQLPEKYKEIFFDQSKNGYAGYIDGGASQEEFYKFIKPILEKMDGTEELLVKLNREDLLRKQRTFDNGSIPHQIHLGELHAILRRQEDFYPFLKDNREKIEKILTFRIPYYVGPLARGNSRFAWMTRKSEETITPWNFEEVVDKGASAQSFIERMTNFDKNLPNEKVLPKHSLLYEYFTVYNELTKVKYVTEGMRKPAFLSGEQKKAIVDLLFKTNRKVTVKQLKEDYFKKIECFDSVEISGVEDRFNASLGTYHDLLKIIKDKDFLDNEENEDILEDIVLTLTLFEDREMIEERLKTYAHLFDDKVMKQLKRRRYTGWGRLSRKLINGIRDKQSGKTILDFLKSDGFANRNFMQLIHDDSLTFKEDIQKAQVSGQGDSLHEHIANLAGSPAIKKGILQTVKVVDELVKVMGRHKPENIVIEMARENQTTQKGQKNSRERMKRIEEGIKELGSQILKEHPVENTQLQNEKLYLYYLQNGRDMYVDQELDINRLSDYDVDHIVPQSFLKDDSIDNKVLTRSDKARGKSDNVPSEEVVKKMKNYWRQLLNAKLITQRKFDNLTKAERGGLSELDKAGFIKRQLVETRQITKHVAQILDSRMNTKYDENDKLIREVKVITLKSKLVSDFRKDFQFYKVREINNYHHAHDAYLNAVVGTALIKKYPKLESEFVYGDYKVYDVRKMIAKSEQEIGKATAKYFFYSNIMNFFKTEITLANGEIRKRPLIETNGETGEIVWDKGRDFATVRKVLSMPQVNIVKKTEVQTGGFSKESILPKRNSDKLIARKKDWDPKKYGGFDSPTVAYSVLVVAKVEKGKSKKLKSVKELLGITIMERSSFEKNPIDFLEAKGYKEVKKDLIIKLPKYSLFELENGRKRMLASAGELQKGNELALPSKYVNFLYLASHYEKLKGSPEDNEQKQLFVEQHKHYLDEIIEQISEFSKRVILADANLDKVLSAYNKHRDKPIREQAENIIHLFTLTNLGAPAAFKYFDTTIDRKRYTSTKEVLDATLIHQSITGLYETRIDLSQLGGDGGGGGPAPEAAAKGGTLNIEDEHRLHETSKEPDVSLGSTWLSDFPQAWAETGGMGLAVRQAPLIIPLKATSTPVSIKQYPMSQEARLGIKPHIQRLLDQGILVPCQSPWNTPLLPVKKPGTNDYRPVQDLREVNKRVEDIHPTVPNPYNLLSGLPPSHQWYTVLDLKDAFFCLRLHPTSQPLFAFEWRDPEMGISGQLTWTRLPQGFKNSPTLFNEALHRDLADFRIQHPDLILLQYVDDLLLAATSELDCQQGTRALLQTLGNLGYRASAKKAQICQKQVKYLGYLLKEGQRWLTEARKETVMGQPTPKTPRQLREFLGTAGFCRLWIPGFAEMAAPLYPLTKPGTLFNWGPDQQKAYQEIKQALLTAPALGLPDLTKPFELFVDEKQGYAKGVLTQKLGPWRRPVAYLSKKLDPVAAGWPPCLRMVAAIAVLTKDAGKLTMGQPLVILAPHAVEALVKQPPDRWLSNARMTHYQALLLDTDRVQFGPVVALNPATLLPLPEEGLQHNCLDILAEAHGTRPDLTDQPLPDADHTWYTDGSSLLQEGQRKAGAAVTTETEVIWAKALPAGTSAQRAELIALTQALKMAEGKKLNVYTDSRYAFATAHIHGEIYRRRGWLTSEGKEIKNKDEILALLKALFLPKRLSIIHCPGHQKGHSAEARGNRMADQAARKAAITETPDTSTLLAGKRTADGSEFEKRTADGSEFESPKKKAKVE

SEQ ID NO: 4535 - protein, 2096 aa, synthetic construct
MPAAKRVKLDGGDKKYSIGLDIGTNSVGWAVITDEYKVPSKKFKVLGNTDRHSIKKNLIGALLFDSGETAEATRLKRTARRRYTRRKNRICYLQEIFSNEMAKVDDSFFHRLEESFLVEEDKKHERHPIFGNIVDEVAYHEKYPTIYHLRKKLVDSTDKADLRLIYLALAHMIKFRGHFLIEGDLNPDNSDVDKLFIQLVQTYNQLFEENPINASGVDAKAILSARLSKSRRLENLIAQLPGEKKNGLFGNLIALSLGLTPNFKSNFDLAEDAKLQLSKDTYDDDLDNLLAQIGDQYADLFLAAKNLSDAILLSDILRVNTEITKAPLSASMIKRYDEHHQDLTLLKALVRQQLPEKYKEIFFDQSKNGYAGYIDGGASQEEFYKFIKPILEKMDGTEELLVKLNREDLLRKQRTFDNGSIPHQIHLGELHAILRRQEDFYPFLKDNREKIEKILTFRIPYYVGPLARGNSRFAWMTRKSEETITPWNFEEVVDKGASAQSFIERMTNFDKNLPNEKVLPKHSLLYEYFTVYNELTKVKYVTEGMRKPAFLSGEQKKAIVDLLFKTNRKVTVKQLKEDYFKKIECFDSVEISGVEDRFNASLGTYHDLLKIIKDKDFLDNEENEDILEDIVLTLTLFEDREMIEERLKTYAHLFDDKVMKQLKRRRYTGWGRLSRKLINGIRDKQSGKTILDFLKSDGFANRNFMQLIHDDSLTFKEDIQKAQVSGQGDSLHEHIANLAGSPAIKKGILQTVKVVDELVKVMGRHKPENIVIEMARENQTTQKGQKNSRERMKRIEEGIKELGSQILKEHPVENTQLQNEKLYLYYLQNGRDMYVDQELDINRLSDYDVDHIVPQSFLKDDSIDNKVLTRSDKARGKSDNVPSEEVVKKMKNYWRQLLNAKLITQRKFDNLTKAERGGLSELDKAGFIKRQLVETRQITKHVAQILDSRMNTKYDENDKLIREVKVITLKSKLVSDFRKDFQFYKVREINNYHHAHDAYLNAVVGTALIKKYPKLESEFVYGDYKVYDVRKMIAKSEQEIGKATAKYFFYSNIMNFFKTEITLANGEIRKRPLIETNGETGEIVWDKGRDFATVRKVLSMPQVNIVKKTEVQTGGFSKESILPKRNSDKLIARKKDWDPKKYGGFDSPTVAYSVLVVAKVEKGKSKKLKSVKELLGITIMERSSFEKNPIDFLEAKGYKEVKKDLIIKLPKYSLFELENGRKRMLASAGELQKGNELALPSKYVNFLYLASHYEKLKGSPEDNEQKQLFVEQHKHYLDEIIEQISEFSKRVILADANLDKVLSAYNKHRDKPIREQAENIIHLFTLTNLGAPAAFKYFDTTIDRKRYTSTKEVLDATLIHQSITGLYETRIDLSQLGGDGGEAAAKGGGPAPGGTLNIEDEHRLHETSKEPDVSLGSTWLSDFPQAWAETGGMGLAVRQAPLIIPLKATSTPVSIKQYPMSQEARLGIKPHIQRLLDQGILVPCQSPWNTPLLPVKKPGTNDYRPVQDLREVNKRVEDIHPTVPNPYNLLSGLPPSHQWYTVLDLKDAFFCLRLHPTSQPLFAFEWRDPEMGISGQLTWTRLPQGFKNSPTLFNEALHRDLADFRIQHPDLILLQYVDDLLLAATSELDCQQGTRALLQTLGNLGYRASAKKAQICQKQVKYLGYLLKEGQRWLTEARKETVMGQPTPKTPRQLREFLGTAGFCRLWIPGFAEMAAPLYPLTKPGTLFNWGPDQQKAYQEIKQALLTAPALGLPDLTKPFELFVDEKQGYAKGVLTQKLGPWRRPVAYLSKKLDPVAAGWPPCLRMVAAIAVLTKDAGKLTMGQPLVILAPHAVEALVKQPPDRWLSNARMTHYQALLLDTDRVQFGPVVALNPATLLPLPEEGLQHNCLDILAEAHGTRPDLTDQPLPDADHTWYTDGSSLLQEGQRKAGAAVTTETEVIWAKALPAGTSAQRAELIALTQALKMAEGKKLNVYTDSRYAFATAHIHGEIYRRRGWLTSEGKEIKNKDEILALLKALFLPKRLSIIHCPGHQKGHSAEARGNRMADQAARKAAITETPDTSTLLAGKRTADGSEFEKRTADGSEFESPKKKAKVE

SEQ ID NO: 4536 - protein, 2096 aa, synthetic construct
MPAAKRVKLDGGDKKYSIGLDIGTNSVGWAVITDEYKVPSKKFKVLGNTDRHSIKKNLIGALLFDSGETAEATRLKRTARRRYTRRKNRICYLQEIFSNEMAKVDDSFFHRLEESFLVEEDKKHERHPIFGNIVDEVAYHEKYPTIYHLRKKLVDSTDKADLRLIYLALAHMIKFRGHFLIEGDLNPDNSDVDKLFIQLVQTYNQLFEENPINASGVDAKAILSARLSKSRRLENLIAQLPGEKKNGLFGNLIALSLGLTPNFKSNFDLAEDAKLQLSKDTYDDDLDNLLAQIGDQYADLFLAAKNLSDAILLSDILRVNTEITKAPLSASMIKRYDEHHQDLTLLKALVRQQLPEKYKEIFFDQSKNGYAGYIDGGASQEEFYKFIKPILEKMDGTEELLVKLNREDLLRKQRTFDNGSIPHQIHLGELHAILRRQEDFYPFLKDNREKIEKILTFRIPYYVGPLARGNSRFAWMTRKSEETITPWNFEEVVDKGASAQSFIERMTNFDKNLPNEKVLPKHSLLYEYFTVYNELTKVKYVTEGMRKPAFLSGEQKKAIVDLLFKTNRKVTVKQLKEDYFKKIECFDSVEISGVEDRFNASLGTYHDLLKIIKDKDFLDNEENEDILEDIVLTLTLFEDREMIEERLKTYAHLFDDKVMKQLKRRRYTGWGRLSRKLINGIRDKQSGKTILDFLKSDGFANRNFMQLIHDDSLTFKEDIQKAQVSGQGDSLHEHIANLAGSPAIKKGILQTVKVVDELVKVMGRHKPENIVIEMARENQTTQKGQKNSRERMKRIEEGIKELGSQILKEHPVENTQLQNEKLYLYYLQNGRDMYVDQELDINRLSDYDVDHIVPQSFLKDDSIDNKVLTRSDKARGKSDNVPSEEVVKKMKNYWRQLLNAKLITQRKFDNLTKAERGGLSELDKAGFIKRQLVETRQITKHVAQILDSRMNTKYDENDKLIREVKVITLKSKLVSDFRKDFQFYKVREINNYHHAHDAYLNAVVGTALIKKYPKLESEFVYGDYKVYDVRKMIAKSEQEIGKATAKYFFYSNIMNFFKTEITLANGEIRKRPLIETNGETGEIVWDKGRDFATVRKVLSMPQVNIVKKTEVQTGGFSKESILPKRNSDKLIARKKDWDPKKYGGFDSPTVAYSVLVVAKVEKGKSKKLKSVKELLGITIMERSSFEKNPIDFLEAKGYKEVKKDLIIKLPKYSLFELENGRKRMLASAGELQKGNELALPSKYVNFLYLASHYEKLKGSPEDNEQKQLFVEQHKHYLDEIIEQISEFSKRVILADANLDKVLSAYNKHRDKPIREQAENIIHLFTLTNLGAPAAFKYFDTTIDRKRYTSTKEVLDATLIHQSITGLYETRIDLSQLGGDGGEAAAKPAPGGGGGTLNIEDEYRLHETSKEPDVSLGSTWLSDFPQAWAETGGMGLAVRQAPLIIPLKATSTPVSIKQYPMSQEARLGIKPHIQRLLDQGILVPCQSPWNTPLLPVKKPGTNDYRPVQDLREVNKRVEDIHPTVPNPYNLLSGLPPSHQWYTVLDLKDAFFCLRLHPTSQPLFAFEWRDPEMGISGQLTWTRLPQGFKNSPTLFNEALHRDLAGFRIQHPDLILLQYVDDLLLAATSELDCQQGTRALLQTLGDLGYRASAKKAQICQKQVKYLGYLLKEGQRWLTEARKETVMGQPIPKTPRQLREFLGKAGFCRLFIPGFAEMAAPLYPLTKPGTLFNWGPDQQKAFQEIKQALLTAPALGLPDLTKPFELFVDEKQGYAKGVLTQKLGPWRRPVAYLSKKLDPVAAGWPPCLRMVAAIAVLTKDAGKLTMGQPLVILAPHAVEALVKQPPDRWLSNARMTHYQALLLDTDRVQFGPVVALNPATLLPLPEEGLQHDCLDILAEAHGTRSDLMDQPLPDADHTWYTDGSSFLQEGQRKAGAAVTTETEVIWARALPAGTSAQRAELIALTQALKMAEGKKLNVYTDSRYAFATAHIHGEIYRRRGWLTSEGKEIKNKDEILALLKALFLPKRLSIIHCPGHQKGNSAEARGNRMADQAAREVATRETPETSTLLAGKRTADGSEFEKRTADGSEFESPKKKAKVE

SEQ ID NO: 4537 - protein, 2127 aa, synthetic construct
MPAAKRVKLDGGDKKYSIGLDIGTNSVGWAVITDEYKVPSKKFKVLGNTDRHSIKKNLIGALLFDSGETAEATRLKRTARRRYTRRKNRICYLQEIFSNEMAKVDDSFFHRLEESFLVEEDKKHERHPIFGNIVDEVAYHEKYPTIYHLRKKLVDSTDKADLRLIYLALAHMIKFRGHFLIEGDLNPDNSDVDKLFIQLVQTYNQLFEENPINASGVDAKAILSARLSKSRRLENLIAQLPGEKKNGLFGNLIALSLGLTPNFKSNFDLAEDAKLQLSKDTYDDDLDNLLAQIGDQYADLFLAAKNLSDAILLSDILRVNTEITKAPLSASMIKRYDEHHQDLTLLKALVRQQLPEKYKEIFFDQSKNGYAGYIDGGASQEEFYKFIKPILEKMDGTEELLVKLNREDLLRKQRTFDNGSIPHQIHLGELHAILRRQEDFYPFLKDNREKIEKILTFRIPYYVGPLARGNSRFAWMTRKSEETITPWNFEEVVDKGASAQSFIERMTNFDKNLPNEKVLPKHSLLYEYFTVYNELTKVKYVTEGMRKPAFLSGEQKKAIVDLLFKTNRKVTVKQLKEDYFKKIECFDSVEISGVEDRFNASLGTYHDLLKIIKDKDFLDNEENEDILEDIVLTLTLFEDREMIEERLKTYAHLFDDKVMKQLKRRRYTGWGRLSRKLINGIRDKQSGKTILDFLKSDGFANRNFMQLIHDDSLTFKEDIQKAQVSGQGDSLHEHIANLAGSPAIKKGILQTVKVVDELVKVMGRHKPENIVIEMARENQTTQKGQKNSRERMKRIEEGIKELGSQILKEHPVENTQLQNEKLYLYYLQNGRDMYVDQELDINRLSDYDVDHIVPQSFLKDDSIDNKVLTRSDKARGKSDNVPSEEVVKKMKNYWRQLLNAKLITQRKFDNLTKAERGGLSELDKAGFIKRQLVETRQITKHVAQILDSRMNTKYDENDKLIREVKVITLKSKLVSDFRKDFQFYKVREINNYHHAHDAYLNAVVGTALIKKYPKLESEFVYGDYKVYDVRKMIAKSEQEIGKATAKYFFYSNIMNFFKTEITLANGEIRKRPLIETNGETGEIVWDKGRDFATVRKVLSMPQVNIVKKTEVQTGGFSKESILPKRNSDKLIARKKDWDPKKYGGFDSPTVAYSVLVVAKVEKGKSKKLKSVKELLGITIMERSSFEKNPIDFLEAKGYKEVKKDLIIKLPKYSLFELENGRKRMLASAGELQKGNELALPSKYVNFLYLASHYEKLKGSPEDNEQKQLFVEQHKHYLDEIIEQISEFSKRVILADANLDKVLSAYNKHRDKPIREQAENIIHLFTLTNLGAPAAFKYFDTTIDRKRYTSTKEVLDATLIHQSITGLYETRIDLSQLGGDGGPAPEAAAKGGGGGLLGRDLLTKLKAQIQFSTEGPQVTWEDRPAMCLVLNLEEEYRLHEKPVPPSIDPSWLQLFPMVWAEKAGMGLANQVPPVVVELKSDASPVAVRQYPMSKEAREGIRPHIQRFLDLGILVPCQSPWNTPLLPVKKPGTNDYRPVQDLREVNKRVQDIHPTVPNPYNLLSSLPPSHTWYSVLDLKDAFFCLKLHPNSQPLFAFEWRDPEKGNTGQLTWTRLPQGFKNSPTLFNEALHRDLASFRALNPQVVMLQYVDDLLVAAPTYRDCKEGTRRLLQELSKLGYRVSAKKAQLCREEVTYLGYLLKGGKRWLTPARKATVMKIPTPTTPRQVREFLGTAGFCRLWIPGFASLAAPLYPLTRPKVPFTWTEAHQEAFGRIKEALLSAPALALPDLTKPFALYVDEKEGVARGVLTQTLGPWRRPVAYLSKKLDPVASGWPTCLKAIAAVALLLKDADKLTLGQNVLVIAPHNLESIVRQPPDRWMTNARMTHYQSLLLNERVSFAPPAILNPATLLPVESDDTPIHICSEILAEETGTRPDLRDQPLPGVPAWYTDGSSFIMDGRRQAGAAIVDNKRTVWASNLPEGTSAQKAELIALTQALRLAEGKSINIYTDSRYAFATAHVHGAIYKQRGWLTSAGKDIKNKEEILALLEAIHLPKRVAIIHCPGHQRGTDPVATGNRKADEAAKQAAQSTRILTETTKNAGKRTADGSEFEKRTADGSEFESPKKKAKVE

SEQ ID NO: 4538 - protein, 2096 aa, synthetic construct
MPAAKRVKLDGGDKKYSIGLDIGTNSVGWAVITDEYKVPSKKFKVLGNTDRHSIKKNLIGALLFDSGETAEATRLKRTARRRYTRRKNRICYLQEIFSNEMAKVDDSFFHRLEESFLVEEDKKHERHPIFGNIVDEVAYHEKYPTIYHLRKKLVDSTDKADLRLIYLALAHMIKFRGHFLIEGDLNPDNSDVDKLFIQLVQTYNQLFEENPINASGVDAKAILSARLSKSRRLENLIAQLPGEKKNGLFGNLIALSLGLTPNFKSNFDLAEDAKLQLSKDTYDDDLDNLLAQIGDQYADLFLAAKNLSDAILLSDILRVNTEITKAPLSASMIKRYDEHHQDLTLLKALVRQQLPEKYKEIFFDQSKNGYAGYIDGGASQEEFYKFIKPILEKMDGTEELLVKLNREDLLRKQRTFDNGSIPHQIHLGELHAILRRQEDFYPFLKDNREKIEKILTFRIPYYVGPLARGNSRFAWMTRKSEETITPWNFEEVVDKGASAQSFIERMTNFDKNLPNEKVLPKHSLLYEYFTVYNELTKVKYVTEGMRKPAFLSGEQKKAIVDLLFKTNRKVTVKQLKEDYFKKIECFDSVEISGVEDRFNASLGTYHDLLKIIKDKDFLDNEENEDILEDIVLTLTLFEDREMIEERLKTYAHLFDDKVMKQLKRRRYTGWGRLSRKLINGIRDKQSGKTILDFLKSDGFANRNFMQLIHDDSLTFKEDIQKAQVSGQGDSLHEHIANLAGSPAIKKGILQTVKVVDELVKVMGRHKPENIVIEMARENQTTQKGQKNSRERMKRIEEGIKELGSQILKEHPVENTQLQNEKLYLYYLQNGRDMYVDQELDINRLSDYDVDHIVPQSFLKDDSIDNKVLTRSDKARGKSDNVPSEEVVKKMKNYWRQLLNAKLITQRKFDNLTKAERGGLSELDKAGFIKRQLVETRQITKHVAQILDSRMNTKYDENDKLIREVKVITLKSKLVSDFRKDFQFYKVREINNYHHAHDAYLNAVVGTALIKKYPKLESEFVYGDYKVYDVRKMIAKSEQEIGKATAKYFFYSNIMNFFKTEITLANGEIRKRPLIETNGETGEIVWDKGRDFATVRKVLSMPQVNIVKKTEVQTGGFSKESILPKRNSDKLIARKKDWDPKKYGGFDSPTVAYSVLVVAKVEKGKSKKLKSVKELLGITIMERSSFEKNPIDFLEAKGYKEVKKDLIIKLPKYSLFELENGRKRMLASAGELQKGNELALPSKYVNFLYLASHYEKLKGSPEDNEQKQLFVEQHKHYLDEIIEQISEFSKRVILADANLDKVLSAYNKHRDKPIREQAENIIHLFTLTNLGAPAAFKYFDTTIDRKRYTSTKEVLDATLIHQSITGLYETRIDLSQLGGDGGGSSEAAAKPAPGGTLNIEDEYRLHETSKEPDVPLGSTWLSDFPQAWAETGGMGLAVRQAPLIIPLKATSTPVSIKQYPMSQEARLGIKPHIQRLLDQGILVPCQSPWNTPLLPVKKPGTNDYRPVQDLREVNKRVEDIHPTVPNPYNLLSGLPPSHQWYTVLDLKDAFFCLRLHPTSQPLFAFEWRDPEMGISGQLTWTRLPQGFKNSPTLFNEALHRDLADFRIQHPDLILLQYVDDLLLAATSEQDCQRGTRALLQTLGNLGYRASAKKAQICQKQVKYLGYLLKEGQRWLTEARKETVMGQPTPKTPRQLREFLGTAGFCRLWIPGFAEMAAPLYPLTKPGTLFNWGPDQQKAYQEIKQALLTAPALGLPDLTKPFELFVDEKQGYAKGVLTQKLGPWRRPVAYLSKKLDPVAAGWPPCLRMVAAIAVLTKDAGKLTMGQPLVILAPHAVEALVKQPPDRWLSNARMTHYQAMLLDTDRVQFGPVVALNPATLLPLPEKEAPHDCLEILAETHGTRPDLTDQPIPDADYTWYTDGSSFLQEGQRRAGAAVTTETEVIWARALPAGTSAQRAELIALTQALKMAEGKKLNVYTDSRYAFATAHVHGEIYRRRGWLTSEGREIKNKNEILALLKALFLPKRLSIIHCPGHQKGNSAEARGNRMADQAAREAAMKAVLETSTLLAGKRTADGSEFEKRTADGSEFESPKKKAKVE

SEQ ID NO: 4539 - protein, 2098 aa, synthetic construct
MPAAKRVKLDGGDKKYSIGLDIGTNSVGWAVITDEYKVPSKKFKVLGNTDRHSIKKNLIGALLFDSGETAEATRLKRTARRRYTRRKNRICYLQEIFSNEMAKVDDSFFHRLEESFLVEEDKKHERHPIFGNIVDEVAYHEKYPTIYHLRKKLVDSTDKADLRLIYLALAHMIKFRGHFLIEGDLNPDNSDVDKLFIQLVQTYNQLFEENPINASGVDAKAILSARLSKSRRLENLIAQLPGEKKNGLFGNLIALSLGLTPNFKSNFDLAEDAKLQLSKDTYDDDLDNLLAQIGDQYADLFLAAKNLSDAILLSDILRVNTEITKAPLSASMIKRYDEHHQDLTLLKALVRQQLPEKYKEIFFDQSKNGYAGYIDGGASQEEFYKFIKPILEKMDGTEELLVKLNREDLLRKQRTFDNGSIPHQIHLGELHAILRRQEDFYPFLKDNREKIEKILTFRIPYYVGPLARGNSRFAWMTRKSEETITPWNFEEVVDKGASAQSFIERMTNFDKNLPNEKVLPKHSLLYEYFTVYNELTKVKYVTEGMRKPAFLSGEQKKAIVDLLFKTNRKVTVKQLKEDYFKKIECFDSVEISGVEDRFNASLGTYHDLLKIIKDKDFLDNEENEDILEDIVLTLTLFEDREMIEERLKTYAHLFDDKVMKQLKRRRYTGWGRLSRKLINGIRDKQSGKTILDFLKSDGFANRNFMQLIHDDSLTFKEDIQKAQVSGQGDSLHEHIANLAGSPAIKKGILQTVKVVDELVKVMGRHKPENIVIEMARENQTTQKGQKNSRERMKRIEEGIKELGSQILKEHPVENTQLQNEKLYLYYLQNGRDMYVDQELDINRLSDYDVDHIVPQSFLKDDSIDNKVLTRSDKARGKSDNVPSEEVVKKMKNYWRQLLNAKLITQRKFDNLTKAERGGLSELDKAGFIKRQLVETRQITKHVAQILDSRMNTKYDENDKLIREVKVITLKSKLVSDFRKDFQFYKVREINNYHHAHDAYLNAVVGTALIKKYPKLESEFVYGDYKVYDVRKMIAKSEQEIGKATAKYFFYSNIMNFFKTEITLANGEIRKRPLIETNGETGEIVWDKGRDFATVRKVLSMPQVNIVKKTEVQTGGFSKESILPKRNSDKLIARKKDWDPKKYGGFDSPTVAYSVLVVAKVEKGKSKKLKSVKELLGITIMERSSFEKNPIDFLEAKGYKEVKKDLIIKLPKYSLFELENGRKRMLASAGELQKGNELALPSKYVNFLYLASHYEKLKGSPEDNEQKQLFVEQHKHYLDEIIEQISEFSKRVILADANLDKVLSAYNKHRDKPIREQAENIIHLFTLTNLGAPAAFKYFDTTIDRKRYTSTKEVLDATLIHQSITGLYETRIDLSQLGGDGGGSSPAPEAAAKGGTAPLEEEYRLFLEAPIQNVTLLEQWKREIPKVWAEINPPGLASTQAPIHVQLLSTALPVRVRQYPITLEAKRSLRETIRKFRAAGILRPVHSPWNTPLLPVRKSGTSEYRMVQDLREVNKRVETIHPTVPNPYTLLSLLPPDRIWYSVLDLKDAFFCIPLAPESQLIFAFEWADAEEGESGQLTWTRLPQGFKNSPTLFNEALNRDLQGFRLDHPSVSLLQYVDDLLIAADTQAACLSATRDLLMTLAELGYRVSGKKAQLCQEEVTYLGFKIHKGSRSLSNSRTQAILQIPVPKTKRQVREFLGKIGYCRLFIPGFAELAQPLYAATRPGNDPLVWGEKEEEAFQSLKLALTQPPALALPSLDKPFQLFVEETSGAAKGVLTQALGPWKRPVAYLSKRLDPVAAGWPRCLRAIAAAALLTREASKLTFGQDIEITSSHNLESLLRSPPDKWLTNARITQYQVLLLDPPRVRFKQTAALNPATLLPETDDTLPIHHCLDTLDSLTSTRPDLTDQPLAQAEATLFTDGSSYIRDGKRYAGAAVVTLDSVIWAEPLPIGTSAQKAELIALTKALEWSKDKSVNIYTDSRYAFATLHVHGMIYRERGWLTAGGKAIKNAPEILALLTAVWLPKRVAVMHCKGHQKDDAPTSTGNRRADEVAREVAIRPLSTQATISAGKRTADGSEFEKRTADGSEFESPKKKAKVE

SEQ ID NO: 4540 - protein, 2131 aa, synthetic construct
MPAAKRVKLDGGDKKYSIGLDIGTNSVGWAVITDEYKVPSKKFKVLGNTDRHSIKKNLIGALLFDSGETAEATRLKRTARRRYTRRKNRICYLQEIFSNEMAKVDDSFFHRLEESFLVEEDKKHERHPIFGNIVDEVAYHEKYPTIYHLRKKLVDSTDKADLRLIYLALAHMIKFRGHFLIEGDLNPDNSDVDKLFIQLVQTYNQLFEENPINASGVDAKAILSARLSKSRRLENLIAQLPGEKKNGLFGNLIALSLGLTPNFKSNFDLAEDAKLQLSKDTYDDDLDNLLAQIGDQYADLFLAAKNLSDAILLSDILRVNTEITKAPLSASMIKRYDEHHQDLTLLKALVRQQLPEKYKEIFFDQSKNGYAGYIDGGASQEEFYKFIKPILEKMDGTEELLVKLNREDLLRKQRTFDNGSIPHQIHLGELHAILRRQEDFYPFLKDNREKIEKILTFRIPYYVGPLARGNSRFAWMTRKSEETITPWNFEEVVDKGASAQSFIERMTNFDKNLPNEKVLPKHSLLYEYFTVYNELTKVKYVTEGMRKPAFLSGEQKKAIVDLLFKTNRKVTVKQLKEDYFKKIECFDSVEISGVEDRFNASLGTYHDLLKIIKDKDFLDNEENEDILEDIVLTLTLFEDREMIEERLKTYAHLFDDKVMKQLKRRRYTGWGRLSRKLINGIRDKQSGKTILDFLKSDGFANRNFMQLIHDDSLTFKEDIQKAQVSGQGDSLHEHIANLAGSPAIKKGILQTVKVVDELVKVMGRHKPENIVIEMARENQTTQKGQKNSRERMKRIEEGIKELGSQILKEHPVENTQLQNEKLYLYYLQNGRDMYVDQELDINRLSDYDVDHIVPQSFLKDDSIDNKVLTRSDKARGKSDNVPSEEVVKKMKNYWRQLLNAKLITQRKFDNLTKAERGGLSELDKAGFIKRQLVETRQITKHVAQILDSRMNTKYDENDKLIREVKVITLKSKLVSDFRKDFQFYKVREINNYHHAHDAYLNAVVGTALIKKYPKLESEFVYGDYKVYDVRKMIAKSEQEIGKATAKYFFYSNIMNFFKTEITLANGEIRKRPLIETNGETGEIVWDKGRDFATVRKVLSMPQVNIVKKTEVQTGGFSKESILPKRNSDKLIARKKDWDPKKYGGFDSPTVAYSVLVVAKVEKGKSKKLKSVKELLGITIMERSSFEKNPIDFLEAKGYKEVKKDLIIKLPKYSLFELENGRKRMLASAGELQKGNELALPSKYVNFLYLASHYEKLKGSPEDNEQKQLFVEQHKHYLDEIIEQISEFSKRVILADANLDKVLSAYNKHRDKPIREQAENIIHLFTLTNLGAPAAFKYFDTTIDRKRYTSTKEVLDATLIHQSITGLYETRIDLSQLGGDGGAEAAAKEAAAKEAAAKEAAAKALEAEAAAKEAAAKEAAAKEAAAKAGGTLNIEDEYRLHETSKGPDVPLGSTWLSDFPQAWAETGGMGLAVRQAPLIIPLKATSTPVSIKQYPMSQEARLGIKPHIQRLLDQGILVPCQSPWNTPLLPVKKPGTNDYRPVQDLREVNKRVEDIHPTVPNPYNLLSGLPPSHQWYTVLDLKDAFFCLRLHPTSQSLFAFEWRDPEMGISGQLTWTRLPQGFKNSPTLFNEALHRDLADFRIQHPDLILLQYVDDLLLAATSELDCQQGTRALLQTLGDLGYRASAKKAQICQKQVKYLGYLLKEGQRWLTEARKETVMGQPTPKTPRQLREFLGTAGFCRLWIPGFAEMAAPLYPLTKPGTLFEWGPDQQKAYQEIKQALLTAPALGLPDLTKPFELFVDEKQGYAKGVLTQKLGPWRRPVAYLSKKLDPVAAGWPPCLRMVAAIAVLTKDAGKLTMGQPLVILAPHAVEALVKQPPDRWLSNARMTHYQALLLDTDRVQFGPIVALNPATLLPLPEEGLQHDCLDILAEAHGTRPDLTDQPLPDADHTWYTDGSSFLQEGQRKAGAAVTTETEVVWAKALPAGTSAQRAELIALTQALKMAEGKKLNVYTDSRYAFATAHIHGEIYRRRGWLTSEGKEIKNKDEILALLKALFLPKRLSIIHCPGHQKGNRAEARGNRMADQAAREVATRETPETSTLLAGKRTADGSEFEKRTADGSEFESPKKKAKVE

SEQ ID NO: 4541 - protein, 2122 aa, synthetic construct
MPAAKRVKLDGGDKKYSIGLDIGTNSVGWAVITDEYKVPSKKFKVLGNTDRHSIKKNLIGALLFDSGETAEATRLKRTARRRYTRRKNRICYLQEIFSNEMAKVDDSFFHRLEESFLVEEDKKHERHPIFGNIVDEVAYHEKYPTIYHLRKKLVDSTDKADLRLIYLALAHMIKFRGHFLIEGDLNPDNSDVDKLFIQLVQTYNQLFEENPINASGVDAKAILSARLSKSRRLENLIAQLPGEKKNGLFGNLIALSLGLTPNFKSNFDLAEDAKLQLSKDTYDDDLDNLLAQIGDQYADLFLAAKNLSDAILLSDILRVNTEITKAPLSASMIKRYDEHHQDLTLLKALVRQQLPEKYKEIFFDQSKNGYAGYIDGGASQEEFYKFIKPILEKMDGTEELLVKLNREDLLRKQRTFDNGSIPHQIHLGELHAILRRQEDFYPFLKDNREKIEKILTFRIPYYVGPLARGNSRFAWMTRKSEETITPWNFEEVVDKGASAQSFIERMTNFDKNLPNEKVLPKHSLLYEYFTVYNELTKVKYVTEGMRKPAFLSGEQKKAIVDLLFKTNRKVTVKQLKEDYFKKIECFDSVEISGVEDRFNASLGTYHDLLKIIKDKDFLDNEENEDILEDIVLTLTLFEDREMIEERLKTYAHLFDDKVMKQLKRRRYTGWGRLSRKLINGIRDKQSGKTILDFLKSDGFANRNFMQLIHDDSLTFKEDIQKAQVSGQGDSLHEHIANLAGSPAIKKGILQTVKVVDELVKVMGRHKPENIVIEMARENQTTQKGQKNSRERMKRIEEGIKELGSQILKEHPVENTQLQNEKLYLYYLQNGRDMYVDQELDINRLSDYDVDHIVPQSFLKDDSIDNKVLTRSDKARGKSDNVPSEEVVKKMKNYWRQLLNAKLITQRKFDNLTKAERGGLSELDKAGFIKRQLVETRQITKHVAQILDSRMNTKYDENDKLIREVKVITLKSKLVSDFRKDFQFYKVREINNYHHAHDAYLNAVVGTALIKKYPKLESEFVYGDYKVYDVRKMIAKSEQEIGKATAKYFFYSNIMNFFKTEITLANGEIRKRPLIETNGETGEIVWDKGRDFATVRKVLSMPQVNIVKKTEVQTGGFSKESILPKRNSDKLIARKKDWDPKKYGGFDSPTVAYSVLVVAKVEKGKSKKLKSVKELLGITIMERSSFEKNPIDFLEAKGYKEVKKDLIIKLPKYSLFELENGRKRMLASAGELQKGNELALPSKYVNFLYLASHYEKLKGSPEDNEQKQLFVEQHKHYLDEIIEQISEFSKRVILADANLDKVLSAYNKHRDKPIREQAENIIHLFTLTNLGAPAAFKYFDTTIDRKRYTSTKEVLDATLIHQSITGLYETRIDLSQLGGDGGAEAAAKEAAAKEAAAKEAAAKALEAEAAAKEAAAKEAAAKEAAAKAGGIPWLMKKPLQLTTLVPLQEYEERLLKQTMLTGSYKEKLQSLFLKYDALWQHWENQVGHRRIKPHHIATGTVNPRPQKQYPINPKAKASIQTVINDLLKQGVLIQQNSIMNTPVYPVPKPDGKWRMVLDYREVNKTIPLIAAQNQHSAGILSSIFRGKYKTTLDLSNGFWAHSITPESYWLTAFTWLGQQYCWTRLPQGFLNSPALFNADVVDLLKEVPNVQVYVDDIYISHDDPREHLEQLEKVFSLLLNAGYVVSLKKSEIAQHEVEFLGFNITKEGRGLTETFKQKLLNITPPRDLKQLQSILGKLNFARNFIPNFSELVKPLYNIIATAPGKYITWTTDNSQQLQNIISMLNSAENLEERNPEVRLIMKVNTSPSAGYIRFYNEFAKRPIMYLNYVYTKAEVKFTNTEKLLTTIHKGLIKALDLGMGQEILVYSPIVSMTKIQKTPLPERKALPIRWITWMSYLEDPRIQFHYDKTLPELQQVPTVTDDIIAKIKHPSEFSMVFYTDGSAIKHPNVNKSHNAGMGIAQVQFKPEFTVINTWSIPLGDHTAQLAEVAAVEFACKKALKIDGPVLIVTDSFYVAESVNKELPYWQSNGFFNNKKKPLKHVSKWKSIADCIQLKPDIIIIHEKGHQPTASTFHTEGNNLADKLATQGSYVVNAGKRTADGSEFEKRTADGSEFESPKKKAKVE

SEQ ID NO: 4542-4600 - skipped (59 entries)

SEQ ID NO: 4601 - DNA, 16 bp, synthetic construct
  source 1..16: mol_type = other DNA
gcgcgctcgctcgctc

SEQ ID NO: 4602-4643 - skipped (42 entries)

SEQ ID NO: 4644 - protein, 9 aa, synthetic construct
PAAKRVKLD

SEQ ID NO: 4645-4648 - skipped (4 entries)

SEQ ID NO: 4649 - protein, 29 aa, synthetic construct
KRTADGSEFEKRTADGSEFESPKKKAKVE

SEQ ID NO: 4650 - protein, 10 aa, synthetic construct
KRTADGSEFE

SEQ ID NO: 4651 - protein, 19 aa, synthetic construct
KRTADGSEFESPKKKAKVE

SEQ ID NO: 4652-5001 - skipped (350 entries)

SEQ ID NO: 5002 - protein, 672 aa, Murine leukemia virus
TLNIEDEYRLHETSKEPDVSLGSTWLSDFPQAWAETGGMGLAVRQAPLIIPLKATSTPVSIKQYPMSQEARLGIKPHIQRLLDQGILVPCQSPWNTPLLPVKKPGTNDYRPVQDLREVNKRVEDIHPTVPNPYNLLSGLPPSHQWYTVLDLKDAFFCLRLHPTSQPLFAFEWRDPEMGISGQLTWTRLPQGFKNSPTLFDEALHRDLADFRIQHPDLILLQYVDDLLLAATSELDCQQGTRALLQTLGNLGYRASAKKAQICQKQVKYLGYLLKEGQRWLTEARKETVMGQPTPKTPRQLREFLGTAGFCRLWIPGFAEMAAPLYPLTKTGTLFNWGPDQQKAYQEIKQALLTAPALGLPDLTKPFELFVDEKQGYAKGVLTQKLGPWRRPVAYLSKKLDPVAAGWPPCLRMVAAIAVLTKDAGKLTMGQPLVILAPHAVEALVKQPPDRWLSNARMTHYQALLLDTDRVQFGPVVALNPATLLPLPEEGLQHNCLDILAEAHGTRPDLTDQPLPDADHTWYTDGSSLLQEGQRKAGAAVTTETEVIWAKALPAGTSAQRAELIALTQALKMAEGKKLNVYTDSRYAFATAHIHGEIYRRRGLLTSEGKEIKNKDEILALLKALFLPKRLSIIHCPGHQKGHSAEARGNRMADQAARKAAITETPDTSTLLI

SEQ ID NO: 5003 - protein, 671 aa, Murine leukemia virus
TLNIEDEHRLHETSKEPDVSLGSTWLSDFPQAWAETGGMGLAVRQAPLIIPLKATSTPVSIKQYPMSQEARLGIKPHIQRLLDQGILVPCQSPWNTPLLPVKKPGTNDYRPVQDLREVNKRVEDIHPTVPNPYNLLSGLPPSHQWYTVLDLKDAFFCLRLHPTSQPLFAFEWRDPEMGISGQLTWTRLPQGFKNSPTLFDEALHRDLADFRIQHPDLILLQYVDDLLLAATSELDCQQGTRALLQTLGNLGYRASAKKAQICQKQVKYLGYLLKEGQRWLTEARKETVMGQPTPKTPRQLREFLGTAGFCRLWIPGFAEMAAPLYPLTKTGTLFNWGPDQQKAYQEIKQALLTAPALGLPDLTKPFELFVDEKQGYAKGVLTQKLGPWRRPVAYLSKKLDPVAAGWPPCLRMVAAIAVLTKDAGKLTMGQPLVILAPHAVEALVKQPPDRWLSNARMTHYQALLLDTDRVQFGPVVALNPATLLPLPEEGLQHNCLDILAEAHGTRPDLTDQPLPDADHTWYTDGSSLLQEGQRKAGAAVTTETEVIWAKALPAGTSAQRAELIALTQALKMAEGKKLNVYTDSRYAFATAHIHGEIYRRRGLLTSEGKEIKNKDEILALLKALFLPKRLSIIHCPGHQKGHSAEARGNRMADQAARKAAITETPDTSTLL

SEQ ID NO: 5004 - protein, 660 aa, Murine leukemia virus
TLNIEDEHRLHETSKEPDVSLGSTWLSDFPQAWAETGGMGLAVRQAPLIIPLKATSTPVSIKQYPMSQEARLGIKPHIQRLLDQGILVPCQSPWNTPLLPVKKPGTNDYRPVQDLREVNKRVEDIHPTVPNPYNLLSGLPPSHQWYTVLDLKDAFFCLRLHPTSQPLFAFEWRDPEMGISGQLTWTRLPQGFKNSPTLFDEALHRDLADFRIQHPDLILLQYVDDLLLAATSELDCQQGTRALLQTLGNLGYRASAKKAQICQKQVKYLGYLLKEGQRWLTEARKETVMGQPTPKTPRQLREFLGTAGFCRLWIPGFAEMAAPLYPLTKTGTLFNWGPDQQKAYQEIKQALLTAPALGLPDLTKPFELFVDEKQGYAKGVLTQKLGPWRRPVAYLSKKLDPVAAGWPPCLRMVAAIAVLTKDAGKLTMGQPLVILAPHAVEALVKQPPDRWLSNARMTHYQALLLDTDRVQFGPVVALNPATLLPLPEEGLQHNCLDILAEAHGTRPDLTDQPLPDADHTWYTDGSSLLQEGQRKAGAAVTTETEVIWAKALPAGTSAQRAELIALTQALKMAEGKKLNVYTDSRYAFATAHIHGEIYRRRGLLTSEGKEIKNKDEILALLKALFLPKRLSIIHCPGHQKGHSAEARGNRMADQAARKAA

SEQ ID NO: 5005 - protein, 672 aa, synthetic construct
TLNIEDEYRLHETSKEPDVSLGSTWLSDFPQAWAETGGMGLAVRQAPLIIPLKATSTPVSIKQYPMSQEARLGIKPHIQRLLDQGILVPCQSPWNTPLLPVKKPGTNDYRPVQDLREVNKRVEDIHPTVPNPYNLLSGLPPSHQWYTVLDLKDAFFCLRLHPTSQPLFAFEWRDPEMGISGQLTWTRLPQGFKNSPTLFNEALHRDLADFRIQHPDLILLQYVDDLLLAATSELDCQQGTRALLQTLGNLGYRASAKKAQICQKQVKYLGYLLKEGQRWLTEARKETVMGQPTPKTPRQLREFLGKAGFCRLFIPGFAEMAAPLYPLTKPGTLFNWGPDQQKAYQEIKQALLTAPALGLPDLTKPFELFVDEKQGYAKGVLTQKLGPWRRPVAYLSKKLDPVAAGWPPCLRMVAAIAVLTKDAGKLTMGQPLVILAPHAVEALVKQPPDRWLSNARMTHYQALLLDTDRVQFGPVVALNPATLLPLPEEGLQHNCLDILAEAHGTRPDLTDQPLPDADHTWYTDGSSLLQEGQRKAGAAVTTETEVIWAKALPAGTSAQRAELIALTQALKMAEGKKLNVYTDSRYAFATAHIHGEIYRRRGWLTSEGKEIKNKDEILALLKALFLPKRLSIIHCPGHQKGHSAEARGNRMADQAARKAAITETPDTSTLLI

SEQ ID NO: 5006 - protein, 33 aa, synthetic construct
SGGSSGGSSGSETPGTSESATPESSGGSSGGSS

SEQ ID NO: 5007 - protein, 1369 aa, unidentified
SMDKKYSIGLAIGTNSVGWAVITDDYKVPSKKFKVLGNTDRHSIKKNLIGALLFDSGETAEATRLKRTARRRYTRRKNRICYLQEIFSNEMAKVDDSFFHRLEESFLVEEDKKHERHPIFGNIVDEVAYHEKYPTIYHLRKKLVDSTDKADLRLIYLALAHMIKFRGHFLIEGDLNPDNSDVDKLFIQLVQTYNQLFEENPINASGVDAKAILSARLSKSRRLENLIAQLPGEKKNGLFGNLIALSLGLTPNFKSNFDLAEDAKLQLSKDTYDDDLDNLLAQIGDQYADLFLAAKNLSDAILLSDILRVNTEITKAPLSASMIKRYDEHHQDLTLLKALVRQQLPEKYKEIFFDQSKNGYAGYIDGGASQEEFYKFIKPILEKMDGTEELLVKLNREDLLRKQRTFDNGSIPHQIHLGELHAILRRQEDFYPFLKDNREKIEKILTFRIPYYVGPLARGNSRFAWMTRKSEETITPWNFEEVVDKGASAQSFIERMTNFDKNLPNEKVLPKHSLLYEYFTVYNELTKVKYVTEGMRKPAFLSGEQKKAIVDLLFKTNRKVTVKQLKEDYFKKIECFDSVEISGVEDRFNASLGTYHDLLKIIKDKDFLDNEENEDILEDIVLTLTLFEDREMIEERLKTYAHLFDDKVMKQLKRRRYTGWGRLSRKLINGIRDKQSGKTILDFLKSDGFANRNFMQLIHDDSLTFKEDIQKAQVSGQGDSLHEHIANLAGSPAIKKGILQTVKVVDELVKVMGRHKPENIVIEMARENQTTQKGQKNSRERMKRIEEGIKELGSQILKEHPVENTQLQNEKLYLYYLQNGRDMYVDQELDINRLSDYDVDAIVPQSFLKDDSIDNKVLTRSDKNRGKSDNVPSEEVVKKMKNYWRQLLNAKLITQRKFDNLTKAERGGLSELDKAGFIKRQLVETRQITKHVAQILDSRMNTKYDENDKLIREVKVITLKSKLVSDFRKDFQFYKVREINNYHHAHDAYLNAVVGTALIKKYPKLESEFVYGDYKVYDVRKMIAKSEQEIGKATAKYFFYSNIMNFFKTEITLANGEIRKRPLIETNGETGEIVWDKGRDFATVRKVLSMPQVNIVKKTEVQTGGFSKESILPKRNSDKLIARKKDWDPKKYGGFDSPTVAYSVLVVAKVEKGKSKKLKSVKELLGITIMERSSFEKNPIDFLEAKGYKEVKKDLIIKLPKYSLFELENGRKRMLASAGELQKGNELALPSKYVNFLYLASHYEKLKGSPEDNEQKQLFVEQHKHYLDEIIEQISEFSKRVILADANLDKVLSAYNKHRDKPIREQAENIIHLFTLTNLGAPAAFKYFDTTIDRKRYTSTKEVLDATLIHQSITGLYETRIDLSQLGGD

SEQ ID NO: 5008 - DNA, 76 bp, synthetic construct
  source 1..76: mol_type = other DNA
gttttagagctagaaatagcaagttaaaataaggctagtccgttatcaacttgaaaaagtgggaccgagtcggtcc

SEQ ID NO: 5009 - protein, 30 aa, synthetic construct
MDSLLMNRRKFLYQFKNVRWAKGRRETYLC

SEQ ID NO: 5010 - protein, 28 aa, synthetic construct
PKKRKVEGADKRTADGSEFESPKKKRKV

SEQ ID NO: 5011 - protein, 22 aa, synthetic construct
RKSGKIAAIWKRPRKPKKKRKV

SEQ ID NO: 5012 - protein, 18 aa, synthetic construct
KRTADGSEFESPKKKRKV

SEQ ID NO: 5013 - protein, 17 aa, synthetic construct
KKTELQTTNAENKTKKL

SEQ ID NO: 5014 - protein, 19 aa, synthetic construct
KRGINDRNFWRGENGRKTR

SEQ ID NO: 5015 - protein, 16 aa, synthetic construct
KRPAATKKAGQAKKKK

SEQ ID NO: 5016 - protein, 29 aa, synthetic construct
PKKKRKVEGADKRTADGSEFESPKKKRKV

SEQ ID NO: 5017 - protein, 25 aa, synthetic construct
KRASSQALGTIPKRRSSSRFIKRKK

SEQ ID NO: 5018 - protein, 7 aa, synthetic construct
RKKRKKK

SEQ ID NO: 5019-5024 - skipped (6 entries)

SEQ ID NO: 5025 - protein, 4 aa, synthetic construct
SGGS

SEQ ID NO: 5026 - protein, 4 aa, synthetic construct
GGGS

SEQ ID NO: 5027 - protein, 5 aa, synthetic construct
GGGGS

SEQ ID NO: 5028 - protein, 5 aa, synthetic construct
EAAAK

SEQ ID NO: 5029 - DNA, 306 bp, synthetic construct
  source 1..306: mol_type = other DNA
tgcctgtcatacgaaaccgagatactgacagtagaatatggccttctgccaatcgggaagattgtggagaaacggatagaatgcacagtttactctgtcgataacaatggtaacatttatactcagccagttgcccagtggcacgaccggggagagcaggaagtattcgaatactgtctggaggatggaagtctcattagggccactaaggaccacaaatttatgacagtcgatggccagatgctgcctatagacgaaatctttgagcgagagttggacctcatgcgagttgacaaccttcctaat

SEQ ID NO: 5030 - protein, 102 aa, synthetic construct
CLSYETEILTVEYGLLPIGKIVEKRIECTVYSVDNNGNIYTQPVAQWHDRGEQEVFEYCLEDGSLIRATKDHKFMTVDGQMLPIDEIFERELDLMRVDNLPN

SEQ ID NO: 5031 - DNA, 108 bp, synthetic construct
  source 1..108: mol_type = other DNA
atgatcaagatagctacaaggaagtatcttggcaaacaaaacgtttatgatattggagtcgaaagagatcacaactttgctctgaagaacggattcatagcttctaat

SEQ ID NO: 5032 - protein, 36 aa, synthetic construct
MIKIATRKYLGKQNVYDIGVERDHNFALKNGFIASN

SEQ ID NO: 5033 - DNA, 303 bp, synthetic construct
  source 1..303: mol_type = other DNA
tgcctgtcttatgataccgagatacttaccgttgaatatggcttcttgcctattggaaagattgtcgaagagagaattgaatgcacagtatatactgtagacaagaatggtttcgtttacacacagcccattgctcaatggcacaatcgcggcgaacaagaagtatttgagtactgtctcgaggatggaagcatcatacgagcaactaaagatcataaattcatgaccactgacgggcagatgttgccaatagatgagatattcgagcggggcttggatctcaaacaagtggatggattgcca

SEQ ID NO: 5034 - protein, 101 aa, synthetic construct
CLSYDTEILTVEYGFLPIGKIVEERIECTVYTVDKNGFVYTQPIAQWHNRGEQEVFEYCLEDGSIIRATKDHKFMTTDGQMLPIDEIFERGLDLKQVDGLP

SEQ ID NO: 5035 - DNA, 159 bp, synthetic construct
  source 1..159: mol_type = other DNA
atgaagaggactgccgatggatcagagtttgaatctcccaagaagaagaggaaagtaaagataatatctcgaaaaagtcttggtacccaaaatgtctatgatattggagtggagaaagatcacaacttccttctcaagaacggtctcgtagccagcaac

SEQ ID NO: 5036 - protein, 53 aa, synthetic construct
MKRTADGSEFESPKKKRKVKIISRKSLGTQNVYDIGVEKDHNFLLKNGLVASN

SEQ ID NO: 5037-5101 - skipped (65 entries)

SEQ ID NO: 5102 - protein, 6 aa, synthetic construct
GGSGGS

SEQ ID NO: 5103 - protein, 9 aa, synthetic construct
GGSGGSGGS

SEQ ID NO: 5104 - protein, 12 aa, synthetic construct
GGSGGSGGSGGS

SEQ ID NO: 5105 - protein, 15 aa, synthetic construct
GGSGGSGGSGGSGGS

SEQ ID NO: 5106 - protein, 18 aa, synthetic construct
GGSGGSGGSGGSGGSGGS

SEQ ID NO: 5107 - protein, 5 aa, synthetic construct
GGGGS

SEQ ID NO: 5108 - protein, 10 aa, synthetic construct
GGGGSGGGGS

SEQ ID NO: 5109 - protein, 15 aa, synthetic construct
GGGGSGGGGSGGGGS

SEQ ID NO: 5110 - protein, 20 aa, synthetic construct
GGGGSGGGGSGGGGSGGGGS

SEQ ID NO: 5111 - protein, 25 aa, synthetic construct
GGGGSGGGGSGGGGSGGGGSGGGGS

SEQ ID NO: 5112 - protein, 30 aa, synthetic construct
GGGGSGGGGSGGGGSGGGGSGGGGSGGGGS

SEQ ID NO: 5113 - skipped

SEQ ID NO: 5114 - protein, 4 aa, synthetic construct
GGGG

SEQ ID NO: 5115 - protein, 5 aa, synthetic construct
GGGGG

SEQ ID NO: 5116 - protein, 6 aa, synthetic construct
GGGGGG

SEQ ID NO: 5117 - protein, 7 aa, synthetic construct
GGGGGGG

SEQ ID NO: 5118 - protein, 8 aa, synthetic construct
GGGGGGGG

SEQ ID NO: 5119 - skipped

SEQ ID NO: 5120 - protein, 6 aa, synthetic construct
GSSGSS

SEQ ID NO: 5121 - protein, 9 aa, synthetic construct
GSSGSSGSS

SEQ ID NO: 5122 - protein, 12 aa, synthetic construct
GSSGSSGSSGSS

SEQ ID NO: 5123 - protein, 15 aa, synthetic construct
GSSGSSGSSGSSGSS

SEQ ID NO: 5124 - protein, 18 aa, synthetic construct
GSSGSSGSSGSSGSSGSS

SEQ ID NO: 5125 - protein, 5 aa, synthetic construct
EAAAK

SEQ ID NO: 5126 - protein, 10 aa, synthetic construct
EAAAKEAAAK

SEQ ID NO: 5127 - protein, 15 aa, synthetic construct
EAAAKEAAAKEAAAK

SEQ ID NO: 5128 - protein, 20 aa, synthetic construct
EAAAKEAAAKEAAAKEAAAK

SEQ ID NO: 5129 - protein, 25 aa, synthetic construct
EAAAKEAAAKEAAAKEAAAKEAAAK

SEQ ID NO: 5130 - protein, 30 aa, synthetic construct
EAAAKEAAAKEAAAKEAAAKEAAAKEAAAK

SEQ ID NO: 5131 - skipped

SEQ ID NO: 5132 - protein, 5 aa, synthetic construct
PAPAP

SEQ ID NO: 5133 - protein, 7 aa, synthetic construct
PAPAPAP

SEQ ID NO: 5134 - protein, 9 aa, synthetic construct
PAPAPAPAP

SEQ ID NO: 5135 - protein, 11 aa, synthetic construct
PAPAPAPAPAP

SEQ ID NO: 5136 - protein, 13 aa, synthetic construct
PAPAPAPAPAPAP

SEQ ID NO: 5137 - protein, 6 aa, synthetic construct
GGSGGG

SEQ ID NO: 5138 - protein, 6 aa, synthetic construct
GGGGGS

SEQ ID NO: 5139 - protein, 6 aa, synthetic construct
GGSGSS

SEQ ID NO: 5140 - protein, 6 aa, synthetic construct
GSSGGS

SEQ ID NO: 5141 - protein, 8 aa, synthetic construct
GGSEAAAK

SEQ ID NO: 5142 - protein, 8 aa, synthetic construct
EAAAKGGS

SEQ ID NO: 5143 - protein, 6 aa, synthetic construct
GGSPAP

SEQ ID NO: 5144 - protein, 6 aa, synthetic construct
PAPGGS

SEQ ID NO: 5145 - protein, 6 aa, synthetic construct
GGGGSS

SEQ ID NO: 5146 - protein, 6 aa, synthetic construct
GSSGGG

SEQ ID NO: 5147 - protein, 8 aa, synthetic construct
GGGEAAAK

SEQ ID NO: 5148 - protein, 8 aa, synthetic construct
EAAAKGGG

SEQ ID NO: 5149 - protein, 6 aa, synthetic construct
GGGPAP

SEQ ID NO: 5150 - protein, 6 aa, synthetic construct
PAPGGG

SEQ ID NO: 5151 - protein, 8 aa, synthetic construct
GSSEAAAK

SEQ ID NO: 5152 - protein, 8 aa, synthetic construct
EAAAKGSS

SEQ ID NO: 5153 - protein, 6 aa, synthetic construct
GSSPAP

SEQ ID NO: 5154 - protein, 6 aa, synthetic construct
PAPGSS

SEQ ID NO: 5155 - protein, 8 aa, synthetic construct
EAAAKPAP

SEQ ID NO: 5156 - protein, 8 aa, synthetic construct
PAPEAAAK

SEQ ID NO: 5157 - protein, 9 aa, synthetic construct
GGSGGGGSS

SEQ ID NO: 5158 - protein, 9 aa, synthetic construct
GGSGSSGGG

SEQ ID NO: 5159 - protein, 9 aa, synthetic construct
GGGGGSGSS

SEQ ID NO: 5160 - protein, 9 aa, synthetic construct
GGGGSSGGS

SEQ ID NO: 5161 - protein, 9 aa, synthetic construct
GSSGGSGGG

SEQ ID NO: 5162 - protein, 9 aa, synthetic construct
GSSGGGGGS

SEQ ID NO: 5163 - protein, 11 aa, synthetic construct
GGSGGGEAAAK

SEQ ID NO: 5164 - protein, 11 aa, synthetic construct
GGSEAAAKGGG

SEQ ID NO: 5165 - protein, 11 aa, synthetic construct
GGGGGSEAAAK

SEQ ID NO: 5166 - protein, 11 aa, synthetic construct
GGGEAAAKGGS

SEQ ID NO: 5167 - protein, 11 aa, synthetic construct
EAAAKGGSGGG

SEQ ID NO: 5168 - protein, 11 aa, synthetic construct
EAAAKGGGGGS

SEQ ID NO: 5169 - protein, 9 aa, synthetic construct
GGSGGGPAP

SEQ ID NO: 5170 - protein, 9 aa, synthetic construct
GGSPAPGGG

SEQ ID NO: 5171 - protein, 9 aa, synthetic construct
GGGGGSPAP

SEQ ID NO: 5172 - protein, 9 aa, synthetic construct
GGGPAPGGS

SEQ ID NO: 5173 - protein, 9 aa, synthetic construct
PAPGGSGGG

SEQ ID NO: 5174 - protein, 9 aa, synthetic construct
PAPGGGGGS

SEQ ID NO: 5175 - protein, 11 aa, synthetic construct
GGSGSSEAAAK

SEQ ID NO: 5176 - protein, 11 aa, synthetic construct
GGSEAAAKGSS

SEQ ID NO: 5177 - protein, 11 aa, synthetic construct
GSSGGSEAAAK

SEQ ID NO: 5178 - protein, 11 aa, synthetic construct
GSSEAAAKGGS

SEQ ID NO: 5179 - protein, 11 aa, synthetic construct
EAAAKGGSGSS

SEQ ID NO: 5180 - protein, 11 aa, synthetic construct
EAAAKGSSGGS

SEQ ID NO: 5181 - protein, 9 aa, synthetic construct
GGSGSSPAP

SEQ ID NO: 5182 - protein, 9 aa, synthetic construct
GGSPAPGSS

SEQ ID NO: 5183 - protein, 9 aa, synthetic construct
GSSGGSPAP

SEQ ID NO: 5184 - protein, 9 aa, synthetic construct
GSSPAPGGS

SEQ ID NO: 5185 - protein, 9 aa, synthetic construct
PAPGGSGSS

SEQ ID NO: 5186 - protein, 9 aa, synthetic construct
PAPGSSGGS

SEQ ID NO: 5187 - protein, 11 aa, synthetic construct
GGSEAAAKPAP

SEQ ID NO: 5188 - protein, 11 aa, synthetic construct
GGSPAPEAAAK

SEQ ID NO: 5189 - protein, 11 aa, synthetic construct
EAAAKGGSPAP

SEQ ID NO: 5190 - protein, 11 aa, synthetic construct
EAAAKPAPGGS

SEQ ID NO: 5191 - protein, 11 aa, synthetic construct
PAPGGSEAAAK

SEQ ID NO: 5192 - protein, 11 aa, synthetic construct
PAPEAAAKGGS

SEQ ID NO: 5193 - protein, 11 aa, synthetic construct
GGGGSSEAAAK

SEQ ID NO: 5194 - protein, 11 aa, synthetic construct
GGGEAAAKGSS

SEQ ID NO: 5195 - protein, 11 aa, synthetic construct
GSSGGGEAAAK

SEQ ID NO: 5196 - protein, 11 aa, synthetic construct
GSSEAAAKGGG

SEQ ID NO: 5197 - protein, 11 aa, synthetic construct
EAAAKGGGGSS

SEQ ID NO: 5198 - protein, 11 aa, synthetic construct
EAAAKGSSGGG

SEQ ID NO: 5199 - protein, 9 aa, synthetic construct
GGGGSSPAP

SEQ ID NO: 5200 - protein, 9 aa, synthetic construct
GGGPAPGSS

SEQ ID NO: 5201 - protein, 9 aa, synthetic construct
GSSGGGPAP

SEQ ID NO: 5202 - protein, 9 aa, synthetic construct
GSSPAPGGG

SEQ ID NO: 5203 - protein, 9 aa, synthetic construct
PAPGGGGSS

SEQ ID NO: 5204 - protein, 9 aa, synthetic construct
PAPGSSGGG

SEQ ID NO: 5205 - protein, 11 aa, synthetic construct
GGGEAAAKPAP

SEQ ID NO: 5206 - protein, 11 aa, synthetic construct
GGGPAPEAAAK

SEQ ID NO: 5207 - protein, 11 aa, synthetic construct
EAAAKGGGPAP

SEQ ID NO: 5208 - protein, 11 aa, synthetic construct
EAAAKPAPGGG

SEQ ID NO: 5209 - protein, 11 aa, synthetic construct
PAPGGGEAAAK

SEQ ID NO: 5210 - protein, 11 aa, synthetic construct
PAPEAAAKGGG

SEQ ID NO: 5211 - protein, 11 aa, synthetic construct
GSSEAAAKPAP

SEQ ID NO: 5212 - protein, 11 aa, synthetic construct
GSSPAPEAAAK

SEQ ID NO: 5213 - protein, 11 aa, synthetic construct
EAAAKGSSPAP

SEQ ID NO: 5214 - protein, 11 aa, synthetic construct
EAAAKPAPGSS

SEQ ID NO: 5215 - protein, 11 aa, synthetic construct
PAPGSSEAAAK

SEQ ID NO: 5216 - protein, 11 aa, synthetic construct
PAPEAAAKGSS

SEQ ID NO: 5217 - protein, 46 aa, synthetic construct
AEAAAKEAAAKEAAAKEAAAKALEAEAAAKEAAAKEAAAKEAAAKA

SEQ ID NO: 5218 - protein, 15 aa, synthetic construct
GGGGSEAAAKGGGGS

SEQ ID NO: 5219 - protein, 15 aa, synthetic construct
EAAAKGGGGSEAAAK

SEQ ID NO: 5220 - protein, 16 aa, synthetic construct
SGSETPGTSESATPES

SEQ ID NO: 5221 - protein, 12 aa, synthetic construct
GSAGSAAGSGEF

SEQ ID NO: 5222 - protein, 33 aa, synthetic construct; identical to SEQ ID NO: 5006

SEQ ID NO: 5223 - protein, 30 aa, synthetic construct
AHFKISGEKRPSTDPGKKAKNPKKKKKKDP

SEQ ID NO: 5224 - protein, 12 aa, synthetic construct
AHRAKKMSKTHA

SEQ ID NO: 5225 - protein, 14 aa, synthetic construct
ASPEYVNLPINGNG

SEQ ID NO: 5226 - protein, 7 aa, synthetic construct
CTKRPRW

SEQ ID NO: 5227 - protein, 16 aa, synthetic construct
DKAKRVSRNKSEKKRR

SEQ ID NO: 5228 - protein, 15 aa, synthetic construct
EELRLKEELLKGIYA

SEQ ID NO: 5229 - protein, 16 aa, synthetic construct
EEQLRRRKNSRLNNTG

SEQ ID NO: 5230 - protein, 24 aa, synthetic construct
EVLKVIRTGKRKKKAWKRMVTKVC

SEQ ID NO: 5231 - protein, 15 aa, synthetic construct
HHHHHHHHHHHHQPH

SEQ ID NO: 5232 - protein, 17 aa, synthetic construct
HKKKHPDASVNFSEFSK

SEQ ID NO: 5233 - protein, 6 aa, synthetic construct
HKRTKK

SEQ ID NO: 5234 - protein, 29 aa, synthetic construct
IINGRKLKLKKSRRRSSQTSNNSFTSRRS

SEQ ID NO: 5235 - protein, 8 aa, synthetic construct
KAEQERRK

SEQ ID NO: 5236 - protein, 18 aa, synthetic construct
KEKRKRREELFIEQKKRK

SEQ ID NO: 5237 - protein, 14 aa, synthetic construct
KKGKDEWFSRGKKP

SEQ ID NO: 5238 - protein, 12 aa, synthetic construct
KKGPSVQKRKKT

SEQ ID NO: 5239 - protein, 16 aa, synthetic construct
KKKTVINDLLHYKKEK

SEQ ID NO: 5240 - protein, 17 aa, synthetic construct
KKNGGKGKNKPSAKIKK

SEQ ID NO: 5241 - protein, 13 aa, synthetic construct
KKPKWDDFKKKKK

SEQ ID NO: 5242 - protein, 6 aa, synthetic construct
KKRKKD

SEQ ID NO: 5243 - protein, 9 aa, synthetic construct
KKRRKRRRK

SEQ ID NO: 5244 - protein, 9 aa, synthetic construct
KKRRRRARK

SEQ ID NO: 5245 - protein, 7 aa, synthetic construct
KKSKRGR

SEQ ID NO: 5246 - protein, 8 aa, synthetic construct
KKSRKRGS

SEQ ID NO: 5247 - protein, 17 aa, synthetic construct
KKSTALSRELGKIMRRR

SEQ ID NO: 5248 - protein, 17 aa, synthetic construct
KKSYQDPEIIAHSRPRK

SEQ ID NO: 5249 - protein, 17 aa, synthetic construct
KKTGKNRKLKSKRVKTR

SEQ ID NO: 5250 - protein, 17 aa, synthetic construct
KKVSIAGQSGKLWRWKR

SEQ ID NO: 5251 - protein, 20 aa, synthetic construct
KKYENVVIKRSPRKRGRPRK

SEQ ID NO: 5252 - protein, 6 aa, synthetic construct
KNKKRK

SEQ ID NO: 5253 - protein, 6 aa, synthetic construct
KPKKKR

SEQ ID NO: 5254 - protein, 19 aa, synthetic construct
KRAMKDDSHGNSTSPKRRK

SEQ ID NO: 5255 - protein, 17 aa, synthetic construct
KRANSNLVAAYEKAKKK

SEQ ID NO: 5256 - protein, 22 aa, synthetic construct
KRASEDTTSGSPPKKSSAGPKR

SEQ ID NO: 5257 - protein, 16 aa, synthetic construct
KRFKRRWMVRKMKTKK

SEQ ID NO: 5258 - protein, 16 aa, synthetic construct
KRGLNSSFETSPKKVK

SEQ ID NO: 5259 - protein, 20 aa, synthetic construct
KRGNSSIGPNDLSKRKQRKK

SEQ ID NO: 5260 - protein, 23 aa, synthetic construct
KRIHSVSLSQSQIDPSKKVKRAK

SEQ ID NO: 5261 - protein, 15 aa, synthetic construct
KRKGKLKNKGSKRKK

SEQ ID NO: 5262 - protein, 13 aa, synthetic construct
KRRRRRRREKRKR

SEQ ID NO: 5263 - protein, 18 aa, synthetic construct
KRSNDRTYSPEEEKQRRA

SEQ ID NO: 5264 - protein, 21 aa, synthetic construct
KRTVATNGDASGAHRAKKMSK

SEQ ID NO: 5265 - protein, 20 aa, synthetic construct
KRVYNKGEDEQEHLPKGKKR

SEQ ID NO: 5266 - protein, 18 aa, synthetic construct
KSGKAPRRRAVSMDNSNK

SEQ ID NO: 5267 - protein, 19 aa, synthetic construct
KVNFLDMSLDDIIIYKELE

SEQ ID NO: 5268 - protein, 15 aa, synthetic construct
KVQHRIAKKTTRRRR

SEQ ID NO: 5269 - protein, 8 aa, synthetic construct
LSPSLSPL

SEQ ID NO: 5270 - protein, 30 aa, synthetic construct; identical to SEQ ID NO: 5009

SEQ ID NO: 5271 - protein, 52 aa, synthetic construct
MPQNEYIELHRKRYGYRLDYHEKKRKKESREAHERSKKAKKMIGLKAKLYHK

SEQ ID NO: 5272 - protein, 10 aa, synthetic construct
MVQLRPRASR

SEQ ID NO: 5273 - protein, 24 aa, synthetic construct
NNKLLAKRRKGGASPKDDPMDDIK

SEQ ID NO: 5274 - protein, 20 aa, synthetic construct
NYKRPMDGTYGPPAKRHEGE

SEQ ID NO: 5275 - protein, 19 aa, synthetic construct
PDTKRAKLDSSETTMVKKK

SEQ ID NO: 5276 - protein, 7 aa, synthetic construct
PEKRTKI

SEQ ID NO: 5277 - protein, 8 aa, synthetic construct
PGGRGKKK

SEQ ID NO: 5278 - protein, 18 aa, synthetic construct
PGKMDKGEHRQERRDRPY

SEQ ID NO: 5279 - protein, 11 aa, synthetic construct
PKKGDKYDKTD

SEQ ID NO: 5280 - protein, 7 aa, synthetic construct
PKKKSRK

SEQ ID NO: 5281 - protein, 7 aa, synthetic construct
PKKNKPE

SEQ ID NO: 5282 - protein, 7 aa, synthetic construct
PKKRAKV

SEQ ID NO: 5283 - protein, 9 aa, synthetic construct
PKPKKLKVE

SEQ ID NO: 5284 - protein, 7 aa, synthetic construct
PKRGRGR

SEQ ID NO: 5285 - protein, 9 aa, synthetic construct
PKRRLVDDA

SEQ ID NO: 5286 - protein, 7 aa, synthetic construct
PKRRRTY

SEQ ID NO: 5287 - protein, 6 aa, synthetic construct
PLFKRR

SEQ ID NO: 5288 - protein, 7 aa, synthetic construct
PLRKAKR

SEQ ID NO: 5289 - protein, 9 aa, synthetic construct
PPAKRKCIF

SEQ ID NO: 5290 - protein, 8 aa, synthetic construct
PPARRRRL

SEQ ID NO: 5291 - protein, 8 aa, synthetic construct
PPKKKRKV

SEQ ID NO: 5292 - protein, 10 aa, synthetic construct
PPNKRMKVKH

SEQ ID NO: 5293 - protein, 13 aa, synthetic construct
PPRIYPQLPSAPT

SEQ ID NO: 5294 - protein, 13 aa, synthetic construct
PQRSPFPKSSVKR

SEQ ID NO: 5295 - protein, 8 aa, synthetic construct
PRPRKVPR

SEQ ID NO: 5296 - protein, 9 aa, synthetic construct
PRRRVQRKR

SEQ ID NO: 5297 - protein, 7 aa, synthetic construct
PRRVRLK

SEQ ID NO: 5298 - protein, 7 aa, synthetic construct
PSRKRPR

SEQ ID NO: 5299 - protein, 8 aa, synthetic construct
PSSKKRKV

SEQ ID NO: 5300 - protein, 7 aa, synthetic construct
PTKKRVK

SEQ ID NO: 5301 - protein, 9 aa, synthetic construct
QRPGPYDRP

SEQ ID NO: 5302 - protein, 18 aa, synthetic construct
RGKGGKGLGKGGAKRHRK

SEQ ID NO: 5303 - protein, 24 aa, synthetic construct
RKAGKGGGGHKTTKKRSAKDEKVP

SEQ ID NO: 5304 - protein, 9 aa, synthetic construct
RKIKLKRAK

SEQ ID NO: 5305 - protein, 9 aa, synthetic construct
RKIKRKRAK

SEQ ID NO: 5306 - protein, 17 aa, synthetic construct
RKKEAPGPREELRSRGR

SEQ ID NO: 5307 - protein, 7 aa, synthetic construct
RKKRKGK

SEQ ID NO: 5308 - protein, 9 aa, synthetic construct
RKKRRQRRR

SEQ ID NO: 5309 - protein, 25 aa, synthetic construct
RKKSIPLSIKNLKRKHKRKKNKITR

SEQ ID NO: 5310 - protein, 20 aa, synthetic construct
RKLVKPKNTKMKTKLRTNPY

SEQ ID NO: 5311 - protein, 16 aa, synthetic construct
RKRLILSDKGQLDWKK

SEQ ID NO: 5312 - protein, 7 aa, synthetic construct
RKRLKSK

SEQ ID NO: 5313 - protein, 9 aa, synthetic construct
RKRRVRDNM

SEQ ID NO: 5314 - protein, 22 aa, synthetic construct
RKRSPKDKKEKDLDGAGKRRKT

SEQ ID NO: 5315 - protein, 22 aa, synthetic construct
RKRTPRVDGQTGENDMNKRRRK

SEQ ID NO: 5316 - protein, 10 aa, synthetic construct
RLPVRRRRRR

SEQ ID NO: 5317 - protein, 10 aa, synthetic construct
RLRFRKPKSK

SEQ ID NO: 5318 - protein, 6 aa, synthetic construct
RQQRKR

SEQ ID NO: 5319 - protein, 16 aa, synthetic construct
RRDLNSSFETSPKKVK

SEQ ID NO: 5320 - protein, 8 aa, synthetic construct
RRDRAKLR

SEQ ID NO: 5321 - protein, 8 aa, synthetic construct
RRGDGRRR

SEQ ID NO: 5322 - protein, 11 aa, synthetic construct
RRGRKRKAEKQ

SEQ ID NO: 5323 - protein, 6 aa, synthetic construct
RRKKRR

SEQ ID NO: 5324 - protein, 19 aa, synthetic construct
RRKRSKSEDMDSVESKRRR

SEQ ID NO: 5325 - protein, 6 aa, synthetic construct
RRKRSR

SEQ ID NO: 5326 - protein, 14 aa, synthetic construct
RRPKGKTLQKRKPK

SEQ ID NO: 5327 - protein, 18 aa, synthetic construct
RRRGFERFGPDNMGRKRK

SEQ ID NO: 5328 - protein, 15 aa, synthetic construct
RRRGKNKVAAQNCRK

SEQ ID NO: 5329 - protein, 6 aa, synthetic construct
RRRKRR

SEQ ID NO: 5330 - protein, 14 aa, synthetic construct
RRRQKQKGGASRRR

SEQ ID NO: 5331 - protein, 13 aa, synthetic construct
RRRREGPRARRRR

SEQ ID NO: 5332 - protein, 61 aa, synthetic construct
RRTIRLKLVYDKCDRSCKIQKKNRNKCQYCRFHKCLSVGMSHNAIRFGRMPRSEKAKLKAE

SEQ ID NO: 5333 - protein, 17 aa, synthetic construct
RRVPQRKEVSRCRKCRK

SEQ ID NO: 5334 - protein, 32 aa, synthetic construct
RVGGRRQAVECIEDLLNEPGQPLDLSCKRPRP

SEQ ID NO: 5335 - protein, 9 aa, synthetic construct
RVVKLRIAP

SEQ ID NO: 5336 - protein, 6 aa, synthetic construct
RVVRRR

SEQ ID NO: 5337 - protein, 12 aa, synthetic construct
SKRKTKISRKTR

SEQ ID NO: 5338 - protein, 16 aa, synthetic construct
SYVKTVPNRTRTYIKL

SEQ ID NO: 5339 - protein, 12 aa, synthetic construct
TGKNEAKKRKIA

SEQ ID NO: 5340 - protein, 30 aa, synthetic construct
TLSPASSPSSVSCPVIPASTDESPGSALNI

SEQ ID NO: 5341 - protein, 12 aa, synthetic construct
VSKKQRTGKKIH

SEQ ID NO: 5342 - protein, 9 aa, synthetic construct
SPKKKRKVE

SEQ ID NO: 5343 - protein, 19 aa, synthetic construct
KRTADGSEFESPKKKRKVE

SEQ ID NO: 5344 - protein, 9 aa, synthetic construct
PAAKRVKLD

SEQ ID NO: 5345 - protein, 7 aa, synthetic construct
PKKKRKV

SEQ ID NO: 5346 - protein, 30 aa, synthetic construct; identical to SEQ ID NO: 5009

SEQ ID NO: 5347 - protein, 11 aa, synthetic construct
SPKKKRKVEAS

SEQ ID NO: 5348 - protein, 16 aa, synthetic construct
MAPKKKRKVGIHRGVP

SEQ ID NO: 5349 - protein, 29 aa, synthetic construct
KRTADGSEFEKRTADGSEFESPKKKAKVE

SEQ ID NO: 5350 - protein, 10 aa, synthetic construct
KRTADGSEFE

SEQ ID NO: 5351 - protein, 19 aa, synthetic construct
KRTADGSEFESPKKKAKVE

SEQ ID NO: 5352-6000 - skipped (649 entries)

SEQ ID NO: 6001 - protein, 2090 aa, synthetic construct
MPAAKRVKLDGGDKKYSIGLDIGTNSVGWAVITDEYKVPSKKFKVLGNTDRHSIKKNLIGALLFDSGETAEATRLKRTARRRYTRRKNRICYLQEIFSNEMAKVDDSFFHRLEESFLVEEDKKHERHPIFGNIVDEVAYHEKYPTIYHLRKKLVDSTDKADLRLIYLALAHMIKFRGHFLIEGDLNPDNSDVDKLFIQLVQTYNQLFEENPINASGVDAKAILSARLSKSRRLENLIAQLPGEKKNGLFGNLIALSLGLTPNFKSNFDLAEDAKLQLSKDTYDDDLDNLLAQIGDQYADLFLAAKNLSDAILLSDILRVNTEITKAPLSASMIKRYDEHHQDLTLLKALVRQQLPEKYKEIFFDQSKNGYAGYIDGGASQEEFYKFIKPILEKMDGTEELLVKLNREDLLRKQRTFDNGSIPHQIHLGELHAILRRQEDFYPFLKDNREKIEKILTFRIPYYVGPLARGNSRFAWMTRKSEETITPWNFEEVVDKGASAQSFIERMTNFDKNLPNEKVLPKHSLLYEYFTVYNELTKVKYVTEGMRKPAFLSGEQKKAIVDLLFKTNRKVTVKQLKEDYFKKIECFDSVEISGVEDRFNASLGTYHDLLKIIKDKDFLDNEENEDILEDIVLTLTLFEDREMIEERLKTYAHLFDDKVMKQLKRRRYTGWGRLSRKLINGIRDKQSGKTILDFLKSDGFANRNFMQLIHDDSLTFKEDIQKAQVSGQGDSLHEHIANLAGSPAIKKGILQTVKVVDELVKVMGRHKPENIVIEMARENQTTQKGQKNSRERMKRIEEGIKELGSQILKEHPVENTQLQNEKLYLYYLQNGRDMYVDQELDINRLSDYDVDHIVPQSFLKDDSIDNKVLTRSDKARGKSDNVPSEEVVKKMKNYWRQLLNAKLITQRKFDNLTKAERGGLSELDKAGFIKRQLVETRQITKHVAQILDSRMNTKYDENDKLIREVKVITLKSKLVSDFRKDFQFYKVREINNYHHAHDAYLNAVVGTALIKKYPKLESEFVYGDYKVYDVRKMIAKSEQEIGKATAKYFFYSNIMNFFKTEITLANGEIRKRPLIETNGETGEIVWDKGRDFATVRKVLSMPQVNIVKKTEVQTGGFSKESILPKRNSDKLIARKKDWDPKKYGGFDSPTVAYSVLVVAKVEKGKSKKLKSVKELLGITIMERSSFEKNPIDFLEAKGYKEVKKDLIIKLPKYSLFELENGRKRMLASAGELQKGNELALPSKYVNFLYLASHYEKLKGSPEDNEQKQLFVEQHKHYLDEIIEQISEFSKRVILADANLDKVLSAYNKHRDKPIREQAENIIHLFTLTNLGAPAAFKYFDTTIDRKRYTSTKEVLDATLIHQSITGLYETRIDLSQLGGDGGGGSGGTAPLEEEYRLFLEAPIQNVTLLEQWKREIPKVWAEINPPGLASTQAPIHVQLLSTALPVRVRQYPITLEAKRSLRETIRKFRAAGILRPVHSPWNTPLLPVRKSGTSEYRMVQDLREVNKRVETIHPTVPNPYTLLSLLPPDRIWYSVLDLKDAFFCIPLAPESQLIFAFEWADAEEGESGQLTWTRLPQGFKNSPTLFNEALNRDLQGFRLDHPSVSLLQYVDDLLIAADTQAACLSATRDLLMTLAELGYRVSGKKAQLCQEEVTYLGFKIHKGSRSLSNSRTQAILQIPVPKTKRQVREFLGKIGYCRLFIPGFAELAQPLYAATRPGNDPLVWGEKEEEAFQSLKLALTQPPALALPSLDKPFQLFVEETSGAAKGVLTQALGPWKRPVAYLSKRLDPVAAGWPRCLRAIAAAALLTREASKLTFGQDIEITSSHNLESLLRSPPDKWLTNARITQYQVLLLDPPRVRFKQTAALNPATLLPETDDTLPIHHCLDTLDSLTSTRPDLTDQPLAQAEATLFTDGSSYIRDGKRYAGAAVVTLDSVIWAEPLPIGTSAQKAELIALTKALEWSKDKSVNIYTDSRYAFATLHVHGMIYRERGWLTAGGKAIKNAPEILALLTAVWLPKRVAVMHCKGHQKDDAPTSTGNRRADEVAREVAIRPLSTQATISAGKRTADGSEFEKRTADGSEFESPKKKAKVE

SEQ ID NO: 6002 - protein, 2094 aa, synthetic construct
MPAAKRVKLDGGDKKYSIGLDIGTNSVGWAVITDEYKVPSKKFKVLGNTDRHSIKKNLIGALLFDSGETAEATRLKRTARRRYTRRKNRICYLQEIFSNEMAKVDDSFFHRLEESFLVEEDKKHERHPIFGNIVDEVAYHEKYPTIYHLRKKLVDSTDKADLRLIYLALAHMIKFRGHFLIEGDLNPDNSDVDKLFIQLVQTYNQLFEENPINASGVDAKAILSARLSKSRRLENLIAQLPGEKKNGLFGNLIALSLGLTPNFKSNFDLAEDAKLQLSKDTYDDDLDNLLAQIGDQYADLFLAAKNLSDAILLSDILRVNTEITKAPLSASMIKRYDEHHQDLTLLKALVRQQLPEKYKEIFFDQSKNGYAGYIDGGASQEEFYKFIKPILEKMDGTEELLVKLNREDLLRKQRTFDNGSIPHQIHLGELHAILRRQEDFYPFLKDNREKIEKILTFRIPYYVGPLARGNSRFAWMTRKSEETITPWNFEEVVDKGASAQSFIERMTNFDKNLPNEKVLPKHSLLYEYFTVYNELTKVKYVTEGMRKPAFLSGEQKKAIVDLLFKTNRKVTVKQLKEDYFKKIECFDSVEISGVEDRFNASLGTYHDLLKIIKDKDFLDNEENEDILEDIVLTLTLFEDREMIEERLKTYAHLFDDKVMKQLKRRRYTGWGRLSRKLINGIRDKQSGKTILDFLKSDGFANRNFMQLIHDDSLTFKEDIQKAQVSGQGDSLHEHIANLAGSPAIKKGILQTVKVVDELVKVMGRHKPENIVIEMARENQTTQKGQKNSRERMKRIEEGIKELGSQILKEHPVENTQLQNEKLYLYYLQNGRDMYVDQELDINRLSDYDVDHIVPQSFLKDDSIDNKVLTRSDKARGKSDNVPSEEVVKKMKNYWRQLLNAKLITQRKFDNLTKAERGGLSELDKAGFIKRQLVETRQITKHVAQILDSRMNTKYDENDKLIREVKVITLKSKLVSDFRKDFQFYKVREINNYHHAHDAYLNAVVGTALIKKYPKLESEFVYGDYKVYDVRKMIAKSEQEIGKATAKYFFYSNIMNFFKTEITLANGEIRKRPLIETNGETGEIVWDKGRDFATVRKVLSMPQVNIVKKTEVQTGGFSKESILPKRNSDKLIARKKDWDPKKYGGFDSPTVAYSVLVVAKVEKGKSKKLKSVKELLGITIMERSSFEKNPIDFLEAKGYKEVKKDLIIKLPKYSLFELENGRKRMLASAGELQKGNELALPSKYVNFLYLASHYEKLKGSPEDNEQKQLFVEQHKHYLDEIIEQISEFSKRVILADANLDKVLSAYNKHRDKPIREQAENIIHLFTLTNLGAPAAFKYFDTTIDRKRYTSTKEVLDATLIHQSITGLYETRIDLSQLGGDGGGGSGGTVSLQDEHRLFDIPVTTSLPDVWLQDFPQAWAETGGLGRAKCQAPIIIDLKPTAVPVSIKQYPMSLEAHMGIRQHIIKFLELGVLRPCRSPWNTPLLPVKKPGTQDYRPVQDLREINKRTVDIHPTVPNPYNLLSTLKPDYSWYTVLDLKDAFFCLPLAPQSQELFAFEWKDPERGISGQLTWTRLPQGFKNSPTLFDEALHRDLTDFRTQHPEVTLLQYVDDLLLAAPTKKACTQGTRHLLQELGEKGYRASAKKAQICQTKVTYLGYILSEGKRWLTPGRIETVARIPPPRNPREVREFLGTAGFCRLWIPGFAELAAPLYALTKESTPFTWQTEHQLAFEALKKALLSAPALGLPDTSKPFTLFLDERQGIAKGVLTQKLGPWKRPVAYLSKKLDPVAAGWPPCLRIMAATAMLVKDSAKLTLGQPLTVITPHTLEAIVRQPPDRWITNARLTHYQALLLDTDRVQFGPPVTLNPATLLPVPENQPSPHDCRQVLAETHGTREDLKDQELPDADHTWYTDGSSYLDSGTRRAGAAVVDGHNTIWAQSLPPGTSAQKAELIALTKALELSKGKKANIYTDSRYAFATAHTHGSIYERRGLLTSEGKEIKNKAEIIALLKALFLPQEVAIIHCPGHQKGQDPVAVGNRQADRVARQAAMAEVLTLATEPDNTSHITAGKRTADGSEFEKRTADGSEFESPKKKAKVE

SEQ ID NO: 6003 - protein, 2079 aa, synthetic construct
MPAAKRVKLDGGDKKYSIGLDIGTNSVGWAVITDEYKVPSKKFKVLGNTDRHSIKKNLIGALLFDSGETAEATRLKRTARRRYTRRKNRICYLQEIFSNEMAKVDDSFFHRLEESFLVEEDKKHERHPIFGNIVDEVAYHEKYPTIYHLRKKLVDSTDKADLRLIYLALAHMIKFRGHFLIEGDLNPDNSDVDKLFIQLVQTYNQLFEENPINASGVDAKAILSARLSKSRRLENLIAQLPGEKKNGLFGNLIALSLGLTPNFKSNFDLAEDAKLQLSKDTYDDDLDNLLAQIGDQYADLFLAAKNLSDAILLSDILRVNTEITKAPLSASMIKRYDEHHQDLTLLKALVRQQLPEKYKEIFFDQSKNGYAGYIDGGASQEEFYKFIKPILEKMDGTEELLVKLNREDLLRKQRTFDNGSIPHQIHLGELHAILRRQEDFYPFLKDNREKIEKILTFRIPYYVGPLARGNSRFAWMTRKSEETITPWNFEEVVDKGASAQSFIERMTNFDKNLPNEKVLPKHSLLYEYFTVYNELTKVKYVTEGMRKPAFLSGEQKKAIVDLLFKTNRKVTVKQLKEDYFKKIECFDSVEISGVEDRFNASLGTYHDLLKIIKDKDFLDNEENEDILEDIVLTLTLFEDREMIEERLKTYAHLFDDKVMKQLKRRRYTGWGRLSRKLINGIRDKQSGKTILDFLKSDGFANRNFMQLIHDDSLTFKEDIQKAQVSGQGDSLHEHIANLAGSPAIKKGILQTVKVVDELVKVMGRHKPENIVIEMARENQTTQKGQKNSRERMKRIEEGIKELGSQILKEHPVENTQLQNEKLYLYYLQNGRDMYVDQELDINRLSDYDVDHIVPQSFLKDDSIDNKVLTRSDKARGKSDNVPSEEVVKKMKNYWRQLLNAKLITQRKFDNLTKAERGGLSELDKAGFIKRQLVETRQITKHVAQILDSRMNTKYDENDKLIREVKVITLKSKLVSDFRKDFQFYKVREINNYHHAHDAYLNAVVGTALIKKYPKLESEFVYGDYKVYDVRKMIAKSEQEIGKATAKYFFYSNIMNFFKTEITLANGEIRKRPLIETNGETGEIVWDKGRDFATVRKVLSMPQVNIVKKTEVQTGGFSKESILPKRNSDKLIARKKDWDPKKYGGFDSPTVAYSVLVVAKVEKGKSKKLKSVKELLGITIMERSSFEKNPIDFLEAKGYKEVKKDLIIKLPKYSLFELENGRKRMLASAGELQKGNELALPSKYVNFLYLASHYEKLKGSPEDNEQKQLFVEQHKHYLDEIIEQISEFSKRVILADANLDKVLSAYNKHRDKPIREQAENIIHLFTLTNLGAPAAFKYFDTTIDRKRYTSTKEVLDATLIHQSITGLYETRIDLSQLGGDGGGGSGGVPWILKKPLELTIKLDLEEQQGTLLNNSILSKKGKEELKQLFEKYSALWQSWENQVGHRRIRPHKIATGTVKPTPQKQYHINPKAKPDIQIVINDLLKQGVLIQKESTMNTPVYPVPKPNGRWRMVLDYRAVNKVTPLIAVQNQHSYGILGSLFKGRYKTTIDLSNGFWAHPIVPEDYWITAFTWQGKQYCWTVLPQGFLNSPGLFTGDVVDLLQGIPNVEVYVDDVYISHDSEKEHLEYLDILFNRLKEAGYIISLKKSNIANSIVDFLGFQITNEGRGLTDTFKEKLENITAPTTLKQLQSILGLLNFARNFIPDFTELIAPLYALIPKSTKNYVPWQIEHSTTLETLITKLNGAEYLQGRKGDKTLIMKVNASYTTGYIRYYNEGEKKPISYVSIVFSKTELKFTELEKLLTTVHKGLLKALDLSMGQNIHVYSPIVSMQNIQKTPQTAKKALASRWLSWLSYLEDPRIRFFYDPQMPALKDLPAVDTGKDNKKHPSNFQHIFYTDGSAITSPTKEGHLNAGMGIVYFINKDGNLQKQQEWSISLGNHTAQFAEIAAFEFALKKCLPLGGNILVVTDSNYVAKAYNEELDVWASNGFVNNRKKPLKHISKWKSVADLKRLRPDVVVTHEPGHQKLDSSPHAYGNNLADQLATQASFKVHAGKRTADGSEFEKRTADGSEFESPKKKAKVE

SEQ ID NO: 6004 - protein, 2087 aa, synthetic construct
MPAAKRVKLDGGDKKYSIGLDIGTNSVGWAVITDEYKVPSKKFKVLGNTDRHSIKKNLIGALLFDSGETAEATRLKRTARRRYTRRKNRICYLQEIFSNEMAKVDDSFFHRLEESFLVEEDKKHERHPIFGNIVDEVAYHEKYPTIYHLRKKLVDSTDKADLRLIYLALAHMIKFRGHFLIEGDLNPDNSDVDKLFIQLVQTYNQLFEENPINASGVDAKAILSARLSKSRRLENLIAQLPGEKKNGLFGNLIALSLGLTPNFKSNFDLAEDAKLQLSKDTYDDDLDNLLAQIGDQYADLFLAAKNLSDAILLSDILRVNTEITKAPLSASMIKRYDEHHQDLTLLKALVRQQLPEKYKEIFFDQSKNGYAGYIDGGASQEEFYKFIKPILEKMDGTEELLVKLNREDLLRKQRTFDNGSIPHQIHLGELHAILRRQEDFYPFLKDNREKIEKILTFRIPYYVGPLARGNSRFAWMTRKSEETITPWNFEEVVDKGASAQSFIERMTNFDKNLPNEKVLPKHSLLYEYFTVYNELTKVKYVTEGMRKPAFLSGEQKKAIVDLLFKTNRKVTVKQLKEDYFKKIECFDSVEISGVEDRFNASLGTYHDLLKIIKDKDFLDNEENEDILEDIVLTLTLFEDREMIEERLKTYAHLFDDKVMKQLKRRRYTGWGRLSRKLINGIRDKQSGKTILDFLKSDGFANRNFMQLIHDDSLTFKEDIQKAQVSGQGDSLHEHIANLAGSPAIKKGILQTVKVVDELVKVMGRHKPENIVIEMARENQTTQKGQKNSRERMKRIEEGIKELGSQILKEHPVENTQLQNEKLYLYYLQNGRDMYVDQELDINRLSDYDVDHIVPQSFLKDDSIDNKVLTRSDKARGKSDNVPSEEVVKKMKNYWRQLLNAKLITQRKFDNLTKAERGGLSELDKAGFIKRQLVETRQITKHVAQILDSRMNTKYDENDKLIREVKVITLKSKLVSDFRKDFQFYKVREINNYHHAHDAYLNAVVGTALIKKYPKLESEFVYGDYKVYDVRKMIAKSEQEIGKATAKYFFYSNIMNFFKTEITLANGEIRKRPLIETNGETGEIVWDKGRDFATVRKVLSMPQVNIVKKTEVQTGGFSKESILPKRNSDKLIARKKDWDPKKYGGFDSPTVAYSVLVVAKVEKGKSKKLKSVKELLGITIMERSSFEKNPIDFLEAKGYKEVKKDLIIKLPKYSLFELENGRKRMLASAGELQKGNELALPSKYVNFLYLASHYEKLKGSPEDNEQKQLFVEQHKHYLDEIIEQISEFSKRVILADANLDKVLSAYNKHRDKPIREQAENIIHLFTLTNLGAPAAFKYFDTTIDRKRYTSTKEVLDATLIHQSITGLYETRIDLSQLGGDGGGGSGGTLQLEEEYRLFEPESTQKQEMDIWLKNFPQAWAETGGMGTAHCQAPVLIQLKATATPISIRQYPMPHEAYQGIKPHIRRMLDQGILKPCQSPWNTPLLPVKKPGTEDYRPVQDLREVNKRVEDIHPTVPNPYNLLSTLPPSHPWYTVLDLKDAFFCLRLHSESQLLFAFEWRDPEIGLSGQLTWTRLPQGFKNSPTLFNEALHSDLADFRVRYPALVLLQYVDDLLLAAATRTECLEGTKALLETLGNKGYRASAKKAQICLQEVTYLGYSLKDGQRWLTKARKEAILSIPVPKNSRQVREFLGKAGYCRLFIPGFAELAAPLYPLTRPGTLFQWGTEQQLAFEDIKKALLSSPALGLPDITKPFELFIDENSGFAKGVLVQKLGPWKRPVAYLSKKLDTVASGWPPCLRMVAAIAILVKDAGKLTLGQPLTILTSHPVEALVRQPPNKWLSNARMTHYQAMLLDAERVHFGPTVSLNPATLLPLPSGGNHHDCLQILAETHGTRPDLTDQPLPDADLTWYTDGSSFIRNGEREAGAAVTTESEVIWAAPLPPGTSAQRAELIALTQALKMAEGKKLTVYTDSRYAFATTHVHGEIYRRRGWLTSEGKEIKNKNEILALLEALFLPKRLSIIHCPGHQKGDSPQAKGNRLADDTAKKAATETHSSLTVLPAGKRTADGSEFEKRTADGSEFESPKKKAKVE

SEQ ID NO: 6005 - protein, 2079 aa, synthetic construct
MPAAKRVKLDGGDKKYSIGLDIGTNSVGWAVITDEYKVPSKKFKVLGNTDRHSIKKNLIGALLFDSGETAEATRLKRTARRRYTRRKNRICYLQEIFSNEMAKVDDSFFHRLEESFLVEEDKKHERHPIFGNIVDEVAYHEKYPTIYHLRKKLVDSTDKADLRLIYLALAHMIKFRGHFLIEGDLNPDNSDVDKLFIQLVQTYNQLFEENPINASGVDAKAILSARLSKSRRLENLIAQLPGEKKNGLFGNLIALSLGLTPNFKSNFDLAEDAKLQLSKDTYDDDLDNLLAQIGDQYADLFLAAKNLSDAILLSDILRVNTEITKAPLSASMIKRYDEHHQDLTLLKALVRQQLPEKYKEIFFDQSKNGYAGYIDGGASQEEFYKFIKPILEKMDGTEELLVKLNREDLLRKQRTFDNGSIPHQIHLGELHAILRRQEDFYPFLKDNREKIEKILTFRIPYYVGPLARGNSRFAWMTRKSEETITPWNFEEVVDKGASAQSFIERMTNFDKNLPNEKVLPKHSLLYEYFTVYNELTKVKYVTEGMRKPAFLSGEQKKAIVDLLFKTNRKVTVKQLKEDYFKKIECFDSVEISGVEDRFNASLGTYHDLLKIIKDKDFLDNEENEDILEDIVLTLTLFEDREMIEERLKTYAHLFDDKVMKQLKRRRYTGWGRLSRKLINGIRDKQSGKTILDFLKSDGFANRNFMQLIHDDSLTFKEDIQKAQVSGQGDSLHEHIANLAGSPAIKKGILQTVKVVDELVKVMGRHKPENIVIEMARENQTTQKGQKNSRERMKRIEEGIKELGSQILKEHPVENTQLQNEKLYLYYLQNGRDMYVDQELDINRLSDYDVDHIVPQSFLKDDSIDNKVLTRSDKARGKSDNVPSEEVVKKMKNYWRQLLNAKLITQRKFDNLTKAERGGLSELDKAGFIKRQLVETRQITKHVAQILDSRMNTKYDENDKLIREVKVITLKSKLVSDFRKDFQFYKVREINNYHHAHDAYLNAVVGTALIKKYPKLESEFVYGDYKVYDVRKMIAKSEQEIGKATAKYFFYSNIMNFFKTEITLANGEIRKRPLIETNGETGEIVWDKGRDFATVRKVLSMPQVNIVKKTEVQTGGFSKESILPKRNSDKLIARKKDWDPKKYGGFDSPTVAYSVLVVAKVEKGKSKKLKSVKELLGITIMERSSFEKNPIDFLEAKGYKEVKKDLIIKLPKYSLFELENGRKRMLASAGELQKGNELALPSKYVNFLYLASHYEKLKGSPEDNEQKQLFVEQHKHYLDEIIEQISEFSKRVILADANLDKVLSAYNKHRDKPIREQAENIIHLFTLTNLGAPAAFKYFDTTIDRKRYTSTKEVLDATLIHQSITGLYETRIDLSQLGGDGGGGSGGVPWLTQQPLQLTILVPLQEYQEKILSKTALPEDQKQQLKTLFVKYDNLWQHWENQVGHRKIRPHNIATGDYPPRPQKQYPINPKAKPSIQIVIDDLLKQGVLTPQNSTMNTPVYPVPKPDGRWRMVLDYREVNKTIPLTAAQNQHSAGILATIVRQKYKTTLDLANGFWAHPITPESYWLTAFTWQGKQYCWTRLPQGFLNSPALFNADVVDLLKEIPNVQVYVDDIYLSHDDPKEHVQQLEKVFQILLQAGYVVSLKKSEIGQKTVEFLGFNITKEGRGLTDTFKTKLLNITPPKDLKQLQSILGKLNFARNFIPNFAELVQPLYNLIAPAKGKYIEWSEENTKQLNMVIEALNTASNLEERLPEQRLVIKVNTSPSAGYVRYYNETGKKPIMYLNYVFSKAELKFSMLEKLLTTMHKALIKAMDLAMGQEILVYSPIVSMTKIQKTPLPERKALPIRWITWMTYLEDPRIQFHYDKTLPELKHIPDVYTSSQSPVKHPSQYEGVFYTDGSAIKSPDPTKSNNAGMGIVHATYKPEYQVLNQWSIPLGNHTAQMAEIAAVEFACKKALKIPGPVLVITDSFYVAESANKELPYWKSNGFVNNKKKPLKHISKWKSIAECLSMKPDITIQHEKGISLQIPVFILKGNALADKLATQGSYVVNAGKRTADGSEFEKRTADGSEFESPKKKAKVE

SEQ ID NO: 6006 - protein, 2210 aa, synthetic construct
MPAAKRVKLDGGDKKYSIGLDIGTNSVGWAVITDEYKVPSKKFKVLGNTDRHSIKKNLIGALLFDSGETAEATRLKRTARRRYTRRKNRICYLQEIFSNEMAKVDDSFFHRLEESFLVEEDKKHERHPIFGNIVDEVAYHEKYPTIYHLRKKLVDSTDKADLRLIYLALAHMIKFRGHFLIEGDLNPDNSDVDKLFIQLVQTYNQLFEENPINASGVDAKAILSARLSKSRRLENLIAQLPGEKKNGLFGNLIALSLGLTPNFKSNFDLAEDAKLQLSKDTYDDDLDNLLAQIGDQYADLFLAAKNLSDAILLSDILRVNTEITKAPLSASMIKRYDEHHQDLTLLKALVRQQLPEKYKEIFFDQSKNGYAGYIDGGASQEEFYKFIKPILEKMDGTEELLVKLNREDLLRKQRTFDNGSIPHQIHLGELHAILRRQEDFYPFLKDNREKIEKILTFRIPYYVGPLARGNSRFAWMTRKSEETITPWNFEEVVDKGASAQSFIERMTNFDKNLPNEKVLPKHSLLYEYFTVYNELTKVKYVTEGMRKPAFLSGEQKKAIVDLLFKTNRKVTVKQLKEDYFKKIECFDSVEISGVEDRFNASLGTYHDLLKIIKDKDFLDNEENEDILEDIVLTLTLFEDREMIEERLKTYAHLFDDKVMKQLKRRRYTGWGRLSRKLINGIRDKQSGKTILDFLKSDGFANRNFMQLIHDDSLTFKEDIQKAQVSGQGDSLHEHIANLAGSPAIKKGILQTVKVVDELVKVMGRHKPENIVIEMARENQTTQKGQKNSRERMKRIEEGIKELGSQILKEHPVENTQLQNEKLYLYYLQNGRDMYVDQELDINRLSDYDVDHIVPQSFLKDDSIDNKVLTRSDKARGKSDNVPSEEVVKKMKNYWRQLLNAKLITQRKFDNLTKAERGGLSELDKAGFIKRQLVETRQITKHVAQILDSRMNTKYDENDKLIREVKVITLKSKLVSDFRKDFQFYKVREINNYHHAHDAYLNAVVGTALIKKYPKLESEFVYGDYKVYDVRKMIAKSEQEIGKATAKYFFYSNIMNFFKTEITLANGEIRKRPLIETNGETGEIVWDKGRDFATVRKVLSMPQVNIVKKTEVQTGGFSKESILPKRNSDKLIARKKDWDPKKYGGFDSPTVAYSVLVVAKVEKGKSKKLKSVKELLGITIMERSSFEKNPIDFLEAKGYKEVKKDLIIKLPKYSLFELENGRKRMLASAGELQKGNELALPSKYVNFLYLASHYEKLKGSPEDNEQKQLFVEQHKHYLDEIIEQISEFSKRVILADANLDKVLSAYNKHRDKPIREQAENIIHLFTLTNLGAPAAFKYFDTTIDRKRYTSTKEVLDATLIHQSITGLYETRIDLSQLGGDGGGGSGGTLGDQGSRGSDPLPEPRVTLTVEGIPTEFLVNTGAEHSVLTKPMGKMGSKRTVVAGATGSKVYPWTTKRLLKIGQKQVTHSFLVIPECPAPLLGRDLLTKLKAQIQFSTEGPQVTWEDRPAMCLVLNLEEEYRLHEKPVPPSIDPSWLQLFPMVWAEKAGMGLANQVPPVVVELKSDASPVAVRQYPMSKEAREGIRPHIQRFLDLGILVPCQSPWNTPLLPVKKPGTNDYRPVQDLREVNKRVQDIHPTVPNPYNLLSSLPPSHTWYSVLDLKDAFFCLKLHPNSQPLFAFEWRDPEKGNTGQLTWTRLPQGFKNSPTLFDEALHRDLASFRALNPQVVMLQYVDDLLVAAPTYRDCKEGTRRLLQELSKLGYRVSAKKAQLCREEVTYLGYLLKGGKRWLTPARKATVMKIPTPTTPRQVREFLGTAGFCRLWIPGFASLAAPLYPLTREKVPFTWTEAHQEAFGRIKEALLSAPALALPDLTKPFALYVDEKEGVARGVLTQTLGPWRRPVAYLSKKLDPVASGWPTCLKAIAAVALLLKDADKLTLGQNVLVIAPHNLESIVRQPPDRWMTNARMTHYQSLLLNERVSFAPPAILNPATLLPVESDDTPIHICSEILAEETGTRPDLRDQPLPGVPAWYTDGSSFIMDGRRQAGAAIVDNKRTVWASNLPEGTSAQKAELIALTQALRLAEGKSINIYTDSRYAFATAHVHGAIYKQRGLLTSAGKDIKNKEEILALLEAIHLPKRVAIIHCPGHQRGTDPVATGNRKADEAAKQAAQSTRILTETTKNAGKRTADGSEFEKRTADGSEFESPKKKAKVE

SEQ ID NO: 6007 - protein, 2210 aa, synthetic construct
MPAAKRVKLDGGDKKYSIGLDIGTNSVGWAVITDEYKVPSKKFKVLGNTDRHSIKKNLIGALLFDSGETAEATRLKRTARRRYTRRKNRICYLQEIFSNEMAKVDDSFFHRLEESFLVEEDKKHERHPIFGNIVDEVAYHEKYPTIYHLRKKLVDSTDKADLRLIYLALAHMIKFRGHFLIEGDLNPDNSDVDKLFIQLVQTYNQLFEENPINASGVDAKAILSARLSKSRRLENLIAQLPGEKKNGLFGNLIALSLGLTPNFKSNFDLAEDAKLQLSKDTYDDDLDNLLAQIGDQYADLFLAAKNLSDAILLSDILRVNTEITKAPLSASMIKRYDEHHQDLTLLKALVRQQLPEKYKEIFFDQSKNGYAGYIDGGASQEEFYKFIKPILEKMDGTEELLVKLNREDLLRKQRTFDNGSIPHQIHLGELHAILRRQEDFYPFLKDNREKIEKILTFRIPYYVGPLARGNSRFAWMTRKSEETITPWNFEEVVDKGASAQSFIERMTNFDKNLPNEKVLPKHSLLYEYFTVYNELTKVKYVTEGMRKPAFLSGEQKKAIVDLLFKTNRKVTVKQLKEDYFKKIECFDSVEISGVEDRFNASLGTYHDLLKIIKDKDFLDNEENEDILEDIVLTLTLFEDREMIEERLKTYAHLFDDKVMKQLKRRRYTGWGRLSRKLINGIRDKQSGKTILDFLKSDGFANRNFMQLIHDDSLTFKEDIQKAQVSGQGDSLHEHIANLAGSPAIKKGILQTVKVVDELVKVMGRHKPENIVIEMARENQTTQKGQKNSRERMKRIEEGIKELGSQILKEHPVENTQLQNEKLYLYYLQNGRDMYVDQELDINRLSDYDVDHIVPQSFLKDDSIDNKVLTRSDKARGKSDNVPSEEVVKKMKNYWRQLLNAKLITQRKFDNLTKAERGGLSELDKAGFIKRQLVETRQITKHVAQILDSRMNTKYDENDKLIREVKVITLKSKLVSDFRKDFQFYKVREINNYHHAHDAYLNAVVGTALIKKYPKLESEFVYGDYKVYDVRKMIAKSEQEIGKATAKYFFYSNIMNFFKTEITLANGEIRKRPLIETNGETGEIVWDKGRDFATVRKVLSMPQVNIVKKTEVQTGGFSKESILPKRNSDKLIARKKDWDPKKYGGFDSPTVAYSVLVVAKVEKGKSKKLKSVKELLGITIMERSSFEKNPIDFLEAKGYKEVKKDLIIKLPKYSLFELENGRKRMLASAGELQKGNELALPSKYVNFLYLASHYEKLKGSPEDNEQKQLFVEQHKHYLDEIIEQISEFSKRVILADANLDKVLSAYNKHRDKPIREQAENIIHLFTLTNLGAPAAFKYFDTTIDRKRYTSTKEVLDATLIHQSITGLYETRIDLSQLGGDGGGGSGGTLGDQGSRGSDPLPEPRVTLTVEGIPTEFLVNTGAEHSVLTKPMGKMGSKRTVVAGATGSKVYPWTTKRLLKIGQKQVTHSFLVIPECPAPLLGRDLLTKLKAQIQFSTEGPQVTWEDRPAMCLVLNLEEEYRLHEKPVPPSIDPSWLQLFPMVWAEKAGMGLANQVPPVVVELKSDASPVAVRQYPMSKEAREGIRPHIQRFLDLGILVPCQSPWNTPLLPVKKPGTNDYRPVQDLREVNKRVQDIHPTVPNPYNLLSSLPPSHTWYSVLDLKDAFFCLKLHPNSQPLFAFEWRDPEKGNTGQLTWTRLPQGFKNSPTLFNEALHRDLASFRALNPQVVMLQYVDDLLVAAPTYRDCKEGTRRLLQELSKLGYRVSAKKAQLCREEVTYLGYLLKGGKRWLTPARKATVMKIPTPTTPRQVREFLGTAGFCRLWIPGFASLAAPLYPLTRPKVPFTWTEAHQEAFGRIKEALLSAPALALPDLTKPFALYVDEKEGVARGVLTQTLGPWRRPVAYLSKKLDPVASGWPTCLKAIAAVALLLKDADKLTLGQNVLVIAPHNLESIVRQPPDRWMTNARMTHYQSLLLNERVSFAPPAILNPATLLPVESDDTPIHICSEILAEETGTRPDLRDQPLPGVPAWYTDGSSFIMDGRRQAGAAIVDNKRTVWASNLPEGTSAQKAELIALTQALRLAEGKSINIYTDSRYAFATAHVHGAIYKQRGWLTSAGKDIKNKEEILALLEAIHLPKRVAIIHCPGHQRGTDPVATGNRKADEAAKQAAQSTRILTETTKNAGKRTADGSEFEKRTADGSEFESPKKKAKVE

SEQ ID NO: 6008 - protein, 2088 aa, synthetic construct
MPAAKRVKLDGGDKKYSIGLDIGTNSVGWAVITDEYKVPSKKFKVLGNTDRHSIKKNLIGALLFDSGETAEATRLKRTARRRYTRRKNRICYLQEIFSNEMAKVDDSFFHRLEESFLVEEDKKHERHPIFGNIVDEVAYHEKYPTIYHLRKKLVDSTDKADLRLIYLALAHMIKFRGHFLIEGDLNPDNSDVDKLFIQLVQTYNQLFEENPINASGVDAKAILSARLSKSRRLENLIAQLPGEKKNGLFGNLIALSLGLTPNFKSNFDLAEDAKLQLSKDTYDDDLDNLLAQIGDQYADLFLAAKNLSDAILLSDILRVNTEITKAPLSASMIKRYDEHHQDLTLLKALVRQQLPEKYKEIFFDQSKNGYAGYIDGGASQEEFYKFIKPILEKMDGTEELLVKLNREDLLRKQRTFDNGSIPHQIHLGELHAILRRQEDFYPFLKDNREKIEKILTFRIPYYVGPLARGNSRFAWMTRKSEETITPWNFEEVVDKGASAQSFIERMTNFDKNLPNEKVLPKHSLLYEYFTVYNELTKVKYVTEGMRKPAFLSGEQKKAIVDLLFKTNRKVTVKQLKEDYFKKIECFDSVEISGVEDRFNASLGTYHDLLKIIKDKDFLDNEENEDILEDIVLTLTLFEDREMIEERLKTYAHLFDDKVMKQLKRRRYTGWGRLSRKLINGIRDKQSGKTILDFLKSDGFANRNFMQLIHDDSLTFKEDIQKAQVSGQGDSLHEHIANLAGSPAIKKGILQTVKVVDELVKVMGRHKPENIVIEMARENQTTQKGQKNSRERMKRIEEGIKELGSQILKEHPVENTQLQNEKLYLYYLQNGRDMYVDQELDINRLSDYDVDHIVPQSFLKDDSIDNKVLTRSDKARGKSDNVPSEEVVKKMKNYWRQLLNAKLITQRKFDNLTKAERGGLSELDKAGFIKRQLVETRQITKHVAQILDSRMNTKYDENDKLIREVKVITLKSKLVSDFRKDFQFYKVREINNYHHAHDAYLNAVVGTALIKKYPKLESEFVYGDYKVYDVRKMIAKSEQEIGKATAKYFFYSNIMNFFKTEITLANGEIRKRPLIETNGETGEIVWDKGRDFATVRKVLSMPQVNIVKKTEVQTGGFSKESILPKRNSDKLIARKKDWDPKKYGGFDSPTVAYSVLVVAKVEKGKSKKLKSVKELLGITIMERSSFEKNPIDFLEAKGYKEVKKDLIIKLPKYSLFELENGRKRMLASAGELQKGNELALPSKYVNFLYLASHYEKLKGSPEDNEQKQLFVEQHKHYLDEIIEQISEFSKRVILADANLDKVLSAYNKHRDKPIREQAENIIHLFTLTNLGAPAAFKYFDTTIDRKRYTSTKEVLDATLIHQSITGLYETRIDLSQLGGDGGGGSGGTLNLEDEYRLYETSAEPEVSPGSTWLSDFPQAWAETGGMGLAVRQAPLIIPLKATSTPVSIKQYPMSQEAKLGIKPHIQRLLDQGILVPCQSPWNTPLLPVKKPGTNDYRPVQDLREVNKRVEDIHPTVPNPYNLLSGLPPSHRWYTVLDLKDAFFCLRLHPTSQPLFAFEWRDPGMGISGQLTWTRLPQGFKNSPTLFNEALHRDLADFRIQHPDLILLQYVDDILLAATSELDCQQGTRALLLTLGNLGYRASAKKAQLCQKQVKYLGYLLKEGQRWLTEARKETVMGQPTPKTPRQLREFLGKAGFCRLFIPGFAEMAAPLYPLTKPGTLFNWGPDQQKAYQEIKQALLTAPALGLPDLTKPFELFVDEKQGYAKGVLTQKLGPWRRPVAYLSKKLDPVAAGWPPCLRMVAAIAVLRKDAGKLTMGQPLVILAPHAVEALVKQPPDRWLSNARMTHYQAMLLDTDRVQFGPVVALNPATLLPLPEEGAPHDCLEILAETHGTRPDLTDQPIPDADHTWYTDGSSFLQEGQRKAGAAVTTETEVIWARALPAGTSAQRAELIALTQALKMAEGKRLNVYTDSRYAFATAHIHGEIYRRRGWLTSEGREIKNKSEILALLKALFLPKRLSIIHCLGHQKGDSAEARGNRLADQAAREAAIKTPPDTSTLLAGKRTADGSEFEKRTADGSEFESPKKKAKVE

SEQ ID NO: 6009 - protein, 2088 aa, synthetic construct
MPAAKRVKLDGGDKKYSIGLDIGTNSVGWAVITDEYKVPSKKFKVLGNTDRHSIKKNLIGALLFDSGETAEATRLKRTARRRYTRRKNRICYLQEIFSNEMAKVDDSFFHRLEESFLVEEDKKHERHPIFGNIVDEVAYHEKYPTIYHLRKKLVDSTDKADLRLIYLALAHMIKFRGHFLIEGDLNPDNSDVDKLFIQLVQTYNQLFEENPINASGVDAKAILSARLSKSRRLENLIAQLPGEKKNGLFGNLIALSLGLTPNFKSNFDLAEDAKLQLSKDTYDDDLDNLLAQIGDQYADLFLAAKNLSDAILLSDILRVNTEITKAPLSASMIKRYDEHHQDLTLLKALVRQQLPEKYKEIFFDQSKNGYAGYIDGGASQEEFYKFIKPILEKMDGTEELLVKLNREDLLRKQRTFDNGSIPHQIHLGELHAILRRQEDFYPFLKDNREKIEKILTFRIPYYVGPLARGNSRFAWMTRKSEETITPWNFEEVVDKGASAQSFIERMTNFDKNLPNEKVLPKHSLLYEYFTVYNELTKVKYVTEGMRKPAFLSGEQKKAIVDLLFKTNRKVTVKQLKEDYFKKIECFDSVEISGVEDRFNASLGTYHDLLKIIKDKDFLDNEENEDILEDIVLTLTLFEDREMIEERLKTYAHLFDDKVMKQLKRRRYTGWGRLSRKLINGIRDKQSGKTILDFLKSDGFANRNFMQLIHDDSLTFKEDIQKAQVSGQGDSLHEHIANLAGSPAIKKGILQTVKVVDELVKVMGRHKPENIVIEMARENQTTQKGQKNSRERMKRIEEGIKELGSQILKEHPVENTQLQNEKLYLYYLQNGRDMYVDQELDINRLSDYDVDHIVPQSFLKDDSIDNKVLTRSDKARGKSDNVPSEEVVKKMKNYWRQLLNAKLITQRKFDNLTKAERGGLSELDKAGFIKRQLVETRQITKHVAQILDSRMNTKYDENDKLIREVKVITLKSKLVSDFRKDFQFYKVREINNYHHAHDAYLNAVVGTALIKKYPKLESEFVYGDYKVYDVRKMIAKSEQEIGKATAKYFFYSNIMNFFKTEITLANGEIRKRPLIETNGETGEIVWDKGRDFATVRKVLSMPQVNIVKKTEVQTGGFSKESILPKRNSDKLIARKKDWDPKKYGGFDSPTVAYSVLVVAKVEKGKSKKLKSVKELLGITIMERSSFEKNPIDFLEAKGYKEVKKDLIIKLPKYSLFELENGRKRMLASAGELQKGNELALPSKYVNFLYLASHYEKLKGSPEDNEQKQLFVEQHKHYLDEIIEQISEFSKRVILADANLDKVLSAYNKHRDKPIREQAENIIHLFTLTNLGAPAAFKYFDTTIDRKRYTSTKEVLDATLIHQSITGLYETRIDLSQLGGDGGGGSGGTLGIEDEYRLHETSTEPDVSLGSTWLSDFPQAWAETGGMGLAVRQAPLIIPLKATSTPVSIQQYPMSHEARLGIKPHIQRLLDQGILVPCQSPWNTPLLPVKKPGTNDYRPVQDLREVNKRVEDIHPTVPNPYNLLSGLPPSHQWYTVLDLKDAFFCLRLHPTSQPLFAFEWRDPGMGISGQLTWTRLPQGFKNSPTLFNEALHRDLADFRIQHPDLILLQYVDDILLAATSELDCQQGTRALLQTLGDLGYRASAKKAQICQKQVKYLGYLLREGQRWLTEARKETVMGQPVPKTPRQLREFLGTAGFCRLWIPGFAEMAAPLYPLTKPGTLFSWGPDQQKAYQEIKQALLTAPALGLPDLTKPFELFVDEKQGYAKGVLTQKLGPWRRPVAYLSKKLDPVAAGWPPCLRMVAAIAVLTKDAGKLTMGQPLVILAPHAVEALVKQPPDRWLSNARMTHYQAMLLDTDRVQFGPVVALNPATLLPLPEEGAPHDCLEILAETHGTRPDLTDQPIPDADHTWYTDGSSFLQEGQRKAGAAVTTETEVIWAGALPAGTSAQRAELIALTQALKMAEGKRLNVYTDSRYAFATAHIHGEIYRRRGWLTSEGREIKNKSEILALLKALFLPKRLSIIHCLGHQKGDSAEARGNRLADQAAREAAIKTPPDTSTLLAGKRTADGSEFEKRTADGSEFESPKKKAKVE

SEQ ID NO: 6010 - protein, 2088 aa, synthetic construct
MPAAKRVKLDGGDKKYSIGLDIGTNSVGWAVITDEYKVPSKKFKVLGNTDRHSIKKNLIGALLFDSGETAEATRLKRTARRRYTRRKNRICYLQEIFSNEMAKVDDSFFHRLEESFLVEEDKKHERHPIFGNIVDEVAYHEKYPTIYHLRKKLVDSTDKADLRLIYLALAHMIKFRGHFLIEGDLNPDNSDVDKLFIQLVQTYNQLFEENPINASGVDAKAILSARLSKSRRLENLIAQLPGEKKNGLFGNLIALSLGLTPNFKSNFDLAEDAKLQLSKDTYDDDLDNLLAQIGDQYADLFLAAKNLSDAILLSDILRVNTEITKAPLSASMIKRYDEHHQDLTLLKALVRQQLPEKYKEIFFDQSKNGYAGYIDGGASQEEFYKFIKPILEKMDGTEELLVKLNREDLLRKQRTFDNGSIPHQIHLGELHAILRRQEDFYPFLKDNREKIEKILTFRIPYYVGPLARGNSRFAWMTRKSEETITPWNFEEVVDKGASAQSFIERMTNFDKNLPNEKVLPKHSLLYEYFTVYNELTKVKYVTEGMRKPAFLSGEQKKAIVDLLFKTNRKVTVKQLKEDYFKKIECFDSVEISGVEDRFNASLGTYHDLLKIIKDKDFLDNEENEDILEDIVLTLTLFEDREMIEERLKTYAHLFDDKVMKQLKRRRYTGWGRLSRKLINGIRDKQSGKTILDFLKSDGFANRNFMQLIHDDSLTFKEDIQKAQVSGQGDSLHEHIANLAGSPAIKKGILQTVKVVDELVKVMGRHKPENIVIEMARENQTTQKGQKNSRERMKRIEEGIKELGSQILKEHPVENTQLQNEKLYLYYLQNGRDMYVDQELDINRLSDYDVDHIVPQSFLKDDSIDNKVLTRSDKARGKSDNVPSEEVVKKMKNYWRQLLNAKLITQRKFDNLTKAERGGLSELDKAGFIKRQLVETRQITKHVAQILDSRMNTKYDENDKLIREVKVITLKSKLVSDFRKDFQFYKVREINNYHHAHDAYLNAVVGTALIKKYPKLESEFVYGDYKVYDVRKMIAKSEQEIGKATAKYFFYSNIMNFFKTEITLANGEIRKRPLIETNGETGEIVWDKGRDFATVRKVLSMPQVNIVKKTEVQTGGFSKESILPKRNSDKLIARKKDWDPKKYGGFDSPTVAYSVLVVAKVEKGKSKKLKSVKELLGITIMERSSFEKNPIDFLEAKGYKEVKKDLIIKLPKYSLFELENGRKRMLASAGELQKGNELALPSKYVNFLYLASHYEKLKGSPEDNEQKQLFVEQHKHYLDEIIEQISEFSKRVILADANLDKVLSAYNKHRDKPIREQAENIIHLFTLTNLGAPAAFKYFDTTIDRKRYTSTKEVLDATLIHQSITGLYETRIDLSQLGGDGGGGSGGTLNIEDEYRLHETSKEPDVSLGSTWLSDFPQAWAETGGMGLAVRQAPLIIPLKATSTPVSIKQYPMSQEARLGIKPHIQRLLDQGILVPCQSPWNTPLLPVKKPGTNDYRPVQDLREVNKRVEDIHPTVPNPYNLLSGLPPSHQWYTVLDLKDAFFCLRLHPTSQPLFAFEWRDPEMGISGQLTWTRLPQGFKNSPTLFNEALHRDLAGFRIQHPDLILLQYVDDLLLAATSELDCQQGTRALLQTLGDLGYRASAKKAQICQKQVKYLGYLLKEGQRWLTEARKETVMGQPIPKTPRQLREFLGTAGFCRLWIPGFAEMAAPLYPLTKPGTLFNWGPDQQKAFQEIKQALLTAPALGLPDLTKPFELFVDEKQGYAKGVLTQKLGPWRRPVAYLSKKLDPVAAGWPPCLRMVAAIAVLTKDAGKLTMGQPLVILAPHAVEALVKQPPDRWLSNARMTHYQALLLDTDRVQFGPVVALNPATLLPLPEEGLQHDCLDILAEAHGTRSDLMDQPLPDADHTWYTDGSSFLQEGQRKAGAAVTTETEVIWARALPAGTSAQRAELIALTQALKMAEGKKLNVYTDSRYAFATAHIHGEIYRRRGWLTSEGKEIKNKDEILALLKALFLPKRLSIIHCPGHQKGNSAEARGNRMADQAAREVATRETPETSTLLAGKRTADGSEFEKRTADGSEFESPKKKAKVE

SEQ ID NO: 6011 - protein, 2088 aa, synthetic construct
MPAAKRVKLDGGDKKYSIGLDIGTNSVGWAVITDEYKVPSKKFKVLGNTDRHSIKKNLIGALLFDSGETAEATRLKRTARRRYTRRKNRICYLQEIFSNEMAKVDDSFFHRLEESFLVEEDKKHERHPIFGNIVDEVAYHEKYPTIYHLRKKLVDSTDKADLRLIYLALAHMIKFRGHFLIEGDLNPDNSDVDKLFIQLVQTYNQLFEENPINASGVDAKAILSARLSKSRRLENLIAQLPGEKKNGLFGNLIALSLGLTPNFKSNFDLAEDAKLQLSKDTYDDDLDNLLAQIGDQYADLFLAAKNLSDAILLSDILRVNTEITKAPLSASMIKRYDEHHQDLTLLKALVRQQLPEKYKEIFFDQSKNGYAGYIDGGASQEEFYKFIKPILEKMDGTEELLVKLNREDLLRKQRTFDNGSIPHQIHLGELHAILRRQEDFYPFLKDNREKIEKILTFRIPYYVGPLARGNSRFAWMTRKSEETITPWNFEEVVDKGASAQSFIERMTNFDKNLPNEKVLPKHSLLYEYFTVYNELTKVKYVTEGMRKPAFLSGEQKKAIVDLLFKTNRKVTVKQLKEDYFKKIECFDSVEISGVEDRFNASLGTYHDLLKIIKDKDFLDNEENEDILEDIVLTLTLFEDREMIEERLKTYAHLFDDKVMKQLKRRRYTGWGRLSRKLINGIRDKQSGKTILDFLKSDGFANRNFMQLIHDDSLTFKEDIQKAQVSGQGDSLHEHIANLAGSPAIKKGILQTVKVVDELVKVMGRHKPENIVIEMARENQTTQKGQKNSRERMKRIEEGIKELGSQILKEHPVENTQLQNEKLYLYYLQNGRDMYVDQELDINRLSDYDVDHIVPQSFLKDDSIDNKVLTRSDKARGKSDNVPSEEVVKKMKNYWRQLLNAKLITQRKFDNLTKAERGGLSELDKAGFIKRQLVETRQITKHVAQILDSRMNTKYDENDKLIREVKVITLKSKLVSDFRKDFQFYKVREINNYHHAHDAYLNAVVGTALIKKYPKLESEFVYGDYKVYDVRKMIAKSEQEIGKATAKYFFYSNIMNFFKTEITLANGEIRKRPLIETNGETGEIVWDKGRDFATVRKVLSMPQVNIVKKTEVQTGGFSKESILPKRNSDKLIARKKDWDPKKYGGFDSPTVAYSVLVVAKVEKGKSKKLKSVKELLGITIMERSSFEKNPIDFLEAKGYKEVKKDLIIKLPKYSLFELENGRKRMLASAGELQKGNELALPSKYVNFLYLASHYEKLKGSPEDNEQKQLFVEQHKHYLDEIIEQISEFSKRVILADANLDKVLSAYNKHRDKPIREQAENIIHLFTLTNLGAPAAFKYFDTTIDRKRYTSTKEVLDATLIHQSITGLYETRIDLSQLGGDGGGGSGGTLNIEDEYRLHETSKGPDVPLGSTWLSDFPQAWAETGGMGLAVRQAPLIIPLKATSTPVSIKQYPMSQEARLGIKPHIQRLLDQGILVPCQSPWNTPLLPVKKPGTNDYRPVQDLREVNKRVEDIHPTVPNPYNLLSGLPPSHQWYTVLDLKDAFFCLRLHPTSQSLFAFEWRDPEMGISGQLTWTRLPQGFKNSPTLFNEALHRDLADFRIQHPDLILLQYVDDLLLAATSELDCQQGTRALLQTLGDLGYRASAKKAQICQKQVKYLGYLLKEGQRWLTEARKETVMGQPTPKTPRQLREFLGTAGFCRLWIPGFAEMAAPLYPLTKPGTLFEWGPDQQKAYQEIKQALLTAPALGLPDLTKPFELFVDEKQGYAKGVLTQKLGPWRRPVAYLSKKLDPVAAGWPPCLRMVAAIAVLTKDAGKLTMGQPLVILAPHAVEALVKQPPDRWLSNARMTHYQALLLDTDRVQFGPIVALNPATLLPLPEEGLQHDCLDILAEAHGTRPDLTDQPLPDADHTWYTDGSSFLQEGQRKAGAAVTTETEVVWAKALPAGTSAQRAELIALTQALKMAEGKKLNVYTDSRYAFATAHIHGEIYRRRGWLTSEGKEIKNKDEILALLKALFLPKRLSIIHCPGHQKGNRAEARGNRMADQAAREVATRETPETSTLLAGKRTADGSEFEKRTADGSEFESPKKKAKVE

SEQ ID NO: 6012 - protein, 2088 aa, synthetic construct
MPAAKRVKLDGGDKKYSIGLDIGTNSVGWAVITDEYKVPSKKFKVLGNTDRHSIKKNLIGALLFDSGETAEATRLKRTARRRYTRRKNRICYLQEIFSNEMAKVDDSFFHRLEESFLVEEDKKHERHPIFGNIVDEVAYHEKYPTIYHLRKKLVDSTDKADLRLIYLALAHMIKFRGHFLIEGDLNPDNSDVDKLFIQLVQTYNQLFEENPINASGVDAKAILSARLSKSRRLENLIAQLPGEKKNGLFGNLIALSLGLTPNFKSNFDLAEDAKLQLSKDTYDDDLDNLLAQIGDQYADLFLAAKNLSDAILLSDILRVNTEITKAPLSASMIKRYDEHHQDLTLLKALVRQQLPEKYKEIFFDQSKNGYAGYIDGGASQEEFYKFIKPILEKMDGTEELLVKLNREDLLRKQRTFDNGSIPHQIHLGELHAILRRQEDFYPFLKDNREKIEKILTFRIPYYVGPLARGNSRFAWMTRKSEETITPWNFEEVVDKGASAQSFIERMTNFDKNLPNEKVLPKHSLLYEYFTVYNELTKVKYVTEGMRKPAFLSGEQKKAIVDLLFKTNRKVTVKQLKEDYFKKIECFDSVEISGVEDRFNASLGTYHDLLKIIKDKDFLDNEENEDILEDIVLTLTLFEDREMIEERLKTYAHLFDDKVMKQLKRRRYTGWGRLSRKLINGIRDKQSGKTILDFLKSDGFANRNFMQLIHDDSLTFKEDIQKAQVSGQGDSLHEHIANLAGSPAIKKGILQTVKVVDELVKVMGRHKPENIVIEMARENQTTQKGQKNSRERMKRIEEGIKELGSQILKEHPVENTQLQNEKLYLYYLQNGRDMYVDQELDINRLSDYDVDHIVPQSFLKDDSIDNKVLTRSDKARGKSDNVPSEEVVKKMKNYWRQLLNAKLITQRKFDNLTKAERGGLSELDKAGFIKRQLVETRQITKHVAQILDSRMNTKYDENDKLIREVKVITLKSKLVSDFRKDFQFYKVREINNYHHAHDAYLNAVVGTALIKKYPKLESEFVYGDYKVYDVRKMIAKSEQEIGKATAKYFFYSNIMNFFKTEITLANGEIRKRPLIETNGETGEIVWDKGRDFATVRKVLSMPQVNIVKKTEVQTGGFSKESILPKRNSDKLIARKKDWDPKKYGGFDSPTVAYSVLVVAKVEKGKSKKLKSVKELLGITIMERSSFEKNPIDFLEAKGYKEVKKDLIIKLPKYSLFELENGRKRMLASAGELQKGNELALPSKYVNFLYLASHYEKLKGSPEDNEQKQLFVEQHKHYLDEIIEQISEFSKRVILADANLDKVLSAYNKHRDKPIREQAENIIHLFTLTNLGAPAAFKYFDTTIDRKRYTSTKEVLDATLIHQSITGLYETRIDLSQLGGDGGGGSGGTLNIEDEYRLHETSKGPDVPLGSTWLSDFPQAWAETGGMGLAVRQAPLIIPLKATSTPVSIKQYPMSQEARLGIKPHIQRLLDQGILVPCQSPWNTPLLPVKKPGTNDYRPVQDLREVNKRVEDIHPTVPNPYNLLSGLPPSHQWYTVLDLKDAFFCLRLHPTSQSLFAFEWRDPEMGISGQLTWTRLPQGFKNSPTLFNEALHRDLADFRIQHPDLILLQYVDDLLLAATSELDCQQGTRALLQTLGDLGYRASAKKAQICQKQVKYLGYLLKEGQRWLTEARKETVMGQPTPKTPRQLREFLGKAGFCRLFIPGFAEMAAPLYPLTKPGTLFEWGPDQQKAYQEIKQALLTAPALGLPDLTKPFELFVDEKQGYAKGVLTQKLGPWRRPVAYLSKKLDPVAAGWPPCLRMVAAIAVLTKDAGKLTMGQPLVILAPHAVEALVKQPPDRWLSNARMTHYQALLLDTDRVQFGPIVALNPATLLPLPEEGLQHDCLDILAEAHGTRPDLTDQPLPDADHTWYTDGSSFLQEGQRKAGAAVTTETEVVWAKALPAGTSAQRAELIALTQALKMAEGKKLNVYTDSRYAFATAHIHGEIYRRRGWLTSEGKEIKNKDEILALLKALFLPKRLSIIHCPGHQKGNRAEARGNRMADQAAREVATRETPETSTLLAGKRTADGSEFEKRTADGSEFESPKKKAKVE

SEQ ID NO: 6013 - protein, 2086 aa, synthetic construct
MPAAKRVKLDGGDKKYSIGLDIGTNSVGWAVITDEYKVPSKKFKVLGNTDRHSIKKNLIGALLFDSGETAEATRLKRTARRRYTRRKNRICYLQEIFSNEMAKVDDSFFHRLEESFLVEEDKKHERHPIFGNIVDEVAYHEKYPTIYHLRKKLVDSTDKADLRLIYLALAHMIKFRGHFLIEGDLNPDNSDVDKLFIQLVQTYNQLFEENPINASGVDAKAILSARLSKSRRLENLIAQLPGEKKNGLFGNLIALSLGLTPNFKSNFDLAEDAKLQLSKDTYDDDLDNLLAQIGDQYADLFLAAKNLSDAILLSDILRVNTEITKAPLSASMIKRYDEHHQDLTLLKALVRQQLPEKYKEIFFDQSKNGYAGYIDGGASQEEFYKFIKPILEKMDGTEELLVKLNREDLLRKQRTFDNGSIPHQIHLGELHAILRRQEDFYPFLKDNREKIEKILTFRIPYYVGPLARGNSRFAWMTRKSEETITPWNFEEVVDKGASAQSFIERMTNFDKNLPNEKVLPKHSLLYEYFTVYNELTKVKYVTEGMRKPAFLSGEQKKAIVDLLFKTNRKVTVKQLKEDYFKKIECFDSVEISGVEDRFNASLGTYHDLLKIIKDKDFLDNEENEDILEDIVLTLTLFEDREMIEERLKTYAHLFDDKVMKQLKRRRYTGWGRLSRKLINGIRDKQSGKTILDFLKSDGFANRNFMQLIHDDSLTFKEDIQKAQVSGQGDSLHEHIANLAGSPAIKKGILQTVKVVDELVKVMGRHKPENIVIEMARENQTTQKGQKNSRERMKRIEEGIKELGSQILKEHPVENTQLQNEKLYLYYLQNGRDMYVDQELDINRLSDYDVDHIVPQSFLKDDSIDNKVLTRSDKARGKSDNVPSEEVVKKMKNYWRQLLNAKLITQRKFDNLTKAERGGLSELDKAGFIKRQLVETRQITKHVAQILDSRMNTKYDENDKLIREVKVITLKSKLVSDFRKDFQFYKVREINNYHHAHDAYLNAVVGTALIKKYPKLESEFVYGDYKVYDVRKMIAKSEQEIGKATAKYFFYSNIMNFFKTEITLANGEIRKRPLIETNGETGEIVWDKGRDFATVRKVLSMPQVNIVKKTEVQTGGFSKESILPKRNSDKLIARKKDWDPKKYGGFDSPTVAYSVLVVAKVEKGKSKKLKSVKELLGITIMERSSFEKNPIDFLEAKGYKEVKKDLIIKLPKYSLFELENGRKRMLASAGELQKGNELALPSKYVNFLYLASHYEKLKGSPEDNEQKQLFVEQHKHYLDEIIEQISEFSKRVILADANLDKVLSAYNKHRDKPIREQAENIIHLFTLTNLGAPAAFKYFDTTIDRKRYTSTKEVLDATLIHQSITGLYETRIDLSQLGGDGGGGSGGVLNLEEEYRLHEKPVPSSIDPSWLQLFPTVWAERAGMGLANQVPPVVVELRSGASPVAVRQYPMSKEAREGIRPHIQRFLDLGVLVPCQSPWNTPLLPVKKPGTNDYRPVQDLREINKRVQDIHPTVPNPYNLLSSLPPSHTWYSVLDLKDAFFCLKLHPNSQPLFAFEWRDPEKGNTGQLTWTRLPQGFKNSPTLFNEALHRDLAPFRALNPQVVLLQYVDDLLVAAPTYRDCKEGTQKLLQELSKLGYRVSAKKAQLCQKEVTYLGYLLKEGKRWLTPARKATVMKIPPPTTPRQVREFLGKAGFCRLFIPGFASLAAPLYPLTKPSIPFIWTEEHQKAFDRIKEALLSAPALALPDLTKPFTLYVDERAGVARGVLTQTLGPWRRPVAYLSKKLDPVASGWPTCLKAVAAVALLLKDADKLTLGQNVTVIASHSLESIVRQPPDRWMTNARMTHYQSLLLNERVSFAPPAVLNPATLLPVESEATPVHRCSEILAEETGTRRDLKDQPLPGVPAWYTDGSSFIAEGKRRAGAAIVDGKRTVWASSLPEGTSAQKAELVALTQALRLAEGKDINIYTDSRYAFATAHIHGAIYKQRGWLTSAGKDIKNKEEILALLEAIHLPKRVAIIHCPGHQKGNDPVATGNRRADEAAKQAALSTRVLAETTKPAGKRTADGSEFEKRTADGSEFESPKKKAKVE

SEQ ID NO: 6014 - protein, 2088 aa, synthetic construct
MPAAKRVKLDGGDKKYSIGLDIGTNSVGWAVITDEYKVPSKKFKVLGNTDRHSIKKNLIGALLFDSGETAEATRLKRTARRRYTRRKNRICYLQEIFSNEMAKVDDSFFHRLEESFLVEEDKKHERHPIFGNIVDEVAYHEKYPTIYHLRKKLVDSTDKADLRLIYLALAHMIKFRGHFLIEGDLNPDNSDVDKLFIQLVQTYNQLFEENPINASGVDAKAILSARLSKSRRLENLIAQLPGEKKNGLFGNLIALSLGLTPNFKSNFDLAEDAKLQLSKDTYDDDLDNLLAQIGDQYADLFLAAKNLSDAILLSDILRVNTEITKAPLSASMIKRYDEHHQDLTLLKALVRQQLPEKYKEIFFDQSKNGYAGYIDGGASQEEFYKFIKPILEKMDGTEELLVKLNREDLLRKQRTFDNGSIPHQIHLGELHAILRRQEDFYPFLKDNREKIEKILTFRIPYYVGPLARGNSRFAWMTRKSEETITPWNFEEVVDKGASAQSFIERMTNFDKNLPNEKVLPKHSLLYEYFTVYNELTKVKYVTEGMRKPAFLSGEQKKAIVDLLFKTNRKVTVKQLKEDYFKKIECFDSVEISGVEDRFNASLGTYHDLLKIIKDKDFLDNEENEDILEDIVLTLTLFEDREMIEERLKTYAHLFDDKVMKQLKRRRYTGWGRLSRKLINGIRDKQSGKTILDFLKSDGFANRNFMQLIHDDSLTFKEDIQKAQVSGQGDSLHEHIANLAGSPAIKKGILQTVKVVDELVKVMGRHKPENIVIEMARENQTTQKGQKNSRERMKRIEEGIKELGSQILKEHPVENTQLQNEKLYLYYLQNGRDMYVDQELDINRLSDYDVDHIVPQSFLKDDSIDNKVLTRSDKARGKSDNVPSEEVVKKMKNYWRQLLNAKLITQRKFDNLTKAERGGLSELDKAGFIKRQLVETRQITKHVAQILDSRMNTKYDENDKLIREVKVITLKSKLVSDFRKDFQFYKVREINNYHHAHDAYLNAVVGTALIKKYPKLESEFVYGDYKVYDVRKMIAKSEQEIGKATAKYFFYSNIMNFFKTEITLANGEIRKRPLIETNGETGEIVWDKGRDFATVRKVLSMPQVNIVKKTEVQTGGFSKESILPKRNSDKLIARKKDWDPKKYGGFDSPTVAYSVLVVAKVEKGKSKKLKSVKELLGITIMERSSFEKNPIDFLEAKGYKEVKKDLIIKLPKYSLFELENGRKRMLASAGELQKGNELALPSKYVNFLYLASHYEKLKGSPEDNEQKQLFVEQHKHYLDEIIEQISEFSKRVILADANLDKVLSAYNKHRDKPIREQAENIIHLFTLTNLGAPAAFKYFDTTIDRKRYTSTKEVLDATLIHQSITGLYETRIDLSQLGGDGGGGSGGTLNIEDEYRLHETSKEPDVPLGSTWLSDFPQAWAETGGMGLAVRQAPLIIPLKATSTPVSIKQYPMSQEARLGIKPHIQRLLDQGILVPCQSPWNTPLLPVKKPGTNDYRPVQDLREVNKRVEDIHPTVPNPYNLLSGLPPSHQWYTVLDLKDAFFCLRLHPTSQPLFAFEWRDPEMGISGQLTWTRLPQGFKNSPTLFNEALHRDLADFRIQHPDLILLQYVDDLLLAATSEQDCQRGTRALLQTLGNLGYRASAKKAQICQKQVKYLGYLLKEGQRWLTEARKETVMGQPTPKTPRQLREFLGKAGFCRLFIPGFAEMAAPLYPLTKPGTLFNWGPDQQKAYQEIKQALLTAPALGLPDLTKPFELFVDEKQGYAKGVLTQKLGPWRRPVAYLSKKLDPVAAGWPPCLRMVAAIAVLTKDAGKLTMGQPLVILAPHAVEALVKQPPDRWLSNARMTHYQAMLLDTDRVQFGPVVALNPATLLPLPEKEAPHDCLEILAETHGTRPDLTDQPIPDADYTWYTDGSSFLQEGQRRAGAAVTTETEVIWARALPAGTSAQRAELIALTQALKMAEGKKLNVYTDSRYAFATAHVHGEIYRRRGWLTSEGREIKNKNEILALLKALFLPKRLSIIHCPGHQKGNSAEARGNRMADQAAREAAMKAVLETSTLLAGKRTADGSEFEKRTADGSEFESPKKKAKVE

SEQ ID NO: 6015 - protein, 2093 aa, synthetic construct
MPAAKRVKLDGGDKKYSIGLDIGTNSVGWAVITDEYKVPSKKFKVLGNTDRHSIKKNLIGALLFDSGETAEATRLKRTARRRYTRRKNRICYLQEIFSNEMAKVDDSFFHRLEESFLVEEDKKHERHPIFGNIVDEVAYHEKYPTIYHLRKKLVDSTDKADLRLIYLALAHMIKFRGHFLIEGDLNPDNSDVDKLFIQLVQTYNQLFEENPINASGVDAKAILSARLSKSRRLENLIAQLPGEKKNGLFGNLIALSLGLTPNFKSNFDLAEDAKLQLSKDTYDDDLDNLLAQIGDQYADLFLAAKNLSDAILLSDILRVNTEITKAPLSASMIKRYDEHHQDLTLLKALVRQQLPEKYKEIFFDQSKNGYAGYIDGGASQEEFYKFIKPILEKMDGTEELLVKLNREDLLRKQRTFDNGSIPHQIHLGELHAILRRQEDFYPFLKDNREKIEKILTFRIPYYVGPLARGNSRFAWMTRKSEETITPWNFEEVVDKGASAQSFIERMTNFDKNLPNEKVLPKHSLLYEYFTVYNELTKVKYVTEGMRKPAFLSGEQKKAIVDLLFKTNRKVTVKQLKEDYFKKIECFDSVEISGVEDRFNASLGTYHDLLKIIKDKDFLDNEENEDILEDIVLTLTLFEDREMIEERLKTYAHLFDDKVMKQLKRRRYTGWGRLSRKLINGIRDKQSGKTILDFLKSDGFANRNFMQLIHDDSLTFKEDIQKAQVSGQGDSLHEHIANLAGSPAIKKGILQTVKVVDELVKVMGRHKPENIVIEMARENQTTQKGQKNSRERMKRIEEGIKELGSQILKEHPVENTQLQNEKLYLYYLQNGRDMYVDQELDINRLSDYDVDHIVPQSFLKDDSIDNKVLTRSDKARGKSDNVPSEEVVKKMKNYWRQLLNAKLITQRKFDNLTKAERGGLSELDKAGFIKRQLVETRQITKHVAQILDSRMNTKYDENDKLIREVKVITLKSKLVSDFRKDFQFYKVREINNYHHAHDAYLNAVVGTALIKKYPKLESEFVYGDYKVYDVRKMIAKSEQEIGKATAKYFFYSNIMNFFKTEITLANGEIRKRPLIETNGETGEIVWDKGRDFATVRKVLSMPQVNIVKKTEVQTGGFSKESILPKRNSDKLIARKKDWDPKKYGGFDSPTVAYSVLVVAKVEKGKSKKLKSVKELLGITIMERSSFEKNPIDFLEAKGYKEVKKDLIIKLPKYSLFELENGRKRMLASAGELQKGNELALPSKYVNFLYLASHYEKLKGSPEDNEQKQLFVEQHKHYLDEIIEQISEFSKRVILADANLDKVLSAYNKHRDKPIREQAENIIHLFTLTNLGAPAAFKYFDTTIDRKRYTSTKEVLDATLIHQSITGLYETRIDLSQLGGDGGGGSGGSGGTAPLEEEYRLFLEAPIQNVTLLEQWKREIPKVWAEINPPGLASTQAPIHVQLLSTALPVRVRQYPITLEAKRSLRETIRKFRAAGILRPVHSPWNTPLLPVRKSGTSEYRMVQDLREVNKRVETIHPTVPNPYTLLSLLPPDRIWYSVLDLKDAFFCIPLAPESQLIFAFEWADAEEGESGQLTWTRLPQGFKNSPTLFNEALNRDLQGFRLDHPSVSLLQYVDDLLIAADTQAACLSATRDLLMTLAELGYRVSGKKAQLCQEEVTYLGFKIHKGSRSLSNSRTQAILQIPVPKTKRQVREFLGTIGYCRLWIPGFAELAQPLYAATRPGNDPLVWGEKEEEAFQSLKLALTQPPALALPSLDKPFQLFVEETSGAAKGVLTQALGPWKRPVAYLSKRLDPVAAGWPRCLRAIAAAALLTREASKLTFGQDIEITSSHNLESLLRSPPDKWLTNARITQYQVLLLDPPRVRFKQTAALNPATLLPETDDTLPIHHCLDTLDSLTSTRPDLTDQPLAQAEATLFTDGSSYIRDGKRYAGAAVVTLDSVIWAEPLPIGTSAQKAELIALTKALEWSKDKSVNIYTDSRYAFATLHVHGMIYRERGWLTAGGKAIKNAPEILALLTAVWLPKRVAVMHCKGHQKDDAPTSTGNRRADEVAREVAIRPLSTQATISAGKRTADGSEFEKRTADGSEFESPKKKAKVE

SEQ ID NO: 6016 - protein, 2082 aa, synthetic construct
MPAAKRVKLDGGDKKYSIGLDIGTNSVGWAVITDEYKVPSKKFKVLGNTDRHSIKKNLIGALLFDSGETAEATRLKRTARRRYTRRKNRICYLQEIFSNEMAKVDDSFFHRLEESFLVEEDKKHERHPIFGNIVDEVAYHEKYPTIYHLRKKLVDSTDKADLRLIYLALAHMIKFRGHFLIEGDLNPDNSDVDKLFIQLVQTYNQLFEENPINASGVDAKAILSARLSKSRRLENLIAQLPGEKKNGLFGNLIALSLGLTPNFKSNFDLAEDAKLQLSKDTYDDDLDNLLAQIGDQYADLFLAAKNLSDAILLSDILRVNTEITKAPLSASMIKRYDEHHQDLTLLKALVRQQLPEKYKEIFFDQSKNGYAGYIDGGASQEEFYKFIKPILEKMDGTEELLVKLNREDLLRKQRTFDNGSIPHQIHLGELHAILRRQEDFYPFLKDNREKIEKILTFRIPYYVGPLARGNSRFAWMTRKSEETITPWNFEEVVDKGASAQSFIERMTNFDKNLPNEKVLPKHSLLYEYFTVYNELTKVKYVTEGMRKPAFLSGEQKKAIVDLLFKTNRKVTVKQLKEDYFKKIECFDSVEISGVEDRFNASLGTYHDLLKIIKDKDFLDNEENEDILEDIVLTLTLFEDREMIEERLKTYAHLFDDKVMKQLKRRRYTGWGRLSRKLINGIRDKQSGKTILDFLKSDGFANRNFMQLIHDDSLTFKEDIQKAQVSGQGDSLHEHIANLAGSPAIKKGILQTVKVVDELVKVMGRHKPENIVIEMARENQTTQKGQKNSRERMKRIEEGIKELGSQILKEHPVENTQLQNEKLYLYYLQNGRDMYVDQELDINRLSDYDVDHIVPQSFLKDDSIDNKVLTRSDKARGKSDNVPSEEVVKKMKNYWRQLLNAKLITQRKFDNLTKAERGGLSELDKAGFIKRQLVETRQITKHVAQILDSRMNTKYDENDKLIREVKVITLKSKLVSDFRKDFQFYKVREINNYHHAHDAYLNAVVGTALIKKYPKLESEFVYGDYKVYDVRKMIAKSEQEIGKATAKYFFYSNIMNFFKTEITLANGEIRKRPLIETNGETGEIVWDKGRDFATVRKVLSMPQVNIVKKTEVQTGGFSKESILPKRNSDKLIARKKDWDPKKYGGFDSPTVAYSVLVVAKVEKGKSKKLKSVKELLGITIMERSSFEKNPIDFLEAKGYKEVKKDLIIKLPKYSLFELENGRKRMLASAGELQKGNELALPSKYVNFLYLASHYEKLKGSPEDNEQKQLFVEQHKHYLDEIIEQISEFSKRVILADANLDKVLSAYNKHRDKPIREQAENIIHLFTLTNLGAPAAFKYFDTTIDRKRYTSTKEVLDATLIHQSITGLYETRIDLSQLGGDGGGGSGGSGGVPWILKKPLELTIKLDLEEQQGTLLNNSILSKKGKEELKQLFEKYSALWQSWENQVGHRRIRPHKIATGTVKPTPQKQYHINPKAKPDIQIVINDLLKQGVLIQKESTMNTPVYPVPKPNGRWRMVLDYRAVNKVTPLIAVQNQHSYGILGSLFKGRYKTTIDLSNGFWAHPIVPEDYWITAFTWQGKQYCWTVLPQGFLNSPGLFNGDVVDLLQGIPNVEVYVDDVYISHDSEKEHLEYLDILFNRLKEAGYIISLKKSNIANSIVDFLGFQITNEGRGLTDTFKEKLENITAPTTLKQLQSILGKLNFARNFIPDFTELIAPLYALIPKSPKNYVPWQIEHSTTLETLITKLNGAEYLQGRKGDKTLIMKVNASYTTGYIRYYNEGEKKPISYVSIVFSKTELKFTELEKLLTTVHKGLLKALDLSMGQNIHVYSPIVSMQNIQKTPQTAKKALASRWLSWLSYLEDPRIRFFYDPQMPALKDLPAVDTGKDNKKHPSNFQHIFYTDGSAITSPTKEGHLNAGMGIVYFINKDGNLQKQQEWSISLGNHTAQFAEIAAFEFALKKCLPLGGNILVVTDSNYVAKAYNEELDVWASNGFVNNRKKPLKHISKWKSVADLKRLRPDVVVTHEPGHQKLDSSPHAYGNNLADQLATQASFKVHAGKRTADGSEFEKRTADGSEFESPKKKAKVE

SEQ ID NO: 6017 - protein, 2090 aa, synthetic construct
MPAAKRVKLDGGDKKYSIGLDIGTNSVGWAVITDEYKVPSKKFKVLGNTDRHSIKKNLIGALLFDSGETAEATRLKRTARRRYTRRKNRICYLQEIFSNEMAKVDDSFFHRLEESFLVEEDKKHERHPIFGNIVDEVAYHEKYPTIYHLRKKLVDSTDKADLRLIYLALAHMIKFRGHFLIEGDLNPDNSDVDKLFIQLVQTYNQLFEENPINASGVDAKAILSARLSKSRRLENLIAQLPGEKKNGLFGNLIALSLGLTPNFKSNFDLAEDAKLQLSKDTYDDDLDNLLAQIGDQYADLFLAAKNLSDAILLSDILRVNTEITKAPLSASMIKRYDEHHQDLTLLKALVRQQLPEKYKEIFFDQSKNGYAGYIDGGASQEEFYKFIKPILEKMDGTEELLVKLNREDLLRKQRTFDNGSIPHQIHLGELHAILRRQEDFYPFLKDNREKIEKILTFRIPYYVGPLARGNSRFAWMTRKSEETITPWNFEEVVDKGASAQSFIERMTNFDKNLPNEKVLPKHSLLYEYFTVYNELTKVKYVTEGMRKPAFLSGEQKKAIVDLLFKTNRKVTVKQLKEDYFKKIECFDSVEISGVEDRFNASLGTYHDLLKIIKDKDFLDNEENEDILEDIVLTLTLFEDREMIEERLKTYAHLFDDKVMKQLKRRRYTGWGRLSRKLINGIRDKQSGKTILDFLKSDGFANRNFMQLIHDDSLTFKEDIQKAQVSGQGDSLHEHIANLAGSPAIKKGILQTVKVVDELVKVMGRHKPENIVIEMARENQTTQKGQKNSRERMKRIEEGIKELGSQILKEHPVENTQLQNEKLYLYYLQNGRDMYVDQELDINRLSDYDVDHIVPQSFLKDDSIDNKVLTRSDKARGKSDNVPSEEVVKKMKNYWRQLLNAKLITQRKFDNLTKAERGGLSELDKAGFIKRQLVETRQITKHVAQILDSRMNTKYDENDKLIREVKVITLKSKLVSDFRKDFQFYKVREINNYHHAHDAYLNAVVGTALIKKYPKLESEFVYGDYKVYDVRKMIAKSEQEIGKATAKYFFYSNIMNFFKTEITLANGEIRKRPLIETNGETGEIVWDKGRDFATVRKVLSMPQVNIVKKTEVQTGGFSKESILPKRNSDKLIARKKDWDPKKYGGFDSPTVAYSVLVVAKVEKGKSKKLKSVKELLGITIMERSSFEKNPIDFLEAKGYKEVKKDLIIKLPKYSLFELENGRKRMLASAGELQKGNELALPSKYVNFLYLASHYEKLKGSPEDNEQKQLFVEQHKHYLDEIIEQISEFSKRVILADANLDKVLSAYNKHRDKPIREQAENIIHLFTLTNLGAPAAFKYFDTTIDRKRYTSTKEVLDATLIHQSITGLYETRIDLSQLGGDGGGGSGGSGGTLQLEEEYRLFEPESTQKQEMDIWLKNFPQAWAETGGMGTAHCQAPVLIQLKATATPISIRQYPMPHEAYQGIKPHIRRMLDQGILKPCQSPWNTPLLPVKKPGTEDYRPVQDLREVNKRVEDIHPTVPNPYNLLSTLPPSHPWYTVLDLKDAFFCLRLHSESQLLFAFEWRDPEIGLSGQLTWTRLPQGFKNSPTLFNEALHSDLADFRVRYPALVLLQYVDDLLLAAATRTECLEGTKALLETLGNKGYRASAKKAQICLQEVTYLGYSLKDGQRWLTKARKEAILSIPVPKNSRQVREFLGKAGYCRLFIPGFAELAAPLYPLTRPGTLFQWGTEQQLAFEDIKKALLSSPALGLPDITKPFELFIDENSGFAKGVLVQKLGPWKRPVAYLSKKLDTVASGWPPCLRMVAAIAILVKDAGKLTLGQPLTILTSHPVEALVRQPPNKWLSNARMTHYQAMLLDAERVHFGPTVSLNPATLLPLPSGGNHHDCLQILAETHGTRPDLTDQPLPDADLTWYTDGSSFIRNGEREAGAAVTTESEVIWAAPLPPGTSAQRAELIALTQALKMAEGKKLTVYTDSRYAFATTHVHGEIYRRRGWLTSEGKEIKNKNEILALLEALFLPKRLSIIHCPGHQKGDSPQAKGNRLADDTAKKAATETHSSLTVLPAGKRTADGSEFEKRTADGSEFESPKKKAKVE

SEQ ID NO: 6018 - protein, 2171 aa, synthetic construct
MPAAKRVKLDGGDKKYSIGLDIGTNSVGWAVITDEYKVPSKKFKVLGNTDRHSIKKNLIGALLFDSGETAEATRLKRTARRRYTRRKNRICYLQEIFSNEMAKVDDSFFHRLEESFLVEEDKKHERHPIFGNIVDEVAYHEKYPTIYHLRKKLVDSTDKADLRLIYLALAHMIKFRGHFLIEGDLNPDNSDVDKLFIQLVQTYNQLFEENPINASGVDAKAILSARLSKSRRLENLIAQLPGEKKNGLFGNLIALSLGLTPNFKSNFDLAEDAKLQLSKDTYDDDLDNLLAQIGDQYADLFLAAKNLSDAILLSDILRVNTEITKAPLSASMIKRYDEHHQDLTLLKALVRQQLPEKYKEIFFDQSKNGYAGYIDGGASQEEFYKFIKPILEKMDGTEELLVKLNREDLLRKQRTFDNGSIPHQIHLGELHAILRRQEDFYPFLKDNREKIEKILTFRIPYYVGPLARGNSRFAWMTRKSEETITPWNFEEVVDKGASAQSFIERMTNFDKNLPNEKVLPKHSLLYEYFTVYNELTKVKYVTEGMRKPAFLSGEQKKAIVDLLFKTNRKVTVKQLKEDYFKKIECFDSVEISGVEDRFNASLGTYHDLLKIIKDKDFLDNEENEDILEDIVLTLTLFEDREMIEERLKTYAHLFDDKVMKQLKRRRYTGWGRLSRKLINGIRDKQSGKTILDFLKSDGFANRNFMQLIHDDSLTFKEDIQKAQVSGQGDSLHEHIANLAGSPAIKKGILQTVKVVDELVKVMGRHKPENIVIEMARENQTTQKGQKNSRERMKRIEEGIKELGSQILKEHPVENTQLQNEKLYLYYLQNGRDMYVDQELDINRLSDYDVDHIVPQSFLKDDSIDNKVLTRSDKARGKSDNVPSEEVVKKMKNYWRQLLNAKLITQRKFDNLTKAERGGLSELDKAGFIKRQLVETRQITKHVAQILDSRMNTKYDENDKLIREVKVITLKSKLVSDFRKDFQFYKVREINNYHHAHDAYLNAVVGTALIKKYPKLESEFVYGDYKVYDVRKMIAKSEQEIGKATAKYFFYSNIMNFFKTEITLANGEIRKRPLIETNGETGEIVWDKGRDFATVRKVLSMPQVNIVKKTEVQTGGFSKESILPKRNSDKLIARKKDWDPKKYGGFDSPTVAYSVLVVAKVEKGKSKKLKSVKELLGITIMERSSFEKNPIDFLEAKGYKEVKKDLIIKLPKYSLFELENGRKRMLASAGELQKGNELALPSKYVNFLYLASHYEKLKGSPEDNEQKQLFVEQHKHYLDEIIEQISEFSKRVILADANLDKVLSAYNKHRDKPIREQAENIIHLFTLTNLGAPAAFKYFDTTIDRKRYTSTKEVLDATLIHQSITGLYETRIDLSQLGGDGGGGSGGSGGMNPLQLLQPLPAEIKGTKLLAHWNSGATITCIPESFLEDEQPIKKTLIKTIHGEKQQNVYYVTFKVKGRKVEAEVIASPYEYILLSPTDVPWLTQQPLQLTILVPLQEYQEKILSKTALPEDQKQQLKTLFVKYDNLWQHWENQVGHRKIRPHNIATGDYPPRPQKQYPINPKAKPSIQIVIDDLLKQGVLTPQNSTMNTPVYPVPKPDGRWRMVLDYREVNKTIPLTAAQNQHSAGILATIVRQKYKTTLDLANGFWAHPITPESYWLTAFTWQGKQYCWTRLPQGFLNSPALFNADVVDLLKEIPNVQVYVDDIYLSHDDPKEHVQQLEKVFQILLQAGYVVSLKKSEIGQKTVEFLGFNITKEGRGLTDTFKTKLLNITPPKDLKQLQSILGLLNFARNFIPNFAELVQPLYNLIAPAKGKYIEWSEENTKQLNMVIEALNTASNLEERLPEQRLVIKVNTSPSAGYVRYYNETGKKPIMYLNYVFSKAELKFSMLEKLLTTMHKALIKAMDLAMGQEILVYSPIVSMTKIQKTPLPERKALPIRWITWMTYLEDPRIQFHYDKTLPELKHIPDVYTSSQSPVKHPSQYEGVFYTDGSAIKSPDPTKSNNAGMGIVHATYKPEYQVLNQWSIPLGNHTAQMAEIAAVEFACKKALKIPGPVLVITDSFYVAESANKELPYWKSNGFVNNKKKPLKHISKWKSIAECLSMKPDITIQHEKGISLQIPVFILKGNALADKLATQGSYVVNAGKRTADGSEFEKRTADGSEFESPKKKAKVE

SEQ ID NO: 6019 - protein, 2213 aa, synthetic construct
MPAAKRVKLDGGDKKYSIGLDIGTNSVGWAVITDEYKVPSKKFKVLGNTDRHSIKKNLIGALLFDSGETAEATRLKRTARRRYTRRKNRICYLQEIFSNEMAKVDDSFFHRLEESFLVEEDKKHERHPIFGNIVDEVAYHEKYPTIYHLRKKLVDSTDKADLRLIYLALAHMIKFRGHFLIEGDLNPDNSDVDKLFIQLVQTYNQLFEENPINASGVDAKAILSARLSKSRRLENLIAQLPGEKKNGLFGNLIALSLGLTPNFKSNFDLAEDAKLQLSKDTYDDDLDNLLAQIGDQYADLFLAAKNLSDAILLSDILRVNTEITKAPLSASMIKRYDEHHQDLTLLKALVRQQLPEKYKEIFFDQSKNGYAGYIDGGASQEEFYKFIKPILEKMDGTEELLVKLNREDLLRKQRTFDNGSIPHQIHLGELHAILRRQEDFYPFLKDNREKIEKILTFRIPYYVGPLARGNSRFAWMTRKSEETITPWNFEEVVDKGASAQSFIERMTNFDKNLPNEKVLPKHSLLYEYFTVYNELTKVKYVTEGMRKPAFLSGEQKKAIVDLLFKTNRKVTVKQLKEDYFKKIECFDSVEISGVEDRFNASLGTYHDLLKIIKDKDFLDNEENEDILEDIVLTLTLFEDREMIEERLKTYAHLFDDKVMKQLKRRRYTGWGRLSRKLINGIRDKQSGKTILDFLKSDGFANRNFMQLIHDDSLTFKEDIQKAQVSGQGDSLHEHIANLAGSPAIKKGILQTVKVVDELVKVMGRHKPENIVIEMARENQTTQKGQKNSRERMKRIEEGIKELGSQILKEHPVENTQLQNEKLYLYYLQNGRDMYVDQELDINRLSDYDVDHIVPQSFLKDDSIDNKVLTRSDKARGKSDNVPSEEVVKKMKNYWRQLLNAKLITQRKFDNLTKAERGGLSELDKAGFIKRQLVETRQITKHVAQILDSRMNTKYDENDKLIREVKVITLKSKLVSDFRKDFQFYKVREINNYHHAHDAYLNAVVGTALIKKYPKLESEFVYGDYKVYDVRKMIAKSEQEIGKATAKYFFYSNIMNFFKTEITLANGEIRKRPLIETNGETGEIVWDKGRDFATVRKVLSMPQVNIVKKTEVQTGGFSKESILPKRNSDKLIARKKDWDPKKYGGFDSPTVAYSVLVVAKVEKGKSKKLKSVKELLGITIMERSSFEKNPIDFLEAKGYKEVKKDLIIKLPKYSLFELENGRKRMLASAGELQKGNELALPSKYVNFLYLASHYEKLKGSPEDNEQKQLFVEQHKHYLDEIIEQISEFSKRVILADANLDKVLSAYNKHRDKPIREQAENIIHLFTLTNLGAPAAFKYFDTTIDRKRYTSTKEVLDATLIHQSITGLYETRIDLSQLGGDGGGGSGGSGGTLGDQGSRGSDPLPEPRVTLTVEGIPTEFLVNTGAEHSVLTKPMGKMGSKRTVVAGATGSKVYPWTTKRLLKIGQKQVTHSFLVIPECPAPLLGRDLLTKLKAQIQFSTEGPQVTWEDRPAMCLVLNLEEEYRLHEKPVPPSIDPSWLQLFPMVWAEKAGMGLANQVPPVVVELKSDASPVAVRQYPMSKEAREGIRPHIQRFLDLGILVPCQSPWNTPLLPVKKPGTNDYRPVQDLREVNKRVQDIHPTVPNPYNLLSSLPPSHTWYSVLDLKDAFFCLKLHPNSQPLFAFEWRDPEKGNTGQLTWTRLPQGFKNSPTLFDEALHRDLASFRALNPQVVMLQYVDDLLVAAPTYRDCKEGTRRLLQELSKLGYRVSAKKAQLCREEVTYLGYLLKGGKRWLTPARKATVMKIPTPTTPRQVREFLGTAGFCRLWIPGFASLAAPLYPLTREKVPFTWTEAHQEAFGRIKEALLSAPALALPDLTKPFALYVDEKEGVARGVLTQTLGPWRRPVAYLSKKLDPVASGWPTCLKAIAAVALLLKDADKLTLGQNVLVIAPHNLESIVRQPPDRWMTNARMTHYQSLLLNERVSFAPPAILNPATLLPVESDDTPIHICSEILAEETGTRPDLRDQPLPGVPAWYTDGSSFIMDGRRQAGAAIVDNKRTVWASNLPEGTSAQKAELIALTQALRLAEGKSINIYTDSRYAFATAHVHGAIYKQRGLLTSAGKDIKNKEEILALLEAIHLPKRVAIIHCPGHQRGTDPVATGNRKADEAAKQAAQSTRILTETTKNAGKRTADGSEFEKRTADGSEFESPKKKAKVE

SEQ ID NO: 6020 - protein, 2122 aa, synthetic construct
MPAAKRVKLDGGDKKYSIGLDIGTNSVGWAVITDEYKVPSKKFKVLGNTDRHSIKKNLIGALLFDSGETAEATRLKRTARRRYTRRKNRICYLQEIFSNEMAKVDDSFFHRLEESFLVEEDKKHERHPIFGNIVDEVAYHEKYPTIYHLRKKLVDSTDKADLRLIYLALAHMIKFRGHFLIEGDLNPDNSDVDKLFIQLVQTYNQLFEENPINASGVDAKAILSARLSKSRRLENLIAQLPGEKKNGLFGNLIALSLGLTPNFKSNFDLAEDAKLQLSKDTYDDDLDNLLAQIGDQYADLFLAAKNLSDAILLSDILRVNTEITKAPLSASMIKRYDEHHQDLTLLKALVRQQLPEKYKEIFFDQSKNGYAGYIDGGASQEEFYKFIKPILEKMDGTEELLVKLNREDLLRKQRTFDNGSIPHQIHLGELHAILRRQEDFYPFLKDNREKIEKILTFRIPYYVGPLARGNSRFAWMTRKSEETITPWNFEEVVDKGASAQSFIERMTNFDKNLPNEKVLPKHSLLYEYFTVYNELTKVKYVTEGMRKPAFLSGEQKKAIVDLLFKTNRKVTVKQLKEDYFKKIECFDSVEISGVEDRFNASLGTYHDLLKIIKDKDFLDNEENEDILEDIVLTLTLFEDREMIEERLKTYAHLFDDKVMKQLKRRRYTGWGRLSRKLINGIRDKQSGKTILDFLKSDGFANRNFMQLIHDDSLTFKEDIQKAQVSGQGDSLHEHIANLAGSPAIKKGILQTVKVVDELVKVMGRHKPENIVIEMARENQTTQKGQKNSRERMKRIEEGIKELGSQILKEHPVENTQLQNEKLYLYYLQNGRDMYVDQELDINRLSDYDVDHIVPQSFLKDDSIDNKVLTRSDKARGKSDNVPSEEVVKKMKNYWRQLLNAKLITQRKFDNLTKAERGGLSELDKAGFIKRQLVETRQITKHVAQILDSRMNTKYDENDKLIREVKVITLKSKLVSDFRKDFQFYKVREINNYHHAHDAYLNAVVGTALIKKYPKLESEFVYGDYKVYDVRKMIAKSEQEIGKATAKYFFYSNIMNFFKTEITLANGEIRKRPLIETNGETGEIVWDKGRDFATVRKVLSMPQVNIVKKTEVQTGGFSKESILPKRNSDKLIARKKDWDPKKYGGFDSPTVAYSVLVVAKVEKGKSKKLKSVKELLGITIMERSSFEKNPIDFLEAKGYKEVKKDLIIKLPKYSLFELENGRKRMLASAGELQKGNELALPSKYVNFLYLASHYEKLKGSPEDNEQKQLFVEQHKHYLDEIIEQISEFSKRVILADANLDKVLSAYNKHRDKPIREQAENIIHLFTLTNLGAPAAFKYFDTTIDRKRYTSTKEVLDATLIHQSITGLYETRIDLSQLGGDGGGGSGGSGGLLGRDLLTKLKAQIQFSTEGPQVTWEDRPAMCLVLNLEEEYRLHEKPVPPSIDPSWLQLFPMVWAEKAGMGLANQVPPVVVELKSDASPVAVRQYPMSKEAREGIRPHIQRFLDLGILVPCQSPWNTPLLPVKKPGTNDYRPVQDLREVNKRVQDIHPTVPNPYNLLSSLPPSHTWYSVLDLKDAFFCLKLHPNSQPLFAFEWRDPEKGNTGQLTWTRLPQGFKNSPTLFDEALHRDLASFRALNPQVVMLQYVDDLLVAAPTYRDCKEGTRRLLQELSKLGYRVSAKKAQLCREEVTYLGYLLKGGKRWLTPARKATVMKIPTPTTPRQVREFLGTAGFCRLWIPGFASLAAPLYPLTREKVPFTWTEAHQEAFGRIKEALLSAPALALPDLTKPFALYVDEKEGVARGVLTQTLGPWRRPVAYLSKKLDPVASGWPTCLKAIAAVALLLKDADKLTLGQNVLVIAPHNLESIVRQPPDRWMTNARMTHYQSLLLNERVSFAPPAILNPATLLPVESDDTPIHICSEILAEETGTRPDLRDQPLPGVPAWYTDGSSFIMDGRRQAGAAIVDNKRTVWASNLPEGTSAQKAELIALTQALRLAEGKSINIYTDSRYAFATAHVHGAIYKQRGLLTSAGKDIKNKEEILALLEAIHLPKRVAIIHCPGHQRGTDPVATGNRKADEAAKQAAQSTRILTETTKNAGKRTADGSEFEKRTADGSEFESPKKKAKVE

SEQ ID NO: 6021 - protein, 2213 aa, synthetic construct
MPAAKRVKLDGGDKKYSIGLDIGTNSVGWAVITDEYKVPSKKFKVLGNTDRHSIKKNLIGALLFDSGETAEATRLKRTARRRYTRRKNRICYLQEIFSNEMAKVDDSFFHRLEESFLVEEDKKHERHPIFGNIVDEVAYHEKYPTIYHLRKKLVDSTDKADLRLIYLALAHMIKFRGHFLIEGDLNPDNSDVDKLFIQLVQTYNQLFEENPINASGVDAKAILSARLSKSRRLENLIAQLPGEKKNGLFGNLIALSLGLTPNFKSNFDLAEDAKLQLSKDTYDDDLDNLLAQIGDQYADLFLAAKNLSDAILLSDILRVNTEITKAPLSASMIKRYDEHHQDLTLLKALVRQQLPEKYKEIFFDQSKNGYAGYIDGGASQEEFYKFIKPILEKMDGTEELLVKLNREDLLRKQRTFDNGSIPHQIHLGELHAILRRQEDFYPFLKDNREKIEKILTFRIPYYVGPLARGNSRFAWMTRKSEETITPWNFEEVVDKGASAQSFIERMTNFDKNLPNEKVLPKHSLLYEYFTVYNELTKVKYVTEGMRKPAFLSGEQKKAIVDLLFKTNRKVTVKQLKEDYFKKIECFDSVEISGVEDRFNASLGTYHDLLKIIKDKDFLDNEENEDILEDIVLTLTLFEDREMIEERLKTYAHLFDDKVMKQLKRRRYTGWGRLSRKLINGIRDKQSGKTILDFLKSDGFANRNFMQLIHDDSLTFKEDIQKAQVSGQGDSLHEHIANLAGSPAIKKGILQTVKVVDELVKVMGRHKPENIVIEMARENQTTQKGQKNSRERMKRIEEGIKELGSQILKEHPVENTQLQNEKLYLYYLQNGRDMYVDQELDINRLSDYDVDHIVPQSFLKDDSIDNKVLTRSDKARGKSDNVPSEEVVKKMKNYWRQLLNAKLITQRKFDNLTKAERGGLSELDKAGFIKRQLVETRQITKHVAQILDSRMNTKYDENDKLIREVKVITLKSKLVSDFRKDFQFYKVREINNYHHAHDAYLNAVVGTALIKKYPKLESEFVYGDYKVYDVRKMIAKSEQEIGKATAKYFFYSNIMNFFKTEITLANGEIRKRPLIETNGETGEIVWDKGRDFATVRKVLSMPQVNIVKKTEVQTGGFSKESILPKRNSDKLIARKKDWDPKKYGGFDSPTVAYSVLVVAKVEKGKSKKLKSVKELLGITIMERSSFEKNPIDFLEAKGYKEVKKDLIIKLPKYSLFELENGRKRMLASAGELQKGNELALPSKYVNFLYLASHYEKLKGSPEDNEQKQLFVEQHKHYLDEIIEQISEFSKRVILADANLDKVLSAYNKHRDKPIREQAENIIHLFTLTNLGAPAAFKYFDTTIDRKRYTSTKEVLDATLIHQSITGLYETRIDLSQLGGDGGGGSGGSGGTLGDQGSRGSDPLPEPRVTLTVEGIPTEFLVNTGAEHSVLTKPMGKMGSKRTVVAGATGSKVYPWTTKRLLKIGQKQVTHSFLVIPECPAPLLGRDLLTKLKAQIQFSTEGPQVTWEDRPAMCLVLNLEEEYRLHEKPVPPSIDPSWLQLFPMVWAEKAGMGLANQVPPVVVELKSDASPVAVRQYPMSKEAREGIRPHIQRFLDLGILVPCQSPWNTPLLPVKKPGTNDYRPVQDLREVNKRVQDIHPTVPNPYNLLSSLPPSHTWYSVLDLKDAFFCLKLHPNSQPLFAFEWRDPEKGNTGQLTWTRLPQGFKNSPTLFNEALHRDLASFRALNPQVVMLQYVDDLLVAAPTYRDCKEGTRRLLQELSKLGYRVSAKKAQLCREEVTYLGYLLKGGKRWLTPARKATVMKIPTPTTPRQVREFLGTAGFCRLWIPGFASLAAPLYPLTRPKVPFTWTEAHQEAFGRIKEALLSAPALALPDLTKPFALYVDEKEGVARGVLTQTLGPWRRPVAYLSKKLDPVASGWPTCLKAIAAVALLLKDADKLTLGQNVLVIAPHNLESIVRQPPDRWMTNARMTHYQSLLLNERVSFAPPAILNPATLLPVESDDTPIHICSEILAEETGTRPDLRDQPLPGVPAWYTDGSSFIMDGRRQAGAAIVDNKRTVWASNLPEGTSAQKAELIALTQALRLAEGKSINIYTDSRYAFATAHVHGAIYKQRGWLTSAGKDIKNKEEILALLEAIHLPKRVAIIHCPGHQRGTDPVATGNRKADEAAKQAAQSTRILTETTKNAGKRTADGSEFEKRTADGSEFESPKKKAKVE

SEQ ID NO: 6022 - protein, 2091 aa, synthetic construct
MPAAKRVKLDGGDKKYSIGLDIGTNSVGWAVITDEYKVPSKKFKVLGNTDRHSIKKNLIGALLFDSGETAEATRLKRTARRRYTRRKNRICYLQEIFSNEMAKVDDSFFHRLEESFLVEEDKKHERHPIFGNIVDEVAYHEKYPTIYHLRKKLVDSTDKADLRLIYLALAHMIKFRGHFLIEGDLNPDNSDVDKLFIQLVQTYNQLFEENPINASGVDAKAILSARLSKSRRLENLIAQLPGEKKNGLFGNLIALSLGLTPNFKSNFDLAEDAKLQLSKDTYDDDLDNLLAQIGDQYADLFLAAKNLSDAILLSDILRVNTEITKAPLSASMIKRYDEHHQDLTLLKALVRQQLPEKYKEIFFDQSKNGYAGYIDGGASQEEFYKFIKPILEKMDGTEELLVKLNREDLLRKQRTFDNGSIPHQIHLGELHAILRRQEDFYPFLKDNREKIEKILTFRIPYYVGPLARGNSRFAWMTRKSEETITPWNFEEVVDKGASAQSFIERMTNFDKNLPNEKVLPKHSLLYEYFTVYNELTKVKYVTEGMRKPAFLSGEQKKAIVDLLFKTNRKVTVKQLKEDYFKKIECFDSVEISGVEDRFNASLGTYHDLLKIIKDKDFLDNEENEDILEDIVLTLTLFEDREMIEERLKTYAHLFDDKVMKQLKRRRYTGWGRLSRKLINGIRDKQSGKTILDFLKSDGFANRNFMQLIHDDSLTFKEDIQKAQVSGQGDSLHEHIANLAGSPAIKKGILQTVKVVDELVKVMGRHKPENIVIEMARENQTTQKGQKNSRERMKRIEEGIKELGSQILKEHPVENTQLQNEKLYLYYLQNGRDMYVDQELDINRLSDYDVDHIVPQSFLKDDSIDNKVLTRSDKARGKSDNVPSEEVVKKMKNYWRQLLNAKLITQRKFDNLTKAERGGLSELDKAGFIKRQLVETRQITKHVAQILDSRMNTKYDENDKLIREVKVITLKSKLVSDFRKDFQFYKVREINNYHHAHDAYLNAVVGTALIKKYPKLESEFVYGDYKVYDVRKMIAKSEQEIGKATAKYFFYSNIMNFFKTEITLANGEIRKRPLIETNGETGEIVWDKGRDFATVRKVLSMPQVNIVKKTEVQTGGFSKESILPKRNSDKLIARKKDWDPKKYGGFDSPTVAYSVLVVAKVEKGKSKKLKSVKELLGITIMERSSFEKNPIDFLEAKGYKEVKKDLIIKLPKYSLFELENGRKRMLASAGELQKGNELALPSKYVNFLYLASHYEKLKGSPEDNEQKQLFVEQHKHYLDEIIEQISEFSKRVILADANLDKVLSAYNKHRDKPIREQAENIIHLFTLTNLGAPAAFKYFDTTIDRKRYTSTKEVLDATLIHQSITGLYETRIDLSQLGGDGGGGSGGSGGLGIEDEYRLHETSTEPDVSLGSTWLSDFPQAWAETGGMGLAVRQAPLIIPLKATSTPVSIQQYPMSHEARLGIKPHIQRLLDQGILVPCQSPWNTPLLPVKKPGTNDYRPVQDLREVNKRVEDIHPTVPNPYNLLSGLPPSHQWYTVLDLKDAFFCLRLHPTSQPLFAFEWRDPGMGISGQLTWTRLPQGFKNSPTLFNEALHRDLADFRIQHPDLILLQYVDDILLAATSELDCQQGTRALLQTLGDLGYRASAKKAQICQKQVKYLGYLLREGQRWLTEARKETVMGQPVPKTPRQLREFLGKAGFCRLFIPGFAEMAAPLYPLTKPGTLFSWGPDQQKAYQEIKQALLTAPALGLPDLTKPFELFVDEKQGYAKGVLTQKLGPWRRPVAYLSKKLDPVAAGWPPCLRMVAAIAVLTKDAGKLTMGQPLVILAPHAVEALVKQPPDRWLSNARMTHYQAMLLDTDRVQFGPVVALNPATLLPLPEEGAPHDCLEILAETHGTRPDLTDQPIPDADHTWYTDGSSFLQEGQRKAGAAVTTETEVIWAGALPAGTSAQRAELIALTQALKMAEGKRLNVYTDSRYAFATAHIHGEIYRRRGWLTSEGREIKNKSEILALLKALFLPKRLSIIHCLGHQKGDSAEARGNRLADQAAREAAIKTPPDTSTLLIAGKRTADGSEFEKRTADGSEFESPKKKAKVE

SEQ ID NO: 6023 - protein, 2091 aa, synthetic construct
MPAAKRVKLDGGDKKYSIGLDIGTNSVGWAVITDEYKVPSKKFKVLGNTDRHSIKKNLIGALLFDSGETAEATRLKRTARRRYTRRKNRICYLQEIFSNEMAKVDDSFFHRLEESFLVEEDKKHERHPIFGNIVDEVAYHEKYPTIYHLRKKLVDSTDKADLRLIYLALAHMIKFRGHFLIEGDLNPDNSDVDKLFIQLVQTYNQLFEENPINASGVDAKAILSARLSKSRRLENLIAQLPGEKKNGLFGNLIALSLGLTPNFKSNFDLAEDAKLQLSKDTYDDDLDNLLAQIGDQYADLFLAAKNLSDAILLSDILRVNTEITKAPLSASMIKRYDEHHQDLTLLKALVRQQLPEKYKEIFFDQSKNGYAGYIDGGASQEEFYKFIKPILEKMDGTEELLVKLNREDLLRKQRTFDNGSIPHQIHLGELHAILRRQEDFYPFLKDNREKIEKILTFRIPYYVGPLARGNSRFAWMTRKSEETITPWNFEEVVDKGASAQSFIERMTNFDKNLPNEKVLPKHSLLYEYFTVYNELTKVKYVTEGMRKPAFLSGEQKKAIVDLLFKTNRKVTVKQLKEDYFKKIECFDSVEISGVEDRFNASLGTYHDLLKIIKDKDFLDNEENEDILEDIVLTLTLFEDREMIEERLKTYAHLFDDKVMKQLKRRRYTGWGRLSRKLINGIRDKQSGKTILDFLKSDGFANRNFMQLIHDDSLTFKEDIQKAQVSGQGDSLHEHIANLAGSPAIKKGILQTVKVVDELVKVMGRHKPENIVIEMARENQTTQKGQKNSRERMKRIEEGIKELGSQILKEHPVENTQLQNEKLYLYYLQNGRDMYVDQELDINRLSDYDVDHIVPQSFLKDDSIDNKVLTRSDKARGKSDNVPSEEVVKKMKNYWRQLLNAKLITQRKFDNLTKAERGGLSELDKAGFIKRQLVETRQITKHVAQILDSRMNTKYDENDKLIREVKVITLKSKLVSDFRKDFQFYKVREINNYHHAHDAYLNAVVGTALIKKYPKLESEFVYGDYKVYDVRKMIAKSEQEIGKATAKYFFYSNIMNFFKTEITLANGEIRKRPLIETNGETGEIVWDKGRDFATVRKVLSMPQVNIVKKTEVQTGGFSKESILPKRNSDKLIARKKDWDPKKYGGFDSPTVAYSVLVVAKVEKGKSKKLKSVKELLGITIMERSSFEKNPIDFLEAKGYKEVKKDLIIKLPKYSLFELENGRKRMLASAGELQKGNELALPSKYVNFLYLASHYEKLKGSPEDNEQKQLFVEQHKHYLDEIIEQISEFSKRVILADANLDKVLSAYNKHRDKPIREQAENIIHLFTLTNLGAPAAFKYFDTTIDRKRYTSTKEVLDATLIHQSITGLYETRIDLSQLGGDGGGGSGGSGGTLGIEDEYRLHETSTEPDVSLGSTWLSDFPQAWAETGGMGLAVRQAPLIIPLKATSTPVSIQQYPMSHEARLGIKPHIQRLLDQGILVPCQSPWNTPLLPVKKPGTNDYRPVQDLREVNKRVEDIHPTVPNPYNLLSGLPPSHQWYTVLDLKDAFFCLRLHPTSQPLFAFEWRDPGMGISGQLTWTRLPQGFKNSPTLFNEALHRDLADFRIQHPDLILLQYVDDILLAATSELDCQQGTRALLQTLGDLGYRASAKKAQICQKQVKYLGYLLREGQRWLTEARKETVMGQPVPKTPRQLREFLGTAGFCRLWIPGFAEMAAPLYPLTKPGTLFSWGPDQQKAYQEIKQALLTAPALGLPDLTKPFELFVDEKQGYAKGVLTQKLGPWRRPVAYLSKKLDPVAAGWPPCLRMVAAIAVLTKDAGKLTMGQPLVILAPHAVEALVKQPPDRWLSNARMTHYQAMLLDTDRVQFGPVVALNPATLLPLPEEGAPHDCLEILAETHGTRPDLTDQPIPDADHTWYTDGSSFLQEGQRKAGAAVTTETEVIWAGALPAGTSAQRAELIALTQALKMAEGKRLNVYTDSRYAFATAHIHGEIYRRRGWLTSEGREIKNKSEILALLKALFLPKRLSIIHCLGHQKGDSAEARGNRLADQAAREAAIKTPPDTSTLLAGKRTADGSEFEKRTADGSEFESPKKKAKVE

SEQ ID NO: 6024 - protein, 2091 aa, synthetic construct
MPAAKRVKLDGGDKKYSIGLDIGTNSVGWAVITDEYKVPSKKFKVLGNTDRHSIKKNLIGALLFDSGETAEATRLKRTARRRYTRRKNRICYLQEIFSNEMAKVDDSFFHRLEESFLVEEDKKHERHPIFGNIVDEVAYHEKYPTIYHLRKKLVDSTDKADLRLIYLALAHMIKFRGHFLIEGDLNPDNSDVDKLFIQLVQTYNQLFEENPINASGVDAKAILSARLSKSRRLENLIAQLPGEKKNGLFGNLIALSLGLTPNFKSNFDLAEDAKLQLSKDTYDDDLDNLLAQIGDQYADLFLAAKNLSDAILLSDILRVNTEITKAPLSASMIKRYDEHHQDLTLLKALVRQQLPEKYKEIFFDQSKNGYAGYIDGGASQEEFYKFIKPILEKMDGTEELLVKLNREDLLRKQRTFDNGSIPHQIHLGELHAILRRQEDFYPFLKDNREKIEKILTFRIPYYVGPLARGNSRFAWMTRKSEETITPWNFEEVVDKGASAQSFIERMTNFDKNLPNEKVLPKHSLLYEYFTVYNELTKVKYVTEGMRKPAFLSGEQKKAIVDLLFKTNRKVTVKQLKEDYFKKIECFDSVEISGVEDRFNASLGTYHDLLKIIKDKDFLDNEENEDILEDIVLTLTLFEDREMIEERLKTYAHLFDDKVMKQLKRRRYTGWGRLSRKLINGIRDKQSGKTILDFLKSDGFANRNFMQLIHDDSLTFKEDIQKAQVSGQGDSLHEHIANLAGSPAIKKGILQTVKVVDELVKVMGRHKPENIVIEMARENQTTQKGQKNSRERMKRIEEGIKELGSQILKEHPVENTQLQNEKLYLYYLQNGRDMYVDQELDINRLSDYDVDHIVPQSFLKDDSIDNKVLTRSDKARGKSDNVPSEEVVKKMKNYWRQLLNAKLITQRKFDNLTKAERGGLSELDKAGFIKRQLVETRQITKHVAQILDSRMNTKYDENDKLIREVKVITLKSKLVSDFRKDFQFYKVREINNYHHAHDAYLNAVVGTALIKKYPKLESEFVYGDYKVYDVRKMIAKSEQEIGKATAKYFFYSNIMNFFKTEITLANGEIRKRPLIETNGETGEIVWDKGRDFATVRKVLSMPQVNIVKKTEVQTGGFSKESILPKRNSDKLIARKKDWDPKKYGGFDSPTVAYSVLVVAKVEKGKSKKLKSVKELLGITIMERSSFEKNPIDFLEAKGYKEVKKDLIIKLPKYSLFELENGRKRMLASAGELQKGNELALPSKYVNFLYLASHYEKLKGSPEDNEQKQLFVEQHKHYLDEIIEQISEFSKRVILADANLDKVLSAYNKHRDKPIREQAENIIHLFTLTNLGAPAAFKYFDTTIDRKRYTSTKEVLDATLIHQSITGLYETRIDLSQLGGDGGGGSGGSGGTLNIEDEYRLHETSKEPDVSLGSTWLSDFPQAWAETGGMGLAVRQAPLIIPLKATSTPVSIKQYPMSQEARLGIKPHIQRLLDQGILVPCQSPWNTPLLPVKKPGTNDYRPVQDLREVNKRVEDIHPTVPNPYNLLSGLPPSHQWYTVLDLKDAFFCLRLHPTSQPLFAFEWRDPEMGISGQLTWTRLPQGFKNSPTLFNEALHRDLAGFRIQHPDLILLQYVDDLLLAATSELDCQQGTRALLQTLGDLGYRASAKKAQICQKQVKYLGYLLKEGQRWLTEARKETVMGQPIPKTPRQLREFLGTAGFCRLWIPGFAEMAAPLYPLTKPGTLFNWGPDQQKAFQEIKQALLTAPALGLPDLTKPFELFVDEKQGYAKGVLTQKLGPWRRPVAYLSKKLDPVAAGWPPCLRMVAAIAVLTKDAGKLTMGQPLVILAPHAVEALVKQPPDRWLSNARMTHYQALLLDTDRVQFGPVVALNPATLLPLPEEGLQHDCLDILAEAHGTRSDLMDQPLPDADHTWYTDGSSFLQEGQRKAGAAVTTETEVIWARALPAGTSAQRAELIALTQALKMAEGKKLNVYTDSRYAFATAHIHGEIYRRRGWLTSEGKEIKNKDEILALLKALFLPKRLSIIHCPGHQKGNSAEARGNRMADQAAREVATRETPETSTLLAGKRTADGSEFEKRTADGSEFESPKKKAKVE

SEQ ID NO: 6025 - protein, 2091 aa, synthetic construct
MPAAKRVKLDGGDKKYSIGLDIGTNSVGWAVITDEYKVPSKKFKVLGNTDRHSIKKNLIGALLFDSGETAEATRLKRTARRRYTRRKNRICYLQEIFSNEMAKVDDSFFHRLEESFLVEEDKKHERHPIFGNIVDEVAYHEKYPTIYHLRKKLVDSTDKADLRLIYLALAHMIKFRGHFLIEGDLNPDNSDVDKLFIQLVQTYNQLFEENPINASGVDAKAILSARLSKSRRLENLIAQLPGEKKNGLFGNLIALSLGLTPNFKSNFDLAEDAKLQLSKDTYDDDLDNLLAQIGDQYADLFLAAKNLSDAILLSDILRVNTEITKAPLSASMIKRYDEHHQDLTLLKALVRQQLPEKYKEIFFDQSKNGYAGYIDGGASQEEFYKFIKPILEKMDGTEELLVKLNREDLLRKQRTFDNGSIPHQIHLGELHAILRRQEDFYPFLKDNREKIEKILTFRIPYYVGPLARGNSRFAWMTRKSEETITPWNFEEVVDKGASAQSFIERMTNFDKNLPNEKVLPKHSLLYEYFTVYNELTKVKYVTEGMRKPAFLSGEQKKAIVDLLFKTNRKVTVKQLKEDYFKKIECFDSVEISGVEDRFNASLGTYHDLLKIIKDKDFLDNEENEDILEDIVLTLTLFEDREMIEERLKTYAHLFDDKVMKQLKRRRYTGWGRLSRKLINGIRDKQSGKTILDFLKSDGFANRNFMQLIHDDSLTFKEDIQKAQVSGQGDSLHEHIANLAGSPAIKKGILQTVKVVDELVKVMGRHKPENIVIEMARENQTTQKGQKNSRERMKRIEEGIKELGSQILKEHPVENTQLQNEKLYLYYLQNGRDMYVDQELDINRLSDYDVDHIVPQSFLKDDSIDNKVLTRSDKARGKSDNVPSEEVVKKMKNYWRQLLNAKLITQRKFDNLTKAERGGLSELDKAGFIKRQLVETRQITKHVAQILDSRMNTKYDENDKLIREVKVITLKSKLVSDFRKDFQFYKVREINNYHHAHDAYLNAVVGTALIKKYPKLESEFVYGDYKVYDVRKMIAKSEQEIGKATAKYFFYSNIMNFFKTEITLANGEIRKRPLIETNGETGEIVWDKGRDFATVRKVLSMPQVNIVKKTEVQTGGFSKESILPKRNSDKLIARKKDWDPKKYGGFDSPTVAYSVLVVAKVEKGKSKKLKSVKELLGITIMERSSFEKNPIDFLEAKGYKEVKKDLIIKLPKYSLFELENGRKRMLASAGELQKGNELALPSKYVNFLYLASHYEKLKGSPEDNEQKQLFVEQHKHYLDEIIEQISEFSKRVILADANLDKVLSAYNKHRDKPIREQAENIIHLFTLTNLGAPAAFKYFDTTIDRKRYTSTKEVLDATLIHQSITGLYETRIDLSQLGGDGGGGSGGSGGTLNIEDEHRLHETSKEPDVSLGSTWLSDFPQAWAETGGMGLAVRQAPLIIPLKATSTPVSIKQYPMSQEARLGIKPHIQRLLDQGILVPCQSPWNTPLLPVKKPGTNDYRPVQDLREVNKRVEDIHPTVPNPYNLLSGLPPSHQWYTVLDLKDAFFCLRLHPTSQPLFAFEWRDPEMGISGQLTWTRLPQGFKNSPTLFNEALHRDLADFRIQHPDLILLQYVDDLLLAATSELDCQQGTRALLQTLGNLGYRASAKKAQICQKQVKYLGYLLKEGQRWLTEARKETVMGQPTPKTPRQLREFLGTAGFCRLWIPGFAEMAAPLYPLTKPGTLFNWGPDQQKAYQEIKQALLTAPALGLPDLTKPFELFVDEKQGYAKGVLTQKLGPWRRPVAYLSKKLDPVAAGWPPCLRMVAAIAVLTKDAGKLTMGQPLVILAPHAVEALVKQPPDRWLSNARMTHYQALLLDTDRVQFGPVVALNPATLLPLPEEGLQHNCLDILAEAHGTRPDLTDQPLPDADHTWYTDGSSLLQEGQRKAGAAVTTETEVIWAKALPAGTSAQRAELIALTQALKMAEGKKLNVYTDSRYAFATAHIHGEIYRRRGWLTSEGKEIKNKDEILALLKALFLPKRLSIIHCPGHQKGHSAEARGNRMADQAARKAAITETPDTSTLLAGKRTADGSEFEKRTADGSEFESPKKKAKVE

SEQ ID NO: 6026 - protein, 2085 aa, synthetic construct
MPAAKRVKLDGGDKKYSIGLDIGTNSVGWAVITDEYKVPSKKFKVLGNTDRHSIKKNLIGALLFDSGETAEATRLKRTARRRYTRRKNRICYLQEIFSNEMAKVDDSFFHRLEESFLVEEDKKHERHPIFGNIVDEVAYHEKYPTIYHLRKKLVDSTDKADLRLIYLALAHMIKFRGHFLIEGDLNPDNSDVDKLFIQLVQTYNQLFEENPINASGVDAKAILSARLSKSRRLENLIAQLPGEKKNGLFGNLIALSLGLTPNFKSNFDLAEDAKLQLSKDTYDDDLDNLLAQIGDQYADLFLAAKNLSDAILLSDILRVNTEITKAPLSASMIKRYDEHHQDLTLLKALVRQQLPEKYKEIFFDQSKNGYAGYIDGGASQEEFYKFIKPILEKMDGTEELLVKLNREDLLRKQRTFDNGSIPHQIHLGELHAILRRQEDFYPFLKDNREKIEKILTFRIPYYVGPLARGNSRFAWMTRKSEETITPWNFEEVVDKGASAQSFIERMTNFDKNLPNEKVLPKHSLLYEYFTVYNELTKVKYVTEGMRKPAFLSGEQKKAIVDLLFKTNRKVTVKQLKEDYFKKIECFDSVEISGVEDRFNASLGTYHDLLKIIKDKDFLDNEENEDILEDIVLTLTLFEDREMIEERLKTYAHLFDDKVMKQLKRRRYTGWGRLSRKLINGIRDKQSGKTILDFLKSDGFANRNFMQLIHDDSLTFKEDIQKAQVSGQGDSLHEHIANLAGSPAIKKGILQTVKVVDELVKVMGRHKPENIVIEMARENQTTQKGQKNSRERMKRIEEGIKELGSQILKEHPVENTQLQNEKLYLYYLQNGRDMYVDQELDINRLSDYDVDHIVPQSFLKDDSIDNKVLTRSDKARGKSDNVPSEEVVKKMKNYWRQLLNAKLITQRKFDNLTKAERGGLSELDKAGFIKRQLVETRQITKHVAQILDSRMNTKYDENDKLIREVKVITLKSKLVSDFRKDFQFYKVREINNYHHAHDAYLNAVVGTALIKKYPKLESEFVYGDYKVYDVRKMIAKSEQEIGKATAKYFFYSNIMNFFKTEITLANGEIRKRPLIETNGETGEIVWDKGRDFATVRKVLSMPQVNIVKKTEVQTGGFSKESILPKRNSDKLIARKKDWDPKKYGGFDSPTVAYSVLVVAKVEKGKSKKLKSVKELLGITIMERSSFEKNPIDFLEAKGYKEVKKDLIIKLPKYSLFELENGRKRMLASAGELQKGNELALPSKYVNFLYLASHYEKLKGSPEDNEQKQLFVEQHKHYLDEIIEQISEFSKRVILADANLDKVLSAYNKHRDKPIREQAENIIHLFTLTNLGAPAAFKYFDTTIDRKRYTSTKEVLDATLIHQSITGLYETRIDLSQLGGDGGGGSGGSGGTLQLDDEYRLYSPLVKPDQNIQFWLEQFPQAWAETAGMGLAKQVPPQVIQLKASATPVSVRQYPLSKEAQEGIRPHVQRLIQQGILVPVQSPWNTPLLPVRKPGTNDYRPVQDLREVNKRVQDIHPTVPNPYNLLCALPPQRSWYTVLDLKDAFFCLRLHPTSQPLFAFEWRDPGTGRTGQLTWTRLPQGFKNSPTIFDEALHRDLANFRIQHPQVTLLQYVDDLLLAGATKQDCLEGTKALLLELSDLGYRASAKKAQICRREVTYLGYSLRDGQRWLTEARKKTVVQIPAPTTAKQVREFLGTAGFCRLWIPGFATLAAPLYPLTKEKGEFSWAPEHQKAFDAIKKALLSAPALALPDVTKPFTLYVDERKGVARGVLTQTLGPWRRPVAYLSKKLDPVASGWPVCLKAIAAVAILVKDADKLTLGQNITVIAPHALENIVRQPPDRWMTNARMTHYQSLLLTERVTFAPPAALNPATLLPEETDEPVTHDCHQLLIEETGVRKDLTDIPLTGEVLTWFTDGSSYVVEGKRMAGAAVVDGTRTIWASSLPEGTSAQKAELMALTQALRLAEGKSINIYTDSRYAFATAHVHGAIYKQRGLLTSAGREIKNKEEILSLLEALHLPKRLAIIHCPGHQKAKDPISRGNQMADRVAKQAAQGVNLLAGKRTADGSEFEKRTADGSEFESPKKKAKVE

SEQ ID NO: 6027 - protein, 2171 aa, synthetic construct
MPAAKRVKLDGGDKKYSIGLDIGTNSVGWAVITDEYKVPSKKFKVLGNTDRHSIKKNLIGALLFDSGETAEATRLKRTARRRYTRRKNRICYLQEIFSNEMAKVDDSFFHRLEESFLVEEDKKHERHPIFGNIVDEVAYHEKYPTIYHLRKKLVDSTDKADLRLIYLALAHMIKFRGHFLIEGDLNPDNSDVDKLFIQLVQTYNQLFEENPINASGVDAKAILSARLSKSRRLENLIAQLPGEKKNGLFGNLIALSLGLTPNFKSNFDLAEDAKLQLSKDTYDDDLDNLLAQIGDQYADLFLAAKNLSDAILLSDILRVNTEITKAPLSASMIKRYDEHHQDLTLLKALVRQQLPEKYKEIFFDQSKNGYAGYIDGGASQEEFYKFIKPILEKMDGTEELLVKLNREDLLRKQRTFDNGSIPHQIHLGELHAILRRQEDFYPFLKDNREKIEKILTFRIPYYVGPLARGNSRFAWMTRKSEETITPWNFEEVVDKGASAQSFIERMTNFDKNLPNEKVLPKHSLLYEYFTVYNELTKVKYVTEGMRKPAFLSGEQKKAIVDLLFKTNRKVTVKQLKEDYFKKIECFDSVEISGVEDRFNASLGTYHDLLKIIKDKDFLDNEENEDILEDIVLTLTLFEDREMIEERLKTYAHLFDDKVMKQLKRRRYTGWGRLSRKLINGIRDKQSGKTILDFLKSDGFANRNFMQLIHDDSLTFKEDIQKAQVSGQGDSLHEHIANLAGSPAIKKGILQTVKVVDELVKVMGRHKPENIVIEMARENQTTQKGQKNSRERMKRIEEGIKELGSQILKEHPVENTQLQNEKLYLYYLQNGRDMYVDQELDINRLSDYDVDHIVPQSFLKDDSIDNKVLTRSDKARGKSDNVPSEEVVKKMKNYWRQLLNAKLITQRKFDNLTKAERGGLSELDKAGFIKRQLVETRQITKHVAQILDSRMNTKYDENDKLIREVKVITLKSKLVSDFRKDFQFYKVREINNYHHAHDAYLNAVVGTALIKKYPKLESEFVYGDYKVYDVRKMIAKSEQEIGKATAKYFFYSNIMNFFKTEITLANGEIRKRPLIETNGETGEIVWDKGRDFATVRKVLSMPQVNIVKKTEVQTGGFSKESILPKRNSDKLIARKKDWDPKKYGGFDSPTVAYSVLVVAKVEKGKSKKLKSVKELLGITIMERSSFEKNPIDFLEAKGYKEVKKDLIIKLPKYSLFELENGRKRMLASAGELQKGNELALPSKYVNFLYLASHYEKLKGSPEDNEQKQLFVEQHKHYLDEIIEQISEFSKRVILADANLDKVLSAYNKHRDKPIREQAENIIHLFTLTNLGAPAAFKYFDTTIDRKRYTSTKEVLDATLIHQSITGLYETRIDLSQLGGDGGGGSGGSGGMDPLQLLQPLEAEIKGTKLKAHWNSGATITCVPQAFLEEEVPIKNIWIKTIHGEKEQPVYYLTFKIQGRKVEAEVISSPYDYILVSPSDIPWLMKKPLQLTTLVPLQEYEERLLKQTMLTGSYKEKLQSLFLKYDALWQHWENQVGHRRIKPHHIATGTVNPRPQKQYPINPKAKASIQTVINDLLKQGVLIQQNSIMNTPVYPVPKPDGKWRMVLDYREVNKTIPLIAAQNQHSAGILSSIFRGKYKTTLDLSNGFWAHSITPESYWLTAFTWLGQQYCWTRLPQGFLNSPALFNADVVDLLKEVPNVQVYVDDIYISHDDPREHLEQLEKVFSLLLNAGYVVSLKKSEIAQHEVEFLGFNITKEGRGLTETFKQKLLNITPPRDLKQLQSILGLLNFARNFIPNFSELVKPLYNIIATAPGKYITWTTDNSQQLQNIISMLNSAENLEERNPEVRLIMKVNTSPSAGYIRFYNEFAKRPIMYLNYVYTKAEVKFTNTEKLLTTIHKGLIKALDLGMGQEILVYSPIVSMTKIQKTPLPERKALPIRWITWMSYLEDPRIQFHYDKTLPELQQVPTVTDDIIAKIKHPSEFSMVFYTDGSAIKHPNVNKSHNAGMGIAQVQFKPEFTVINTWSIPLGDHTAQLAEVAAVEFACKKALKIDGPVLIVTDSFYVAESVNKELPYWQSNGFFNNKKKPLKHVSKWKSIADCIQLKPDIIIIHEKGHQPTASTFHTEGNNLADKLATQGSYVVNAGKRTADGSEFEKRTADGSEFESPKKKAKVE

SEQ ID NO: 6028 - protein, 2091 aa, synthetic construct
MPAAKRVKLDGGDKKYSIGLDIGTNSVGWAVITDEYKVPSKKFKVLGNTDRHSIKKNLIGALLFDSGETAEATRLKRTARRRYTRRKNRICYLQEIFSNEMAKVDDSFFHRLEESFLVEEDKKHERHPIFGNIVDEVAYHEKYPTIYHLRKKLVDSTDKADLRLIYLALAHMIKFRGHFLIEGDLNPDNSDVDKLFIQLVQTYNQLFEENPINASGVDAKAILSARLSKSRRLENLIAQLPGEKKNGLFGNLIALSLGLTPNFKSNFDLAEDAKLQLSKDTYDDDLDNLLAQIGDQYADLFLAAKNLSDAILLSDILRVNTEITKAPLSASMIKRYDEHHQDLTLLKALVRQQLPEKYKEIFFDQSKNGYAGYIDGGASQEEFYKFIKPILEKMDGTEELLVKLNREDLLRKQRTFDNGSIPHQIHLGELHAILRRQEDFYPFLKDNREKIEKILTFRIPYYVGPLARGNSRFAWMTRKSEETITPWNFEEVVDKGASAQSFIERMTNFDKNLPNEKVLPKHSLLYEYFTVYNELTKVKYVTEGMRKPAFLSGEQKKAIVDLLFKTNRKVTVKQLKEDYFKKIECFDSVEISGVEDRFNASLGTYHDLLKIIKDKDFLDNEENEDILEDIVLTLTLFEDREMIEERLKTYAHLFDDKVMKQLKRRRYTGWGRLSRKLINGIRDKQSGKTILDFLKSDGFANRNFMQLIHDDSLTFKEDIQKAQVSGQGDSLHEHIANLAGSPAIKKGILQTVKVVDELVKVMGRHKPENIVIEMARENQTTQKGQKNSRERMKRIEEGIKELGSQILKEHPVENTQLQNEKLYLYYLQNGRDMYVDQELDINRLSDYDVDHIVPQSFLKDDSIDNKVLTRSDKARGKSDNVPSEEVVKKMKNYWRQLLNAKLITQRKFDNLTKAERGGLSELDKAGFIKRQLVETRQITKHVAQILDSRMNTKYDENDKLIREVKVITLKSKLVSDFRKDFQFYKVREINNYHHAHDAYLNAVVGTALIKKYPKLESEFVYGDYKVYDVRKMIAKSEQEIGKATAKYFFYSNIMNFFKTEITLANGEIRKRPLIETNGETGEIVWDKGRDFATVRKVLSMPQVNIVKKTEVQTGGFSKESILPKRNSDKLIARKKDWDPKKYGGFDSPTVAYSVLVVAKVEKGKSKKLKSVKELLGITIMERSSFEKNPIDFLEAKGYKEVKKDLIIKLPKYSLFELENGRKRMLASAGELQKGNELALPSKYVNFLYLASHYEKLKGSPEDNEQKQLFVEQHKHYLDEIIEQISEFSKRVILADANLDKVLSAYNKHRDKPIREQAENIIHLFTLTNLGAPAAFKYFDTTIDRKRYTSTKEVLDATLIHQSITGLYETRIDLSQLGGDGGGGSGGSGGTLNIEDEYRLHETSKEPDVPLGSTWLSDFPQAWAETGGMGLAVRQAPLIIPLKATSTPVSIKQYPMSQEARLGIKPHIQRLLDQGILVPCQSPWNTPLLPVKKPGTNDYRPVQDLREVNKRVEDIHPTVPNPYNLLSGLPPSHQWYTVLDLKDAFFCLRLHPTSQPLFAFEWRDPEMGISGQLTWTRLPQGFKNSPTLFNEALHRDLADFRIQHPDLILLQYVDDLLLAATSEQDCQRGTRALLQTLGNLGYRASAKKAQICQKQVKYLGYLLKEGQRWLTEARKETVMGQPTPKTPRQLREFLGTAGFCRLWIPGFAEMAAPLYPLTKPGTLFNWGPDQQKAYQEIKQALLTAPALGLPDLTKPFELFVDEKQGYAKGVLTQKLGPWRRPVAYLSKKLDPVAAGWPPCLRMVAAIAVLTKDAGKLTMGQPLVILAPHAVEALVKQPPDRWLSNARMTHYQAMLLDTDRVQFGPVVALNPATLLPLPEKEAPHDCLEILAETHGTRPDLTDQPIPDADYTWYTDGSSFLQEGQRRAGAAVTTETEVIWARALPAGTSAQRAELIALTQALKMAEGKKLNVYTDSRYAFATAHVHGEIYRRRGWLTSEGREIKNKNEILALLKALFLPKRLSIIHCPGHQKGNSAEARGNRMADQAAREAAMKAVLETSTLLAGKRTADGSEFEKRTADGSEFESPKKKAKVE

SEQ ID NO: 6029 - protein, 2096 aa, synthetic construct
MPAAKRVKLDGGDKKYSIGLDIGTNSVGWAVITDEYKVPSKKFKVLGNTDRHSIKKNLIGALLFDSGETAEATRLKRTARRRYTRRKNRICYLQEIFSNEMAKVDDSFFHRLEESFLVEEDKKHERHPIFGNIVDEVAYHEKYPTIYHLRKKLVDSTDKADLRLIYLALAHMIKFRGHFLIEGDLNPDNSDVDKLFIQLVQTYNQLFEENPINASGVDAKAILSARLSKSRRLENLIAQLPGEKKNGLFGNLIALSLGLTPNFKSNFDLAEDAKLQLSKDTYDDDLDNLLAQIGDQYADLFLAAKNLSDAILLSDILRVNTEITKAPLSASMIKRYDEHHQDLTLLKALVRQQLPEKYKEIFFDQSKNGYAGYIDGGASQEEFYKFIKPILEKMDGTEELLVKLNREDLLRKQRTFDNGSIPHQIHLGELHAILRRQEDFYPFLKDNREKIEKILTFRIPYYVGPLARGNSRFAWMTRKSEETITPWNFEEVVDKGASAQSFIERMTNFDKNLPNEKVLPKHSLLYEYFTVYNELTKVKYVTEGMRKPAFLSGEQKKAIVDLLFKTNRKVTVKQLKEDYFKKIECFDSVEISGVEDRFNASLGTYHDLLKIIKDKDFLDNEENEDILEDIVLTLTLFEDREMIEERLKTYAHLFDDKVMKQLKRRRYTGWGRLSRKLINGIRDKQSGKTILDFLKSDGFANRNFMQLIHDDSLTFKEDIQKAQVSGQGDSLHEHIANLAGSPAIKKGILQTVKVVDELVKVMGRHKPENIVIEMARENQTTQKGQKNSRERMKRIEEGIKELGSQILKEHPVENTQLQNEKLYLYYLQNGRDMYVDQELDINRLSDYDVDHIVPQSFLKDDSIDNKVLTRSDKARGKSDNVPSEEVVKKMKNYWRQLLNAKLITQRKFDNLTKAERGGLSELDKAGFIKRQLVETRQITKHVAQILDSRMNTKYDENDKLIREVKVITLKSKLVSDFRKDFQFYKVREINNYHHAHDAYLNAVVGTALIKKYPKLESEFVYGDYKVYDVRKMIAKSEQEIGKATAKYFFYSNIMNFFKTEITLANGEIRKRPLIETNGETGEIVWDKGRDFATVRKVLSMPQVNIVKKTEVQTGGFSKESILPKRNSDKLIARKKDWDPKKYGGFDSPTVAYSVLVVAKVEKGKSKKLKSVKELLGITIMERSSFEKNPIDFLEAKGYKEVKKDLIIKLPKYSLFELENGRKRMLASAGELQKGNELALPSKYVNFLYLASHYEKLKGSPEDNEQKQLFVEQHKHYLDEIIEQISEFSKRVILADANLDKVLSAYNKHRDKPIREQAENIIHLFTLTNLGAPAAFKYFDTTIDRKRYTSTKEVLDATLIHQSITGLYETRIDLSQLGGDGGGGSGGSGGSGGTAPLEEEYRLFLEAPIQNVTLLEQWKREIPKVWAEINPPGLASTQAPIHVQLLSTALPVRVRQYPITLEAKRSLRETIRKFRAAGILRPVHSPWNTPLLPVRKSGTSEYRMVQDLREVNKRVETIHPTVPNPYTLLSLLPPDRIWYSVLDLKDAFFCIPLAPESQLIFAFEWADAEEGESGQLTWTRLPQGFKNSPTLFNEALNRDLQGFRLDHPSVSLLQYVDDLLIAADTQAACLSATRDLLMTLAELGYRVSGKKAQLCQEEVTYLGFKIHKGSRSLSNSRTQAILQIPVPKTKRQVREFLGTIGYCRLWIPGFAELAQPLYAATRPGNDPLVWGEKEEEAFQSLKLALTQPPALALPSLDKPFQLFVEETSGAAKGVLTQALGPWKRPVAYLSKRLDPVAAGWPRCLRAIAAAALLTREASKLTFGQDIEITSSHNLESLLRSPPDKWLTNARITQYQVLLLDPPRVRFKQTAALNPATLLPETDDTLPIHHCLDTLDSLTSTRPDLTDQPLAQAEATLFTDGSSYIRDGKRYAGAAVVTLDSVIWAEPLPIGTSAQKAELIALTKALEWSKDKSVNIYTDSRYAFATLHVHGMIYRERGWLTAGGKAIKNAPEILALLTAVWLPKRVAVMHCKGHQKDDAPTSTGNRRADEVAREVAIRPLSTQATISAGKRTADGSEFEKRTADGSEFESPKKKAKVE

SEQ ID NO: 6030 - protein, 2096 aa, synthetic construct; identical to SEQ ID NO: 4501

SEQ ID NO: 6031 - protein, 2093 aa, synthetic construct
MPAAKRVKLDGGDKKYSIGLDIGTNSVGWAVITDEYKVPSKKFKVLGNTDRHSIKKNLIGALLFDSGETAEATRLKRTARRRYTRRKNRICYLQEIFSNEMAKVDDSFFHRLEESFLVEEDKKHERHPIFGNIVDEVAYHEKYPTIYHLRKKLVDSTDKADLRLIYLALAHMIKFRGHFLIEGDLNPDNSDVDKLFIQLVQTYNQLFEENPINASGVDAKAILSARLSKSRRLENLIAQLPGEKKNGLFGNLIALSLGLTPNFKSNFDLAEDAKLQLSKDTYDDDLDNLLAQIGDQYADLFLAAKNLSDAILLSDILRVNTEITKAPLSASMIKRYDEHHQDLTLLKALVRQQLPEKYKEIFFDQSKNGYAGYIDGGASQEEFYKFIKPILEKMDGTEELLVKLNREDLLRKQRTFDNGSIPHQIHLGELHAILRRQEDFYPFLKDNREKIEKILTFRIPYYVGPLARGNSRFAWMTRKSEETITPWNFEEVVDKGASAQSFIERMTNFDKNLPNEKVLPKHSLLYEYFTVYNELTKVKYVTEGMRKPAFLSGEQKKAIVDLLFKTNRKVTVKQLKEDYFKKIECFDSVEISGVEDRFNASLGTYHDLLKIIKDKDFLDNEENEDILEDIVLTLTLFEDREMIEERLKTYAHLFDDKVMKQLKRRRYTGWGRLSRKLINGIRDKQSGKTILDFLKSDGFANRNFMQLIHDDSLTFKEDIQKAQVSGQGDSLHEHIANLAGSPAIKKGILQTVKVVDELVKVMGRHKPENIVIEMARENQTTQKGQKNSRERMKRIEEGIKELGSQILKEHPVENTQLQNEKLYLYYLQNGRDMYVDQELDINRLSDYDVDHIVPQSFLKDDSIDNKVLTRSDKARGKSDNVPSEEVVKKMKNYWRQLLNAKLITQRKFDNLTKAERGGLSELDKAGFIKRQLVETRQITKHVAQILDSRMNTKYDENDKLIREVKVITLKSKLVSDFRKDFQFYKVREINNYHHAHDAYLNAVVGTALIKKYPKLESEFVYGDYKVYDVRKMIAKSEQEIGKATAKYFFYSNIMNFFKTEITLANGEIRKRPLIETNGETGEIVWDKGRDFATVRKVLSMPQVNIVKKTEVQTGGFSKESILPKRNSDKLIARKKDWDPKKYGGFDSPTVAYSVLVVAKVEKGKSKKLKSVKELLGITIMERSSFEKNPIDFLEAKGYKEVKKDLIIKLPKYSLFELENGRKRMLASAGELQKGNELALPSKYVNFLYLASHYEKLKGSPEDNEQKQLFVEQHKHYLDEIIEQISEFSKRVILADANLDKVLSAYNKHRDKPIREQAENIIHLFTLTNLGAPAAFKYFDTTIDRKRYTSTKEVLDATLIHQSITGLYETRIDLSQLGGDGGGGSGGSGGSGGTLQLEEEYRLFEPESTQKQEMDIWLKNFPQAWAETGGMGTAHCQAPVLIQLKATATPISIRQYPMPHEAYQGIKPHIRRMLDQGILKPCQSPWNTPLLPVKKPGTEDYRPVQDLREVNKRVEDIHPTVPNPYNLLSTLPPSHPWYTVLDLKDAFFCLRLHSESQLLFAFEWRDPEIGLSGQLTWTRLPQGFKNSPTLFNEALHSDLADFRVRYPALVLLQYVDDLLLAAATRTECLEGTKALLETLGNKGYRASAKKAQICLQEVTYLGYSLKDGQRWLTKARKEAILSIPVPKNSRQVREFLGKAGYCRLFIPGFAELAAPLYPLTRPGTLFQWGTEQQLAFEDIKKALLSSPALGLPDITKPFELFIDENSGFAKGVLVQKLGPWKRPVAYLSKKLDTVASGWPPCLRMVAAIAILVKDAGKLTLGQPLTILTSHPVEALVRQPPNKWLSNARMTHYQAMLLDAERVHFGPTVSLNPATLLPLPSGGNHHDCLQILAETHGTRPDLTDQPLPDADLTWYTDGSSFIRNGEREAGAAVTTESEVIWAAPLPPGTSAQRAELIALTQALKMAEGKKLTVYTDSRYAFATTHVHGEIYRRRGWLTSEGKEIKNKNEILALLEALFLPKRLSIIHCPGHQKGDSPQAKGNRLADDTAKKAATETHSSLTVLPAGKRTADGSEFEKRTADGSEFESPKKKAKVE

SEQ ID NO: 6032 - protein, 2094 aa, synthetic construct
MPAAKRVKLDGGDKKYSIGLDIGTNSVGWAVITDEYKVPSKKFKVLGNTDRHSIKKNLIGALLFDSGETAEATRLKRTARRRYTRRKNRICYLQEIFSNEMAKVDDSFFHRLEESFLVEEDKKHERHPIFGNIVDEVAYHEKYPTIYHLRKKLVDSTDKADLRLIYLALAHMIKFRGHFLIEGDLNPDNSDVDKLFIQLVQTYNQLFEENPINASGVDAKAILSARLSKSRRLENLIAQLPGEKKNGLFGNLIALSLGLTPNFKSNFDLAEDAKLQLSKDTYDDDLDNLLAQIGDQYADLFLAAKNLSDAILLSDILRVNTEITKAPLSASMIKRYDEHHQDLTLLKALVRQQLPEKYKEIFFDQSKNGYAGYIDGGASQEEFYKFIKPILEKMDGTEELLVKLNREDLLRKQRTFDNGSIPHQIHLGELHAILRRQEDFYPFLKDNREKIEKILTFRIPYYVGPLARGNSRFAWMTRKSEETITPWNFEEVVDKGASAQSFIERMTNFDKNLPNEKVLPKHSLLYEYFTVYNELTKVKYVTEGMRKPAFLSGEQKKAIVDLLFKTNRKVTVKQLKEDYFKKIECFDSVEISGVEDRFNASLGTYHDLLKIIKDKDFLDNEENEDILEDIVLTLTLFEDREMIEERLKTYAHLFDDKVMKQLKRRRYTGWGRLSRKLINGIRDKQSGKTILDFLKSDGFANRNFMQLIHDDSLTFKEDIQKAQVSGQGDSLHEHIANLAGSPAIKKGILQTVKVVDELVKVMGRHKPENIVIEMARENQTTQKGQKNSRERMKRIEEGIKELGSQILKEHPVENTQLQNEKLYLYYLQNGRDMYVDQELDINRLSDYDVDHIVPQSFLKDDSIDNKVLTRSDKARGKSDNVPSEEVVKKMKNYWRQLLNAKLITQRKFDNLTKAERGGLSELDKAGFIKRQLVETRQITKHVAQILDSRMNTKYDENDKLIREVKVITLKSKLVSDFRKDFQFYKVREINNYHHAHDAYLNAVVGTALIKKYPKLESEFVYGDYKVYDVRKMIAKSEQEIGKATAKYFFYSNIMNFFKTEITLANGEIRKRPLIETNGETGEIVWDKGRDFATVRKVLSMPQVNIVKKTEVQTGGFSKESILPKRNSDKLIARKKDWDPKKYGGFDSPTVAYSVLVVAKVEKGKSKKLKSVKELLGITIMERSSFEKNPIDFLEAKGYKEVKKDLIIKLPKYSLFELENGRKRMLASAGELQKGNELALPSKYVNFLYLASHYEKLKGSPEDNEQKQLFVEQHKHYLDEIIEQISEFSKRVILADANLDKVLSAYNKHRDKPIREQAENIIHLFTLTNLGAPAAFKYFDTTIDRKRYTSTKEVLDATLIHQSITGLYETRIDLSQLGGDGGGGSGGSGGSGGTLNLEDEYRLYETSAEPEVSPGSTWLSDFPQAWAETGGMGLAVRQAPLIIPLKATSTPVSIKQYPMSQEAKLGIKPHIQRLLDQGILVPCQSPWNTPLLPVKKPGTNDYRPVQDLREVNKRVEDIHPTVPNPYNLLSGLPPSHRWYTVLDLKDAFFCLRLHPTSQPLFAFEWRDPGMGISGQLTWTRLPQGFKNSPTLFNEALHRDLADFRIQHPDLILLQYVDDILLAATSELDCQQGTRALLLTLGNLGYRASAKKAQLCQKQVKYLGYLLKEGQRWLTEARKETVMGQPTPKTPRQLREFLGTAGFCRLWIPGFAEMAAPLYPLTKPGTLFNWGPDQQKAYQEIKQALLTAPALGLPDLTKPFELFVDEKQGYAKGVLTQKLGPWRRPVAYLSKKLDPVAAGWPPCLRMVAAIAVLRKDAGKLTMGQPLVILAPHAVEALVKQPPDRWLSNARMTHYQAMLLDTDRVQFGPVVALNPATLLPLPEEGAPHDCLEILAETHGTRPDLTDQPIPDADHTWYTDGSSFLQEGQRKAGAAVTTETEVIWARALPAGTSAQRAELIALTQALKMAEGKRLNVYTDSRYAFATAHIHGEIYRRRGWLTSEGREIKNKSEILALLKALFLPKRLSIIHCLGHQKGDSAEARGNRLADQAAREAAIKTPPDTSTLLAGKRTADGSEFEKRTADGSEFESPKKKAKVE

SEQ ID NO: 6033 - protein, 2094 aa, synthetic construct
MPAAKRVKLDGGDKKYSIGLDIGTNSVGWAVITDEYKVPSKKFKVLGNTDRHSIKKNLIGALLFDSGETAEATRLKRTARRRYTRRKNRICYLQEIFSNEMAKVDDSFFHRLEESFLVEEDKKHERHPIFGNIVDEVAYHEKYPTIYHLRKKLVDSTDKADLRLIYLALAHMIKFRGHFLIEGDLNPDNSDVDKLFIQLVQTYNQLFEENPINASGVDAKAILSARLSKSRRLENLIAQLPGEKKNGLFGNLIALSLGLTPNFKSNFDLAEDAKLQLSKDTYDDDLDNLLAQIGDQYADLFLAAKNLSDAILLSDILRVNTEITKAPLSASMIKRYDEHHQDLTLLKALVRQQLPEKYKEIFFDQSKNGYAGYIDGGASQEEFYKFIKPILEKMDGTEELLVKLNREDLLRKQRTFDNGSIPHQIHLGELHAILRRQEDFYPFLKDNREKIEKILTFRIPYYVGPLARGNSRFAWMTRKSEETITPWNFEEVVDKGASAQSFIERMTNFDKNLPNEKVLPKHSLLYEYFTVYNELTKVKYVTEGMRKPAFLSGEQKKAIVDLLFKTNRKVTVKQLKEDYFKKIECFDSVEISGVEDRFNASLGTYHDLLKIIKDKDFLDNEENEDILEDIVLTLTLFEDREMIEERLKTYAHLFDDKVMKQLKRRRYTGWGRLSRKLINGIRDKQSGKTILDFLKSDGFANRNFMQLIHDDSLTFKEDIQKAQVSGQGDSLHEHIANLAGSPAIKKGILQTVKVVDELVKVMGRHKPENIVIEMARENQTTQKGQKNSRERMKRIEEGIKELGSQILKEHPVENTQLQNEKLYLYYLQNGRDMYVDQELDINRLSDYDVDHIVPQSFLKDDSIDNKVLTRSDKARGKSDNVPSEEVVKKMKNYWRQLLNAKLITQRKFDNLTKAERGGLSELDKAGFIKRQLVETRQITKHVAQILDSRMNTKYDENDKLIREVKVITLKSKLVSDFRKDFQFYKVREINNYHHAHDAYLNAVVGTALIKKYPKLESEFVYGDYKVYDVRKMIAKSEQEIGKATAKYFFYSNIMNFFKTEITLANGEIRKRPLIETNGETGEIVWDKGRDFATVRKVLSMPQVNIVKKTEVQTGGFSKESILPKRNSDKLIARKKDWDPKKYGGFDSPTVAYSVLVVAKVEKGKSKKLKSVKELLGITIMERSSFEKNPIDFLEAKGYKEVKKDLIIKLPKYSLFELENGRKRMLASAGELQKGNELALPSKYVNFLYLASHYEKLKGSPEDNEQKQLFVEQHKHYLDEIIEQISEFSKRVILADANLDKVLSAYNKHRDKPIREQAENIIHLFTLTNLGAPAAFKYFDTTIDRKRYTSTKEVLDATLIHQSITGLYETRIDLSQLGGDGGGGSGGSGGSGGTLNLEDEYRLYETSAEPEVSPGSTWLSDFPQAWAETGGMGLAVRQAPLIIPLKATSTPVSIKQYPMSQEAKLGIKPHIQRLLDQGILVPCQSPWNTPLLPVKKPGTNDYRPVQDLREVNKRVEDIHPTVPNPYNLLSGLPPSHRWYTVLDLKDAFFCLRLHPTSQPLFAFEWRDPGMGISGQLTWTRLPQGFKNSPTLFNEALHRDLADFRIQHPDLILLQYVDDILLAATSELDCQQGTRALLLTLGNLGYRASAKKAQLCQKQVKYLGYLLKEGQRWLTEARKETVMGQPTPKTPRQLREFLGKAGFCRLFIPGFAEMAAPLYPLTKPGTLFNWGPDQQKAYQEIKQALLTAPALGLPDLTKPFELFVDEKQGYAKGVLTQKLGPWRRPVAYLSKKLDPVAAGWPPCLRMVAAIAVLRKDAGKLTMGQPLVILAPHAVEALVKQPPDRWLSNARMTHYQAMLLDTDRVQFGPVVALNPATLLPLPEEGAPHDCLEILAETHGTRPDLTDQPIPDADHTWYTDGSSFLQEGQRKAGAAVTTETEVIWARALPAGTSAQRAELIALTQALKMAEGKRLNVYTDSRYAFATAHIHGEIYRRRGWLTSEGREIKNKSEILALLKALFLPKRLSIIHCLGHQKGDSAEARGNRLADQAAREAAIKTPPDTSTLLAGKRTADGSEFEKRTADGSEFESPKKKAKVE

SEQ ID NO: 6034 - protein, 2094 aa, synthetic construct
MPAAKRVKLDGGDKKYSIGLDIGTNSVGWAVITDEYKVPSKKFKVLGNTDRHSIKKNLIGALLFDSGETAEATRLKRTARRRYTRRKNRICYLQEIFSNEMAKVDDSFFHRLEESFLVEEDKKHERHPIFGNIVDEVAYHEKYPTIYHLRKKLVDSTDKADLRLIYLALAHMIKFRGHFLIEGDLNPDNSDVDKLFIQLVQTYNQLFEENPINASGVDAKAILSARLSKSRRLENLIAQLPGEKKNGLFGNLIALSLGLTPNFKSNFDLAEDAKLQLSKDTYDDDLDNLLAQIGDQYADLFLAAKNLSDAILLSDILRVNTEITKAPLSASMIKRYDEHHQDLTLLKALVRQQLPEKYKEIFFDQSKNGYAGYIDGGASQEEFYKFIKPILEKMDGTEELLVKLNREDLLRKQRTFDNGSIPHQIHLGELHAILRRQEDFYPFLKDNREKIEKILTFRIPYYVGPLARGNSRFAWMTRKSEETITPWNFEEVVDKGASAQSFIERMTNFDKNLPNEKVLPKHSLLYEYFTVYNELTKVKYVTEGMRKPAFLSGEQKKAIVDLLFKTNRKVTVKQLKEDYFKKIECFDSVEISGVEDRFNASLGTYHDLLKIIKDKDFLDNEENEDILEDIVLTLTLFEDREMIEERLKTYAHLFDDKVMKQLKRRRYTGWGRLSRKLINGIRDKQSGKTILDFLKSDGFANRNFMQLIHDDSLTFKEDIQKAQVSGQGDSLHEHIANLAGSPAIKKGILQTVKVVDELVKVMGRHKPENIVIEMARENQTTQKGQKNSRERMKRIEEGIKELGSQILKEHPVENTQLQNEKLYLYYLQNGRDMYVDQELDINRLSDYDVDHIVPQSFLKDDSIDNKVLTRSDKARGKSDNVPSEEVVKKMKNYWRQLLNAKLITQRKFDNLTKAERGGLSELDKAGFIKRQLVETRQITKHVAQILDSRMNTKYDENDKLIREVKVITLKSKLVSDFRKDFQFYKVREINNYHHAHDAYLNAVVGTALIKKYPKLESEFVYGDYKVYDVRKMIAKSEQEIGKATAKYFFYSNIMNFFKTEITLANGEIRKRPLIETNGETGEIVWDKGRDFATVRKVLSMPQVNIVKKTEVQTGGFSKESILPKRNSDKLIARKKDWDPKKYGGFDSPTVAYSVLVVAKVEKGKSKKLKSVKELLGITIMERSSFEKNPIDFLEAKGYKEVKKDLIIKLPKYSLFELENGRKRMLASAGELQKGNELALPSKYVNFLYLASHYEKLKGSPEDNEQKQLFVEQHKHYLDEIIEQISEFSKRVILADANLDKVLSAYNKHRDKPIREQAENIIHLFTLTNLGAPAAFKYFDTTIDRKRYTSTKEVLDATLIHQSITGLYETRIDLSQLGGDGGGGSGGSGGSGGLGIEDEYRLHETSTEPDVSLGSTWLSDFPQAWAETGGMGLAVRQAPLIIPLKATSTPVSIQQYPMSHEARLGIKPHIQRLLDQGILVPCQSPWNTPLLPVKKPGTNDYRPVQDLREVNKRVEDIHPTVPNPYNLLSGLPPSHQWYTVLDLKDAFFCLRLHPTSQPLFAFEWRDPGMGISGQLTWTRLPQGFKNSPTLFNEALHRDLADFRIQHPDLILLQYVDDILLAATSELDCQQGTRALLQTLGDLGYRASAKKAQICQKQVKYLGYLLREGQRWLTEARKETVMGQPVPKTPRQLREFLGKAGFCRLFIPGFAEMAAPLYPLTKPGTLFSWGPDQQKAYQEIKQALLTAPALGLPDLTKPFELFVDEKQGYAKGVLTQKLGPWRRPVAYLSKKLDPVAAGWPPCLRMVAAIAVLTKDAGKLTMGQPLVILAPHAVEALVKQPPDRWLSNARMTHYQAMLLDTDRVQFGPVVALNPATLLPLPEEGAPHDCLEILAETHGTRPDLTDQPIPDADHTWYTDGSSFLQEGQRKAGAAVTTETEVIWAGALPAGTSAQRAELIALTQALKMAEGKRLNVYTDSRYAFATAHIHGEIYRRRGWLTSEGREIKNKSEILALLKALFLPKRLSIIHCLGHQKGDSAEARGNRLADQAAREAAIKTPPDTSTLLIAGKRTADGSEFEKRTADGSEFESPKKKAKVE

SEQ ID NO: 6035 - protein, 2094 aa, synthetic construct
MPAAKRVKLDGGDKKYSIGLDIGTNSVGWAVITDEYKVPSKKFKVLGNTDRHSIKKNLIGALLFDSGETAEATRLKRTARRRYTRRKNRICYLQEIFSNEMAKVDDSFFHRLEESFLVEEDKKHERHPIFGNIVDEVAYHEKYPTIYHLRKKLVDSTDKADLRLIYLALAHMIKFRGHFLIEGDLNPDNSDVDKLFIQLVQTYNQLFEENPINASGVDAKAILSARLSKSRRLENLIAQLPGEKKNGLFGNLIALSLGLTPNFKSNFDLAEDAKLQLSKDTYDDDLDNLLAQIGDQYADLFLAAKNLSDAILLSDILRVNTEITKAPLSASMIKRYDEHHQDLTLLKALVRQQLPEKYKEIFFDQSKNGYAGYIDGGASQEEFYKFIKPILEKMDGTEELLVKLNREDLLRKQRTFDNGSIPHQIHLGELHAILRRQEDFYPFLKDNREKIEKILTFRIPYYVGPLARGNSRFAWMTRKSEETITPWNFEEVVDKGASAQSFIERMTNFDKNLPNEKVLPKHSLLYEYFTVYNELTKVKYVTEGMRKPAFLSGEQKKAIVDLLFKTNRKVTVKQLKEDYFKKIECFDSVEISGVEDRFNASLGTYHDLLKIIKDKDFLDNEENEDILEDIVLTLTLFEDREMIEERLKTYAHLFDDKVMKQLKRRRYTGWGRLSRKLINGIRDKQSGKTILDFLKSDGFANRNFMQLIHDDSLTFKEDIQKAQVSGQGDSLHEHIANLAGSPAIKKGILQTVKVVDELVKVMGRHKPENIVIEMARENQTTQKGQKNSRERMKRIEEGIKELGSQILKEHPVENTQLQNEKLYLYYLQNGRDMYVDQELDINRLSDYDVDHIVPQSFLKDDSIDNKVLTRSDKARGKSDNVPSEEVVKKMKNYWRQLLNAKLITQRKFDNLTKAERGGLSELDKAGFIKRQLVETRQITKHVAQILDSRMNTKYDENDKLIREVKVITLKSKLVSDFRKDFQFYKVREINNYHHAHDAYLNAVVGTALIKKYPKLESEFVYGDYKVYDVRKMIAKSEQEIGKATAKYFFYSNIMNFFKTEITLANGEIRKRPLIETNGETGEIVWDKGRDFATVRKVLSMPQVNIVKKTEVQTGGFSKESILPKRNSDKLIARKKDWDPKKYGGFDSPTVAYSVLVVAKVEKGKSKKLKSVKELLGITIMERSSFEKNPIDFLEAKGYKEVKKDLIIKLPKYSLFELENGRKRMLASAGELQKGNELALPSKYVNFLYLASHYEKLKGSPEDNEQKQLFVEQHKHYLDEIIEQISEFSKRVILADANLDKVLSAYNKHRDKPIREQAENIIHLFTLTNLGAPAAFKYFDTTIDRKRYTSTKEVLDATLIHQSITGLYETRIDLSQLGGDGGGGSGGSGGSGGTLGIEDEYRLHETSTEPDVSLGSTWLSDFPQAWAETGGMGLAVRQAPLIIPLKATSTPVSIQQYPMSHEARLGIKPHIQRLLDQGILVPCQSPWNTPLLPVKKPGTNDYRPVQDLREVNKRVEDIHPTVPNPYNLLSGLPPSHQWYTVLDLKDAFFCLRLHPTSQPLFAFEWRDPGMGISGQLTWTRLPQGFKNSPTLFNEALHRDLADFRIQHPDLILLQYVDDILLAATSELDCQQGTRALLQTLGDLGYRASAKKAQICQKQVKYLGYLLREGQRWLTEARKETVMGQPVPKTPRQLREFLGTAGFCRLWIPGFAEMAAPLYPLTKPGTLFSWGPDQQKAYQEIKQALLTAPALGLPDLTKPFELFVDEKQGYAKGVLTQKLGPWRRPVAYLSKKLDPVAAGWPPCLRMVAAIAVLTKDAGKLTMGQPLVILAPHAVEALVKQPPDRWLSNARMTHYQAMLLDTDRVQFGPVVALNPATLLPLPEEGAPHDCLEILAETHGTRPDLTDQPIPDADHTWYTDGSSFLQEGQRKAGAAVTTETEVIWAGALPAGTSAQRAELIALTQALKMAEGKRLNVYTDSRYAFATAHIHGEIYRRRGWLTSEGREIKNKSEILALLKALFLPKRLSIIHCLGHQKGDSAEARGNRLADQAAREAAIKTPPDTSTLLAGKRTADGSEFEKRTADGSEFESPKKKAKVE

SEQ ID NO: 6036 - protein, 2094 aa, synthetic construct; identical to SEQ ID NO: 6034

SEQ ID NO: 6037 - protein, 2094 aa, synthetic construct
MPAAKRVKLDGGDKKYSIGLDIGTNSVGWAVITDEYKVPSKKFKVLGNTDRHSIKKNLIGALLFDSGETAEATRLKRTARRRYTRRKNRICYLQEIFSNEMAKVDDSFFHRLEESFLVEEDKKHERHPIFGNIVDEVAYHEKYPTIYHLRKKLVDSTDKADLRLIYLALAHMIKFRGHFLIEGDLNPDNSDVDKLFIQLVQTYNQLFEENPINASGVDAKAILSARLSKSRRLENLIAQLPGEKKNGLFGNLIALSLGLTPNFKSNFDLAEDAKLQLSKDTYDDDLDNLLAQIGDQYADLFLAAKNLSDAILLSDILRVNTEITKAPLSASMIKRYDEHHQDLTLLKALVRQQLPEKYKEIFFDQSKNGYAGYIDGGASQEEFYKFIKPILEKMDGTEELLVKLNREDLLRKQRTFDNGSIPHQIHLGELHAILRRQEDFYPFLKDNREKIEKILTFRIPYYVGPLARGNSRFAWMTRKSEETITPWNFEEVVDKGASAQSFIERMTNFDKNLPNEKVLPKHSLLYEYFTVYNELTKVKYVTEGMRKPAFLSGEQKKAIVDLLFKTNRKVTVKQLKEDYFKKIECFDSVEISGVEDRFNASLGTYHDLLKIIKDKDFLDNEENEDILEDIVLTLTLFEDREMIEERLKTYAHLFDDKVMKQLKRRRYTGWGRLSRKLINGIRDKQSGKTILDFLKSDGFANRNFMQLIHDDSLTFKEDIQKAQVSGQGDSLHEHIANLAGSPAIKKGILQTVKVVDELVKVMGRHKPENIVIEMARENQTTQKGQKNSRERMKRIEEGIKELGSQILKEHPVENTQLQNEKLYLYYLQNGRDMYVDQELDINRLSDYDVDHIVPQSFLKDDSIDNKVLTRSDKARGKSDNVPSEEVVKKMKNYWRQLLNAKLITQRKFDNLTKAERGGLSELDKAGFIKRQLVETRQITKHVAQILDSRMNTKYDENDKLIREVKVITLKSKLVSDFRKDFQFYKVREINNYHHAHDAYLNAVVGTALIKKYPKLESEFVYGDYKVYDVRKMIAKSEQEIGKATAKYFFYSNIMNFFKTEITLANGEIRKRPLIETNGETGEIVWDKGRDFATVRKVLSMPQVNIVKKTEVQTGGFSKESILPKRNSDKLIARKKDWDPKKYGGFDSPTVAYSVLVVAKVEKGKSKKLKSVKELLGITIMERSSFEKNPIDFLEAKGYKEVKKDLIIKLPKYSLFELENGRKRMLASAGELQKGNELALPSKYVNFLYLASHYEKLKGSPEDNEQKQLFVEQHKHYLDEIIEQISEFSKRVILADANLDKVLSAYNKHRDKPIREQAENIIHLFTLTNLGAPAAFKYFDTTIDRKRYTSTKEVLDATLIHQSITGLYETRIDLSQLGGDGGGGSGGSGGSGGTLGIEDEYRLHETSTEPDVSLGSTWLSDFPQAWAETGGMGLAVRQAPLIIPLKATSTPVSIQQYPMSHEARLGIKPHIQRLLDQGILVPCQSPWNTPLLPVKKPGTNDYRPVQDLREVNKRVEDIHPTVPNPYNLLSGLPPSHQWYTVLDLKDAFFCLRLHPTSQPLFAFEWRDPGMGISGQLTWTRLPQGFKNSPTLFDEALHRDLADFRIQHPDLILLQYVDDILLAATSELDCQQGTRALLQTLGDLGYRASAKKAQICQKQVKYLGYLLREGQRWLTEARKETVMGQPVPKTPRQLREFLGTAGFCRLWIPGFAEMAAPLYPLTKTGTLFSWGPDQQKAYQEIKQALLTAPALGLPDLTKPFELFVDEKQGYAKGVLTQKLGPWRRPVAYLSKKLDPVAAGWPPCLRMVAAIAVLTKDAGKLTMGQPLVILAPHAVEALVKQPPDRWLSNARMTHYQAMLLDTDRVQFGPVVALNPATLLPLPEEGAPHDCLEILAETHGTRPDLTDQPIPDADHTWYTDGSSFLQEGQRKAGAAVTTETEVIWAGALPAGTSAQRAELIALTQALKMAEGKRLNVYTDSRYAFATAHIHGEIYRRRGLLTSEGREIKNKSEILALLKALFLPKRLSIIHCLGHQKGDSAEARGNRLADQAAREAAIKTPPDTSTLLAGKRTADGSEFEKRTADGSEFESPKKKAKVE

SEQ ID NO: 6038 - protein, 2094 aa, synthetic construct; identical to SEQ ID NO: 6035

SEQ ID NO: 6039 - protein, 2094 aa, synthetic construct
MPAAKRVKLDGGDKKYSIGLDIGTNSVGWAVITDEYKVPSKKFKVLGNTDRHSIKKNLIGALLFDSGETAEATRLKRTARRRYTRRKNRICYLQEIFSNEMAKVDDSFFHRLEESFLVEEDKKHERHPIFGNIVDEVAYHEKYPTIYHLRKKLVDSTDKADLRLIYLALAHMIKFRGHFLIEGDLNPDNSDVDKLFIQLVQTYNQLFEENPINASGVDAKAILSARLSKSRRLENLIAQLPGEKKNGLFGNLIALSLGLTPNFKSNFDLAEDAKLQLSKDTYDDDLDNLLAQIGDQYADLFLAAKNLSDAILLSDILRVNTEITKAPLSASMIKRYDEHHQDLTLLKALVRQQLPEKYKEIFFDQSKNGYAGYIDGGASQEEFYKFIKPILEKMDGTEELLVKLNREDLLRKQRTFDNGSIPHQIHLGELHAILRRQEDFYPFLKDNREKIEKILTFRIPYYVGPLARGNSRFAWMTRKSEETITPWNFEEVVDKGASAQSFIERMTNFDKNLPNEKVLPKHSLLYEYFTVYNELTKVKYVTEGMRKPAFLSGEQKKAIVDLLFKTNRKVTVKQLKEDYFKKIECFDSVEISGVEDRFNASLGTYHDLLKIIKDKDFLDNEENEDILEDIVLTLTLFEDREMIEERLKTYAHLFDDKVMKQLKRRRYTGWGRLSRKLINGIRDKQSGKTILDFLKSDGFANRNFMQLIHDDSLTFKEDIQKAQVSGQGDSLHEHIANLAGSPAIKKGILQTVKVVDELVKVMGRHKPENIVIEMARENQTTQKGQKNSRERMKRIEEGIKELGSQILKEHPVENTQLQNEKLYLYYLQNGRDMYVDQELDINRLSDYDVDHIVPQSFLKDDSIDNKVLTRSDKARGKSDNVPSEEVVKKMKNYWRQLLNAKLITQRKFDNLTKAERGGLSELDKAGFIKRQLVETRQITKHVAQILDSRMNTKYDENDKLIREVKVITLKSKLVSDFRKDFQFYKVREINNYHHAHDAYLNAVVGTALIKKYPKLESEFVYGDYKVYDVRKMIAKSEQEIGKATAKYFFYSNIMNFFKTEITLANGEIRKRPLIETNGETGEIVWDKGRDFATVRKVLSMPQVNIVKKTEVQTGGFSKESILPKRNSDKLIARKKDWDPKKYGGFDSPTVAYSVLVVAKVEKGKSKKLKSVKELLGITIMERSSFEKNPIDFLEAKGYKEVKKDLIIKLPKYSLFELENGRKRMLASAGELQKGNELALPSKYVNFLYLASHYEKLKGSPEDNEQKQLFVEQHKHYLDEIIEQISEFSKRVILADANLDKVLSAYNKHRDKPIREQAENIIHLFTLTNLGAPAAFKYFDTTIDRKRYTSTKEVLDATLIHQSITGLYETRIDLSQLGGDGGGGSGGSGGSGGTLNIEDEYRLHETSKGPDVPLGSTWLSDFPQAWAETGGMGLAFRQAPLIISLKATSTPVSIKQYPMSQEARLGIKPHIQRLLDQGILVPCQSPWNTPLLPVKKPGTNDYRPVQDLREVNKRVEDIHPTVPNPYNLLSGLPPSHQWYTVLDLKDAFFCLRLHPTSQSLFAFEWKDPEMGISGQLTWTRLPQGFKNSPTLFNEALHRDLADFRIQHPDLILLQYVDDLLLAATSELDCQQGTRALLQTLGDLGYRASAKKAQICQKQVKYLGYLLKEGQRWLTEARKETVMGQPTPKTPRQLREFLGKAGLCRLFIPGFAEMAAPLYPLTKPGTLFKWGPDQQKAYQEIKQALLTAPALGLPDLTKPFELFVDEKQGYAKGVLTQKLGPWRRPVAYLSKKLDPVAAGWPPCLRMVAAIAVLTKDVGKLTMGQPLVILAPHAVEALVKQPPDRWLSNARMTHYQALLLDTDRVQFGPIVALNPATLLPLPEEGLQHDCLDILAEAHGTRPDLTDQPLPDADHTWYTDGSSFLQEGQRRAGAAVTTETEVIWAKALPAGTSAQRAELIALTQALKMAAGKKLNVYTDSRYAFATAHIHGEIYRRRGWLTSEGKEIKNKDEILALLKALFLPKRLSIIHCPGHQKGNHAEARGNRMADQAAREVATRETPETSTLLAGKRTADGSEFEKRTADGSEFESPKKKAKVE

SEQ ID NO: 6040 - protein, 2094 aa, synthetic construct
MPAAKRVKLDGGDKKYSIGLDIGTNSVGWAVITDEYKVPSKKFKVLGNTDRHSIKKNLIGALLFDSGETAEATRLKRTARRRYTRRKNRICYLQEIFSNEMAKVDDSFFHRLEESFLVEEDKKHERHPIFGNIVDEVAYHEKYPTIYHLRKKLVDSTDKADLRLIYLALAHMIKFRGHFLIEGDLNPDNSDVDKLFIQLVQTYNQLFEENPINASGVDAKAILSARLSKSRRLENLIAQLPGEKKNGLFGNLIALSLGLTPNFKSNFDLAEDAKLQLSKDTYDDDLDNLLAQIGDQYADLFLAAKNLSDAILLSDILRVNTEITKAPLSASMIKRYDEHHQDLTLLKALVRQQLPEKYKEIFFDQSKNGYAGYIDGGASQEEFYKFIKPILEKMDGTEELLVKLNREDLLRKQRTFDNGSIPHQIHLGELHAILRRQEDFYPFLKDNREKIEKILTFRIPYYVGPLARGNSRFAWMTRKSEETITPWNFEEVVDKGASAQSFIERMTNFDKNLPNEKVLPKHSLLYEYFTVYNELTKVKYVTEGMRKPAFLSGEQKKAIVDLLFKTNRKVTVKQLKEDYFKKIECFDSVEISGVEDRFNASLGTYHDLLKIIKDKDFLDNEENEDILEDIVLTLTLFEDREMIEERLKTYAHLFDDKVMKQLKRRRYTGWGRLSRKLINGIRDKQSGKTILDFLKSDGFANRNFMQLIHDDSLTFKEDIQKAQVSGQGDSLHEHIANLAGSPAIKKGILQTVKVVDELVKVMGRHKPENIVIEMARENQTTQKGQKNSRERMKRIEEGIKELGSQILKEHPVENTQLQNEKLYLYYLQNGRDMYVDQELDINRLSDYDVDHIVPQSFLKDDSIDNKVLTRSDKARGKSDNVPSEEVVKKMKNYWRQLLNAKLITQRKFDNLTKAERGGLSELDKAGFIKRQLVETRQITKHVAQILDSRMNTKYDENDKLIREVKVITLKSKLVSDFRKDFQFYKVREINNYHHAHDAYLNAVVGTALIKKYPKLESEFVYGDYKVYDVRKMIAKSEQEIGKATAKYFFYSNIMNFFKTEITLANGEIRKRPLIETNGETGEIVWDKGRDFATVRKVLSMPQVNIVKKTEVQTGGFSKESILPKRNSDKLIARKKDWDPKKYGGFDSPTVAYSVLVVAKVEKGKSKKLKSVKELLGITIMERSSFEKNPIDFLEAKGYKEVKKDLIIKLPKYSLFELENGRKRMLASAGELQKGNELALPSKYVNFLYLASHYEKLKGSPEDNEQKQLFVEQHKHYLDEIIEQISEFSKRVILADANLDKVLSAYNKHRDKPIREQAENIIHLFTLTNLGAPAAFKYFDTTIDRKRYTSTKEVLDATLIHQSITGLYETRIDLSQLGGDGGGGSGGSGGSGGTLNIEDEYRLHETSKGPDVPLGSTWLSDFPQAWAETGGMGLAVRQAPLIIPLKATSTPVSIKQYPMSQEARLGIKPHIQRLLDQGILVPCQSPWNTPLLPVKKPGTNDYRPVQDLREVNKRVEDIHPTVPNPYNLLSGLPPSHQWYTVLDLKDAFFCLRLHPTSQSLFAFEWRDPEMGISGQLTWTRLPQGFKNSPTLFDEALHRDLADFRIQHPDLILLQYVDDLLLAATSELDCQQGTRALLQTLGDLGYRASAKKAQICQKQVKYLGYLLKEGQRWLTEARKETVMGQPTPKTPRQLREFLGTAGFCRLWIPGFAEMAAPLYPLTKTGTLFEWGPDQQKAYQEIKQALLTAPALGLPDLTKPFELFVDEKQGYAKGVLTQKLGPWRRPVAYLSKKLDPVAAGWPPCLRMVAAIAVLTKDAGKLTMGQPLVILAPHAVEALVKQPPDRWLSNARMTHYQALLLDTDRVQFGPIVALNPATLLPLPEEGLQHDCLDILAEAHGTRPDLTDQPLPDADHTWYTDGSSFLQEGQRKAGAAVTTETEVVWAKALPAGTSAQRAELIALTQALKMAEGKKLNVYTDSRYAFATAHIHGEIYRRRGLLTSEGKEIKNKDEILALLKALFLPKRLSIIHCPGHQKGNRAEARGNRMADQAAREVATRETPETSTLLAGKRTADGSEFEKRTADGSEFESPKKKAKVE

SEQ ID NO: 6041 - protein, 2094 aa, synthetic construct
MPAAKRVKLDGGDKKYSIGLDIGTNSVGWAVITDEYKVPSKKFKVLGNTDRHSIKKNLIGALLFDSGETAEATRLKRTARRRYTRRKNRICYLQEIFSNEMAKVDDSFFHRLEESFLVEEDKKHERHPIFGNIVDEVAYHEKYPTIYHLRKKLVDSTDKADLRLIYLALAHMIKFRGHFLIEGDLNPDNSDVDKLFIQLVQTYNQLFEENPINASGVDAKAILSARLSKSRRLENLIAQLPGEKKNGLFGNLIALSLGLTPNFKSNFDLAEDAKLQLSKDTYDDDLDNLLAQIGDQYADLFLAAKNLSDAILLSDILRVNTEITKAPLSASMIKRYDEHHQDLTLLKALVRQQLPEKYKEIFFDQSKNGYAGYIDGGASQEEFYKFIKPILEKMDGTEELLVKLNREDLLRKQRTFDNGSIPHQIHLGELHAILRRQEDFYPFLKDNREKIEKILTFRIPYYVGPLARGNSRFAWMTRKSEETITPWNFEEVVDKGASAQSFIERMTNFDKNLPNEKVLPKHSLLYEYFTVYNELTKVKYVTEGMRKPAFLSGEQKKAIVDLLFKTNRKVTVKQLKEDYFKKIECFDSVEISGVEDRFNASLGTYHDLLKIIKDKDFLDNEENEDILEDIVLTLTLFEDREMIEERLKTYAHLFDDKVMKQLKRRRYTGWGRLSRKLINGIRDKQSGKTILDFLKSDGFANRNFMQLIHDDSLTFKEDIQKAQVSGQGDSLHEHIANLAGSPAIKKGILQTVKVVDELVKVMGRHKPENIVIEMARENQTTQKGQKNSRERMKRIEEGIKELGSQILKEHPVENTQLQNEKLYLYYLQNGRDMYVDQELDINRLSDYDVDHIVPQSFLKDDSIDNKVLTRSDKARGKSDNVPSEEVVKKMKNYWRQLLNAKLITQRKFDNLTKAERGGLSELDKAGFIKRQLVETRQITKHVAQILDSRMNTKYDENDKLIREVKVITLKSKLVSDFRKDFQFYKVREINNYHHAHDAYLNAVVGTALIKKYPKLESEFVYGDYKVYDVRKMIAKSEQEIGKATAKYFFYSNIMNFFKTEITLANGEIRKRPLIETNGETGEIVWDKGRDFATVRKVLSMPQVNIVKKTEVQTGGFSKESILPKRNSDKLIARKKDWDPKKYGGFDSPTVAYSVLVVAKVEKGKSKKLKSVKELLGITIMERSSFEKNPIDFLEAKGYKEVKKDLIIKLPKYSLFELENGRKRMLASAGELQKGNELALPSKYVNFLYLASHYEKLKGSPEDNEQKQLFVEQHKHYLDEIIEQISEFSKRVILADANLDKVLSAYNKHRDKPIREQAENIIHLFTLTNLGAPAAFKYFDTTIDRKRYTSTKEVLDATLIHQSITGLYETRIDLSQLGGDGGGGSGGSGGSGGTLNIEDEHRLHETSKEPDVSLGSTWLSDFPQAWAETGGMGLAVRQAPLIIPLKATSTPVSIKQYPMSQEARLGIKPHIQRLLDQGILVPCQSPWNTPLLPVKKPGTNDYRPVQDLREVNKRVEDIHPTVPNPYNLLSGLPPSHQWYTVLDLKDAFFCLRLHPTSQPLFAFEWRDPEMGISGQLTWTRLPQGFKNSPTLFNEALHRDLADFRIQHPDLILLQYVDDLLLAATSELDCQQGTRALLQTLGNLGYRASAKKAQICQKQVKYLGYLLKEGQRWLTEARKETVMGQPTPKTPRQLREFLGTAGFCRLWIPGFAEMAAPLYPLTKPGTLFNWGPDQQKAYQEIKQALLTAPALGLPDLTKPFELFVDEKQGYAKGVLTQKLGPWRRPVAYLSKKLDPVAAGWPPCLRMVAAIAVLTKDAGKLTMGQPLVILAPHAVEALVKQPPDRWLSNARMTHYQALLLDTDRVQFGPVVALNPATLLPLPEEGLQHNCLDILAEAHGTRPDLTDQPLPDADHTWYTDGSSLLQEGQRKAGAAVTTETEVIWAKALPAGTSAQRAELIALTQALKMAEGKKLNVYTDSRYAFATAHIHGEIYRRRGWLTSEGKEIKNKDEILALLKALFLPKRLSIIHCPGHQKGHSAEARGNRMADQAARKAAITETPDTSTLLAGKRTADGSEFEKRTADGSEFESPKKKAKVE

SEQ ID NO: 6042 - protein, 2094 aa, synthetic construct
MPAAKRVKLDGGDKKYSIGLDIGTNSVGWAVITDEYKVPSKKFKVLGNTDRHSIKKNLIGALLFDSGETAEATRLKRTARRRYTRRKNRICYLQEIFSNEMAKVDDSFFHRLEESFLVEEDKKHERHPIFGNIVDEVAYHEKYPTIYHLRKKLVDSTDKADLRLIYLALAHMIKFRGHFLIEGDLNPDNSDVDKLFIQLVQTYNQLFEENPINASGVDAKAILSARLSKSRRLENLIAQLPGEKKNGLFGNLIALSLGLTPNFKSNFDLAEDAKLQLSKDTYDDDLDNLLAQIGDQYADLFLAAKNLSDAILLSDILRVNTEITKAPLSASMIKRYDEHHQDLTLLKALVRQQLPEKYKEIFFDQSKNGYAGYIDGGASQEEFYKFIKPILEKMDGTEELLVKLNREDLLRKQRTFDNGSIPHQIHLGELHAILRRQEDFYPFLKDNREKIEKILTFRIPYYVGPLARGNSRFAWMTRKSEETITPWNFEEVVDKGASAQSFIERMTNFDKNLPNEKVLPKHSLLYEYFTVYNELTKVKYVTEGMRKPAFLSGEQKKAIVDLLFKTNRKVTVKQLKEDYFKKIECFDSVEISGVEDRFNASLGTYHDLLKIIKDKDFLDNEENEDILEDIVLTLTLFEDREMIEERLKTYAHLFDDKVMKQLKRRRYTGWGRLSRKLINGIRDKQSGKTILDFLKSDGFANRNFMQLIHDDSLTFKEDIQKAQVSGQGDSLHEHIANLAGSPAIKKGILQTVKVVDELVKVMGRHKPENIVIEMARENQTTQKGQKNSRERMKRIEEGIKELGSQILKEHPVENTQLQNEKLYLYYLQNGRDMYVDQELDINRLSDYDVDHIVPQSFLKDDSIDNKVLTRSDKARGKSDNVPSEEVVKKMKNYWRQLLNAKLITQRKFDNLTKAERGGLSELDKAGFIKRQLVETRQITKHVAQILDSRMNTKYDENDKLIREVKVITLKSKLVSDFRKDFQFYKVREINNYHHAHDAYLNAVVGTALIKKYPKLESEFVYGDYKVYDVRKMIAKSEQEIGKATAKYFFYSNIMNFFKTEITLANGEIRKRPLIETNGETGEIVWDKGRDFATVRKVLSMPQVNIVKKTEVQTGGFSKESILPKRNSDKLIARKKDWDPKKYGGFDSPTVAYSVLVVAKVEKGKSKKLKSVKELLGITIMERSSFEKNPIDFLEAKGYKEVKKDLIIKLPKYSLFELENGRKRMLASAGELQKGNELALPSKYVNFLYLASHYEKLKGSPEDNEQKQLFVEQHKHYLDEIIEQISEFSKRVILADANLDKVLSAYNKHRDKPIREQAENIIHLFTLTNLGAPAAFKYFDTTIDRKRYTSTKEVLDATLIHQSITGLYETRIDLSQLGGDGGGGSGGSGGSGGTLNIEDEHRLHETSKEPDVSLGSTWLSDFPQAWAETGGMGLAVRQAPLIIPLKATSTPVSIKQYPMSQEARLGIKPHIQRLLDQGILVPCQSPWNTPLLPVKKPGTNDYRPVQDLREVNKRVEDIHPTVPNPYNLLSGLPPSHQWYTVLDLKDAFFCLRLHPTSQPLFAFEWRDPEMGISGQLTWTRLPQGFKNSPTLFDEALHRDLADFRIQHPDLILLQYVDDLLLAATSELDCQQGTRALLQTLGNLGYRASAKKAQICQKQVKYLGYLLKEGQRWLTEARKETVMGQPTPKTPRQLREFLGTAGFCRLWIPGFAEMAAPLYPLTKTGTLFNWGPDQQKAYQEIKQALLTAPALGLPDLTKPFELFVDEKQGYAKGVLTQKLGPWRRPVAYLSKKLDPVAAGWPPCLRMVAAIAVLTKDAGKLTMGQPLVILAPHAVEALVKQPPDRWLSNARMTHYQALLLDTDRVQFGPVVALNPATLLPLPEEGLQHNCLDILAEAHGTRPDLTDQPLPDADHTWYTDGSSLLQEGQRKAGAAVTTETEVIWAKALPAGTSAQRAELIALTQALKMAEGKKLNVYTDSRYAFATAHIHGEIYRRRGLLTSEGKEIKNKDEILALLKALFLPKRLSIIHCPGHQKGHSAEARGNRMADQAARKAAITETPDTSTLLAGKRTADGSEFEKRTADGSEFESPKKKAKVE

SEQ ID NO: 6043 - protein, 2094 aa, synthetic construct; identical to SEQ ID NO: 6041

SEQ ID NO: 6044 - protein, 2092 aa, synthetic construct
MPAAKRVKLDGGDKKYSIGLDIGTNSVGWAVITDEYKVPSKKFKVLGNTDRHSIKKNLIGALLFDSGETAEATRLKRTARRRYTRRKNRICYLQEIFSNEMAKVDDSFFHRLEESFLVEEDKKHERHPIFGNIVDEVAYHEKYPTIYHLRKKLVDSTDKADLRLIYLALAHMIKFRGHFLIEGDLNPDNSDVDKLFIQLVQTYNQLFEENPINASGVDAKAILSARLSKSRRLENLIAQLPGEKKNGLFGNLIALSLGLTPNFKSNFDLAEDAKLQLSKDTYDDDLDNLLAQIGDQYADLFLAAKNLSDAILLSDILRVNTEITKAPLSASMIKRYDEHHQDLTLLKALVRQQLPEKYKEIFFDQSKNGYAGYIDGGASQEEFYKFIKPILEKMDGTEELLVKLNREDLLRKQRTFDNGSIPHQIHLGELHAILRRQEDFYPFLKDNREKIEKILTFRIPYYVGPLARGNSRFAWMTRKSEETITPWNFEEVVDKGASAQSFIERMTNFDKNLPNEKVLPKHSLLYEYFTVYNELTKVKYVTEGMRKPAFLSGEQKKAIVDLLFKTNRKVTVKQLKEDYFKKIECFDSVEISGVEDRFNASLGTYHDLLKIIKDKDFLDNEENEDILEDIVLTLTLFEDREMIEERLKTYAHLFDDKVMKQLKRRRYTGWGRLSRKLINGIRDKQSGKTILDFLKSDGFANRNFMQLIHDDSLTFKEDIQKAQVSGQGDSLHEHIANLAGSPAIKKGILQTVKVVDELVKVMGRHKPENIVIEMARENQTTQKGQKNSRERMKRIEEGIKELGSQILKEHPVENTQLQNEKLYLYYLQNGRDMYVDQELDINRLSDYDVDHIVPQSFLKDDSIDNKVLTRSDKARGKSDNVPSEEVVKKMKNYWRQLLNAKLITQRKFDNLTKAERGGLSELDKAGFIKRQLVETRQITKHVAQILDSRMNTKYDENDKLIREVKVITLKSKLVSDFRKDFQFYKVREINNYHHAHDAYLNAVVGTALIKKYPKLESEFVYGDYKVYDVRKMIAKSEQEIGKATAKYFFYSNIMNFFKTEITLANGEIRKRPLIETNGETGEIVWDKGRDFATVRKVLSMPQVNIVKKTEVQTGGFSKESILPKRNSDKLIARKKDWDPKKYGGFDSPTVAYSVLVVAKVEKGKSKKLKSVKELLGITIMERSSFEKNPIDFLEAKGYKEVKKDLIIKLPKYSLFELENGRKRMLASAGELQKGNELALPSKYVNFLYLASHYEKLKGSPEDNEQKQLFVEQHKHYLDEIIEQISEFSKRVILADANLDKVLSAYNKHRDKPIREQAENIIHLFTLTNLGAPAAFKYFDTTIDRKRYTSTKEVLDATLIHQSITGLYETRIDLSQLGGDGGGGSGGSGGSGGVLNLEEEYRLHEKPVPSSIDPSWLQLFPTVWAERAGMGLANQVPPVVVELRSGASPVAVRQYPMSKEAREGIRPHIQRFLDLGVLVPCQSPWNTPLLPVKKPGTNDYRPVQDLREINKRVQDIHPTVPNPYNLLSSLPPSHTWYSVLDLKDAFFCLKLHPNSQPLFAFEWRDPEKGNTGQLTWTRLPQGFKNSPTLFDEALHRDLAPFRALNPQVVLLQYVDDLLVAAPTYRDCKEGTQKLLQELSKLGYRVSAKKAQLCQKEVTYLGYLLKEGKRWLTPARKATVMKIPPPTTPRQVREFLGTAGFCRLWIPGFASLAAPLYPLTKESIPFIWTEEHQKAFDRIKEALLSAPALALPDLTKPFTLYVDERAGVARGVLTQTLGPWRRPVAYLSKKLDPVASGWPTCLKAVAAVALLLKDADKLTLGQNVTVIASHSLESIVRQPPDRWMTNARMTHYQSLLLNERVSFAPPAVLNPATLLPVESEATPVHRCSEILAEETGTRRDLKDQPLPGVPAWYTDGSSFIAEGKRRAGAAIVDGKRTVWASSLPEGTSAQKAELVALTQALRLAEGKDINIYTDSRYAFATAHIHGAIYKQRGLLTSAGKDIKNKEEILALLEAIHLPKRVAIIHCPGHQKGNDPVATGNRRADEAAKQAALSTRVLAETTKPAGKRTADGSEFEKRTADGSEFESPKKKAKVE

SEQ ID NO: 6045 - protein, 2099 aa, synthetic construct
MPAAKRVKLDGGDKKYSIGLDIGTNSVGWAVITDEYKVPSKKFKVLGNTDRHSIKKNLIGALLFDSGETAEATRLKRTARRRYTRRKNRICYLQEIFSNEMAKVDDSFFHRLEESFLVEEDKKHERHPIFGNIVDEVAYHEKYPTIYHLRKKLVDSTDKADLRLIYLALAHMIKFRGHFLIEGDLNPDNSDVDKLFIQLVQTYNQLFEENPINASGVDAKAILSARLSKSRRLENLIAQLPGEKKNGLFGNLIALSLGLTPNFKSNFDLAEDAKLQLSKDTYDDDLDNLLAQIGDQYADLFLAAKNLSDAILLSDILRVNTEITKAPLSASMIKRYDEHHQDLTLLKALVRQQLPEKYKEIFFDQSKNGYAGYIDGGASQEEFYKFIKPILEKMDGTEELLVKLNREDLLRKQRTFDNGSIPHQIHLGELHAILRRQEDFYPFLKDNREKIEKILTFRIPYYVGPLARGNSRFAWMTRKSEETITPWNFEEVVDKGASAQSFIERMTNFDKNLPNEKVLPKHSLLYEYFTVYNELTKVKYVTEGMRKPAFLSGEQKKAIVDLLFKTNRKVTVKQLKEDYFKKIECFDSVEISGVEDRFNASLGTYHDLLKIIKDKDFLDNEENEDILEDIVLTLTLFEDREMIEERLKTYAHLFDDKVMKQLKRRRYTGWGRLSRKLINGIRDKQSGKTILDFLKSDGFANRNFMQLIHDDSLTFKEDIQKAQVSGQGDSLHEHIANLAGSPAIKKGILQTVKVVDELVKVMGRHKPENIVIEMARENQTTQKGQKNSRERMKRIEEGIKELGSQILKEHPVENTQLQNEKLYLYYLQNGRDMYVDQELDINRLSDYDVDHIVPQSFLKDDSIDNKVLTRSDKARGKSDNVPSEEVVKKMKNYWRQLLNAKLITQRKFDNLTKAERGGLSELDKAGFIKRQLVETRQITKHVAQILDSRMNTKYDENDKLIREVKVITLKSKLVSDFRKDFQFYKVREINNYHHAHDAYLNAVVGTALIKKYPKLESEFVYGDYKVYDVRKMIAKSEQEIGKATAKYFFYSNIMNFFKTEITLANGEIRKRPLIETNGETGEIVWDKGRDFATVRKVLSMPQVNIVKKTEVQTGGFSKESILPKRNSDKLIARKKDWDPKKYGGFDSPTVAYSVLVVAKVEKGKSKKLKSVKELLGITIMERSSFEKNPIDFLEAKGYKEVKKDLIIKLPKYSLFELENGRKRMLASAGELQKGNELALPSKYVNFLYLASHYEKLKGSPEDNEQKQLFVEQHKHYLDEIIEQISEFSKRVILADANLDKVLSAYNKHRDKPIREQAENIIHLFTLTNLGAPAAFKYFDTTIDRKRYTSTKEVLDATLIHQSITGLYETRIDLSQLGGDGGGGSGGSGGSGGSGGTAPLEEEYRLFLEAPIQNVTLLEQWKREIPKVWAEINPPGLASTQAPIHVQLLSTALPVRVRQYPITLEAKRSLRETIRKFRAAGILRPVHSPWNTPLLPVRKSGTSEYRMVQDLREVNKRVETIHPTVPNPYTLLSLLPPDRIWYSVLDLKDAFFCIPLAPESQLIFAFEWADAEEGESGQLTWTRLPQGFKNSPTLFNEALNRDLQGFRLDHPSVSLLQYVDDLLIAADTQAACLSATRDLLMTLAELGYRVSGKKAQLCQEEVTYLGFKIHKGSRSLSNSRTQAILQIPVPKTKRQVREFLGTIGYCRLWIPGFAELAQPLYAATRPGNDPLVWGEKEEEAFQSLKLALTQPPALALPSLDKPFQLFVEETSGAAKGVLTQALGPWKRPVAYLSKRLDPVAAGWPRCLRAIAAAALLTREASKLTFGQDIEITSSHNLESLLRSPPDKWLTNARITQYQVLLLDPPRVRFKQTAALNPATLLPETDDTLPIHHCLDTLDSLTSTRPDLTDQPLAQAEATLFTDGSSYIRDGKRYAGAAVVTLDSVIWAEPLPIGTSAQKAELIALTKALEWSKDKSVNIYTDSRYAFATLHVHGMIYRERGWLTAGGKAIKNAPEILALLTAVWLPKRVAVMHCKGHQKDDAPTSTGNRRADEVAREVAIRPLSTQATISAGKRTADGSEFEKRTADGSEFESPKKKAKVE

SEQ ID NO: 6046 - protein, 2103 aa, synthetic construct
MPAAKRVKLDGGDKKYSIGLDIGTNSVGWAVITDEYKVPSKKFKVLGNTDRHSIKKNLIGALLFDSGETAEATRLKRTARRRYTRRKNRICYLQEIFSNEMAKVDDSFFHRLEESFLVEEDKKHERHPIFGNIVDEVAYHEKYPTIYHLRKKLVDSTDKADLRLIYLALAHMIKFRGHFLIEGDLNPDNSDVDKLFIQLVQTYNQLFEENPINASGVDAKAILSARLSKSRRLENLIAQLPGEKKNGLFGNLIALSLGLTPNFKSNFDLAEDAKLQLSKDTYDDDLDNLLAQIGDQYADLFLAAKNLSDAILLSDILRVNTEITKAPLSASMIKRYDEHHQDLTLLKALVRQQLPEKYKEIFFDQSKNGYAGYIDGGASQEEFYKFIKPILEKMDGTEELLVKLNREDLLRKQRTFDNGSIPHQIHLGELHAILRRQEDFYPFLKDNREKIEKILTFRIPYYVGPLARGNSRFAWMTRKSEETITPWNFEEVVDKGASAQSFIERMTNFDKNLPNEKVLPKHSLLYEYFTVYNELTKVKYVTEGMRKPAFLSGEQKKAIVDLLFKTNRKVTVKQLKEDYFKKIECFDSVEISGVEDRFNASLGTYHDLLKIIKDKDFLDNEENEDILEDIVLTLTLFEDREMIEERLKTYAHLFDDKVMKQLKRRRYTGWGRLSRKLINGIRDKQSGKTILDFLKSDGFANRNFMQLIHDDSLTFKEDIQKAQVSGQGDSLHEHIANLAGSPAIKKGILQTVKVVDELVKVMGRHKPENIVIEMARENQTTQKGQKNSRERMKRIEEGIKELGSQILKEHPVENTQLQNEKLYLYYLQNGRDMYVDQELDINRLSDYDVDHIVPQSFLKDDSIDNKVLTRSDKARGKSDNVPSEEVVKKMKNYWRQLLNAKLITQRKFDNLTKAERGGLSELDKAGFIKRQLVETRQITKHVAQILDSRMNTKYDENDKLIREVKVITLKSKLVSDFRKDFQFYKVREINNYHHAHDAYLNAVVGTALIKKYPKLESEFVYGDYKVYDVRKMIAKSEQEIGKATAKYFFYSNIMNFFKTEITLANGEIRKRPLIETNGETGEIVWDKGRDFATVRKVLSMPQVNIVKKTEVQTGGFSKESILPKRNSDKLIARKKDWDPKKYGGFDSPTVAYSVLVVAKVEKGKSKKLKSVKELLGITIMERSSFEKNPIDFLEAKGYKEVKKDLIIKLPKYSLFELENGRKRMLASAGELQKGNELALPSKYVNFLYLASHYEKLKGSPEDNEQKQLFVEQHKHYLDEIIEQISEFSKRVILADANLDKVLSAYNKHRDKPIREQAENIIHLFTLTNLGAPAAFKYFDTTIDRKRYTSTKEVLDATLIHQSITGLYETRIDLSQLGGDGGGGSGGSGGSGGSGGTVSLQDEHRLFDIPVTTSLPDVWLQDFPQAWAETGGLGRAKCQAPIIIDLKPTAVPVSIKQYPMSLEAHMGIRQHIIKFLELGVLRPCRSPWNTPLLPVKKPGTQDYRPVQDLREINKRTVDIHPTVPNPYNLLSTLKPDYSWYTVLDLKDAFFCLPLAPQSQELFAFEWKDPERGISGQLTWTRLPQGFKNSPTLFNEALHRDLTDFRTQHPEVTLLQYVDDLLLAAPTKKACTQGTRHLLQELGEKGYRASAKKAQICQTKVTYLGYILSEGKRWLTPGRIETVARIPPPRNPREVREFLGTAGFCRLWIPGFAELAAPLYALTKPSTPFTWQTEHQLAFEALKKALLSAPALGLPDTSKPFTLFLDERQGIAKGVLTQKLGPWKRPVAYLSKKLDPVAAGWPPCLRIMAATAMLVKDSAKLTLGQPLTVITPHTLEAIVRQPPDRWITNARLTHYQALLLDTDRVQFGPPVTLNPATLLPVPENQPSPHDCRQVLAETHGTREDLKDQELPDADHTWYTDGSSYLDSGTRRAGAAVVDGHNTIWAQSLPPGTSAQKAELIALTKALELSKGKKANIYTDSRYAFATAHTHGSIYERRGWLTSEGKEIKNKAEIIALLKALFLPQEVAIIHCPGHQKGQDPVAVGNRQADRVARQAAMAEVLTLATEPDNTSHITAGKRTADGSEFEKRTADGSEFESPKKKAKVE

SEQ ID NO: 6047 - protein, 2088 aa, synthetic construct
MPAAKRVKLDGGDKKYSIGLDIGTNSVGWAVITDEYKVPSKKFKVLGNTDRHSIKKNLIGALLFDSGETAEATRLKRTARRRYTRRKNRICYLQEIFSNEMAKVDDSFFHRLEESFLVEEDKKHERHPIFGNIVDEVAYHEKYPTIYHLRKKLVDSTDKADLRLIYLALAHMIKFRGHFLIEGDLNPDNSDVDKLFIQLVQTYNQLFEENPINASGVDAKAILSARLSKSRRLENLIAQLPGEKKNGLFGNLIALSLGLTPNFKSNFDLAEDAKLQLSKDTYDDDLDNLLAQIGDQYADLFLAAKNLSDAILLSDILRVNTEITKAPLSASMIKRYDEHHQDLTLLKALVRQQLPEKYKEIFFDQSKNGYAGYIDGGASQEEFYKFIKPILEKMDGTEELLVKLNREDLLRKQRTFDNGSIPHQIHLGELHAILRRQEDFYPFLKDNREKIEKILTFRIPYYVGPLARGNSRFAWMTRKSEETITPWNFEEVVDKGASAQSFIERMTNFDKNLPNEKVLPKHSLLYEYFTVYNELTKVKYVTEGMRKPAFLSGEQKKAIVDLLFKTNRKVTVKQLKEDYFKKIECFDSVEISGVEDRFNASLGTYHDLLKIIKDKDFLDNEENEDILEDIVLTLTLFEDREMIEERLKTYAHLFDDKVMKQLKRRRYTGWGRLSRKLINGIRDKQSGKTILDFLKSDGFANRNFMQLIHDDSLTFKEDIQKAQVSGQGDSLHEHIANLAGSPAIKKGILQTVKVVDELVKVMGRHKPENIVIEMARENQTTQKGQKNSRERMKRIEEGIKELGSQILKEHPVENTQLQNEKLYLYYLQNGRDMYVDQELDINRLSDYDVDHIVPQSFLKDDSIDNKVLTRSDKARGKSDNVPSEEVVKKMKNYWRQLLNAKLITQRKFDNLTKAERGGLSELDKAGFIKRQLVETRQITKHVAQILDSRMNTKYDENDKLIREVKVITLKSKLVSDFRKDFQFYKVREINNYHHAHDAYLNAVVGTALIKKYPKLESEFVYGDYKVYDVRKMIAKSEQEIGKATAKYFFYSNIMNFFKTEITLANGEIRKRPLIETNGETGEIVWDKGRDFATVRKVLSMPQVNIVKKTEVQTGGFSKESILPKRNSDKLIARKKDWDPKKYGGFDSPTVAYSVLVVAKVEKGKSKKLKSVKELLGITIMERSSFEKNPIDFLEAKGYKEVKKDLIIKLPKYSLFELENGRKRMLASAGELQKGNELALPSKYVNFLYLASHYEKLKGSPEDNEQKQLFVEQHKHYLDEIIEQISEFSKRVILADANLDKVLSAYNKHRDKPIREQAENIIHLFTLTNLGAPAAFKYFDTTIDRKRYTSTKEVLDATLIHQSITGLYETRIDLSQLGGDGGGGSGGSGGSGGSGGVPWLTQQPLQLTILVPLQEYQEKILSKTALPEDQKQQLKTLFVKYDNLWQHWENQVGHRKIRPHNIATGDYPPRPQKQYPINPKAKPSIQIVIDDLLKQGVLTPQNSTMNTPVYPVPKPDGRWRMVLDYREVNKTIPLTAAQNQHSAGILATIVRQKYKTTLDLANGFWAHPITPESYWLTAFTWQGKQYCWTRLPQGFLNSPALFTADVVDLLKEIPNVQVYVDDIYLSHDDPKEHVQQLEKVFQILLQAGYVVSLKKSEIGQKTVEFLGFNITKEGRGLTDTFKTKLLNITPPKDLKQLQSILGLLNFARNFIPNFAELVQPLYNLIASAKGKYIEWSEENTKQLNMVIEALNTASNLEERLPEQRLVIKVNTSPSAGYVRYYNETGKKPIMYLNYVFSKAELKFSMLEKLLTTMHKALIKAMDLAMGQEILVYSPIVSMTKIQKTPLPERKALPIRWITWMTYLEDPRIQFHYDKTLPELKHIPDVYTSSQSPVKHPSQYEGVFYTDGSAIKSPDPTKSNNAGMGIVHATYKPEYQVLNQWSIPLGNHTAQMAEIAAVEFACKKALKIPGPVLVITDSFYVAESANKELPYWKSNGFVNNKKKPLKHISKWKSIAECLSMKPDITIQHEKGISLQIPVFILKGNALADKLATQGSYVVNAGKRTADGSEFEKRTADGSEFESPKKKAKVE

SEQ ID NO: 6048 - protein, 2128 aa, synthetic construct
MPAAKRVKLDGGDKKYSIGLDIGTNSVGWAVITDEYKVPSKKFKVLGNTDRHSIKKNLIGALLFDSGETAEATRLKRTARRRYTRRKNRICYLQEIFSNEMAKVDDSFFHRLEESFLVEEDKKHERHPIFGNIVDEVAYHEKYPTIYHLRKKLVDSTDKADLRLIYLALAHMIKFRGHFLIEGDLNPDNSDVDKLFIQLVQTYNQLFEENPINASGVDAKAILSARLSKSRRLENLIAQLPGEKKNGLFGNLIALSLGLTPNFKSNFDLAEDAKLQLSKDTYDDDLDNLLAQIGDQYADLFLAAKNLSDAILLSDILRVNTEITKAPLSASMIKRYDEHHQDLTLLKALVRQQLPEKYKEIFFDQSKNGYAGYIDGGASQEEFYKFIKPILEKMDGTEELLVKLNREDLLRKQRTFDNGSIPHQIHLGELHAILRRQEDFYPFLKDNREKIEKILTFRIPYYVGPLARGNSRFAWMTRKSEETITPWNFEEVVDKGASAQSFIERMTNFDKNLPNEKVLPKHSLLYEYFTVYNELTKVKYVTEGMRKPAFLSGEQKKAIVDLLFKTNRKVTVKQLKEDYFKKIECFDSVEISGVEDRFNASLGTYHDLLKIIKDKDFLDNEENEDILEDIVLTLTLFEDREMIEERLKTYAHLFDDKVMKQLKRRRYTGWGRLSRKLINGIRDKQSGKTILDFLKSDGFANRNFMQLIHDDSLTFKEDIQKAQVSGQGDSLHEHIANLAGSPAIKKGILQTVKVVDELVKVMGRHKPENIVIEMARENQTTQKGQKNSRERMKRIEEGIKELGSQILKEHPVENTQLQNEKLYLYYLQNGRDMYVDQELDINRLSDYDVDHIVPQSFLKDDSIDNKVLTRSDKARGKSDNVPSEEVVKKMKNYWRQLLNAKLITQRKFDNLTKAERGGLSELDKAGFIKRQLVETRQITKHVAQILDSRMNTKYDENDKLIREVKVITLKSKLVSDFRKDFQFYKVREINNYHHAHDAYLNAVVGTALIKKYPKLESEFVYGDYKVYDVRKMIAKSEQEIGKATAKYFFYSNIMNFFKTEITLANGEIRKRPLIETNGETGEIVWDKGRDFATVRKVLSMPQVNIVKKTEVQTGGFSKESILPKRNSDKLIARKKDWDPKKYGGFDSPTVAYSVLVVAKVEKGKSKKLKSVKELLGITIMERSSFEKNPIDFLEAKGYKEVKKDLIIKLPKYSLFELENGRKRMLASAGELQKGNELALPSKYVNFLYLASHYEKLKGSPEDNEQKQLFVEQHKHYLDEIIEQISEFSKRVILADANLDKVLSAYNKHRDKPIREQAENIIHLFTLTNLGAPAAFKYFDTTIDRKRYTSTKEVLDATLIHQSITGLYETRIDLSQLGGDGGGGSGGSGGSGGSGGLLGRDLLTKLKAQIQFSTEGPQVTWEDRPAMCLVLNLEEEYRLHEKPVPPSIDPSWLQLFPMVWAEKAGMGLANQVPPVVVELKSDASPVAVRQYPMSKEAREGIRPHIQRFLDLGILVPCQSPWNTPLLPVKKPGTNDYRPVQDLREVNKRVQDIHPTVPNPYNLLSSLPPSHTWYSVLDLKDAFFCLKLHPNSQPLFAFEWRDPEKGNTGQLTWTRLPQGFKNSPTLFNEALHRDLASFRALNPQVVMLQYVDDLLVAAPTYRDCKEGTRRLLQELSKLGYRVSAKKAQLCREEVTYLGYLLKGGKRWLTPARKATVMKIPTPTTPRQVREFLGTAGFCRLWIPGFASLAAPLYPLTRPKVPFTWTEAHQEAFGRIKEALLSAPALALPDLTKPFALYVDEKEGVARGVLTQTLGPWRRPVAYLSKKLDPVASGWPTCLKAIAAVALLLKDADKLTLGQNVLVIAPHNLESIVRQPPDRWMTNARMTHYQSLLLNERVSFAPPAILNPATLLPVESDDTPIHICSEILAEETGTRPDLRDQPLPGVPAWYTDGSSFIMDGRRQAGAAIVDNKRTVWASNLPEGTSAQKAELIALTQALRLAEGKSINIYTDSRYAFATAHVHGAIYKQRGWLTSAGKDIKNKEEILALLEAIHLPKRVAIIHCPGHQRGTDPVATGNRKADEAAKQAAQSTRILTETTKNAGKRTADGSEFEKRTADGSEFESPKKKAKVE

SEQ ID NO: 6049 - protein, 2219 aa, synthetic construct
MPAAKRVKLDGGDKKYSIGLDIGTNSVGWAVITDEYKVPSKKFKVLGNTDRHSIKKNLIGALLFDSGETAEATRLKRTARRRYTRRKNRICYLQEIFSNEMAKVDDSFFHRLEESFLVEEDKKHERHPIFGNIVDEVAYHEKYPTIYHLRKKLVDSTDKADLRLIYLALAHMIKFRGHFLIEGDLNPDNSDVDKLFIQLVQTYNQLFEENPINASGVDAKAILSARLSKSRRLENLIAQLPGEKKNGLFGNLIALSLGLTPNFKSNFDLAEDAKLQLSKDTYDDDLDNLLAQIGDQYADLFLAAKNLSDAILLSDILRVNTEITKAPLSASMIKRYDEHHQDLTLLKALVRQQLPEKYKEIFFDQSKNGYAGYIDGGASQEEFYKFIKPILEKMDGTEELLVKLNREDLLRKQRTFDNGSIPHQIHLGELHAILRRQEDFYPFLKDNREKIEKILTFRIPYYVGPLARGNSRFAWMTRKSEETITPWNFEEVVDKGASAQSFIERMTNFDKNLPNEKVLPKHSLLYEYFTVYNELTKVKYVTEGMRKPAFLSGEQKKAIVDLLFKTNRKVTVKQLKEDYFKKIECFDSVEISGVEDRFNASLGTYHDLLKIIKDKDFLDNEENEDILEDIVLTLTLFEDREMIEERLKTYAHLFDDKVMKQLKRRRYTGWGRLSRKLINGIRDKQSGKTILDFLKSDGFANRNFMQLIHDDSLTFKEDIQKAQVSGQGDSLHEHIANLAGSPAIKKGILQTVKVVDELVKVMGRHKPENIVIEMARENQTTQKGQKNSRERMKRIEEGIKELGSQILKEHPVENTQLQNEKLYLYYLQNGRDMYVDQELDINRLSDYDVDHIVPQSFLKDDSIDNKVLTRSDKARGKSDNVPSEEVVKKMKNYWRQLLNAKLITQRKFDNLTKAERGGLSELDKAGFIKRQLVETRQITKHVAQILDSRMNTKYDENDKLIREVKVITLKSKLVSDFRKDFQFYKVREINNYHHAHDAYLNAVVGTALIKKYPKLESEFVYGDYKVYDVRKMIAKSEQEIGKATAKYFFYSNIMNFFKTEITLANGEIRKRPLIETNGETGEIVWDKGRDFATVRKVLSMPQVNIVKKTEVQTGGFSKESILPKRNSDKLIARKKDWDPKKYGGFDSPTVAYSVLVVAKVEKGKSKKLKSVKELLGITIMERSSFEKNPIDFLEAKGYKEVKKDLIIKLPKYSLFELENGRKRMLASAGELQKGNELALPSKYVNFLYLASHYEKLKGSPEDNEQKQLFVEQHKHYLDEIIEQISEFSKRVILADANLDKVLSAYNKHRDKPIREQAENIIHLFTLTNLGAPAAFKYFDTTIDRKRYTSTKEVLDATLIHQSITGLYETRIDLSQLGGDGGGGSGGSGGSGGSGGTLGDQGSRGSDPLPEPRVTLTVEGIPTEFLVNTGAEHSVLTKPMGKMGSKRTVVAGATGSKVYPWTTKRLLKIGQKQVTHSFLVIPECPAPLLGRDLLTKLKAQIQFSTEGPQVTWEDRPAMCLVLNLEEEYRLHEKPVPPSIDPSWLQLFPMVWAEKAGMGLANQVPPVVVELKSDASPVAVRQYPMSKEAREGIRPHIQRFLDLGILVPCQSPWNTPLLPVKKPGTNDYRPVQDLREVNKRVQDIHPTVPNPYNLLSSLPPSHTWYSVLDLKDAFFCLKLHPNSQPLFAFEWRDPEKGNTGQLTWTRLPQGFKNSPTLFNEALHRDLASFRALNPQVVMLQYVDDLLVAAPTYRDCKEGTRRLLQELSKLGYRVSAKKAQLCREEVTYLGYLLKGGKRWLTPARKATVMKIPTPTTPRQVREFLGKAGFCRLFIPGFASLAAPLYPLTRPKVPFTWTEAHQEAFGRIKEALLSAPALALPDLTKPFALYVDEKEGVARGVLTQTLGPWRRPVAYLSKKLDPVASGWPTCLKAIAAVALLLKDADKLTLGQNVLVIAPHNLESIVRQPPDRWMTNARMTHYQSLLLNERVSFAPPAILNPATLLPVESDDTPIHICSEILAEETGTRPDLRDQPLPGVPAWYTDGSSFIMDGRRQAGAAIVDNKRTVWASNLPEGTSAQKAELIALTQALRLAEGKSINIYTDSRYAFATAHVHGAIYKQRGWLTSAGKDIKNKEEILALLEAIHLPKRVAIIHCPGHQRGTDPVATGNRKADEAAKQAAQSTRILTETTKNAGKRTADGSEFEKRTADGSEFESPKKKAKVE

SEQ ID NO: 6050 - protein, 2097 aa, synthetic construct
MPAAKRVKLDGGDKKYSIGLDIGTNSVGWAVITDEYKVPSKKFKVLGNTDRHSIKKNLIGALLFDSGETAEATRLKRTARRRYTRRKNRICYLQEIFSNEMAKVDDSFFHRLEESFLVEEDKKHERHPIFGNIVDEVAYHEKYPTIYHLRKKLVDSTDKADLRLIYLALAHMIKFRGHFLIEGDLNPDNSDVDKLFIQLVQTYNQLFEENPINASGVDAKAILSARLSKSRRLENLIAQLPGEKKNGLFGNLIALSLGLTPNFKSNFDLAEDAKLQLSKDTYDDDLDNLLAQIGDQYADLFLAAKNLSDAILLSDILRVNTEITKAPLSASMIKRYDEHHQDLTLLKALVRQQLPEKYKEIFFDQSKNGYAGYIDGGASQEEFYKFIKPILEKMDGTEELLVKLNREDLLRKQRTFDNGSIPHQIHLGELHAILRRQEDFYPFLKDNREKIEKILTFRIPYYVGPLARGNSRFAWMTRKSEETITPWNFEEVVDKGASAQSFIERMTNFDKNLPNEKVLPKHSLLYEYFTVYNELTKVKYVTEGMRKPAFLSGEQKKAIVDLLFKTNRKVTVKQLKEDYFKKIECFDSVEISGVEDRFNASLGTYHDLLKIIKDKDFLDNEENEDILEDIVLTLTLFEDREMIEERLKTYAHLFDDKVMKQLKRRRYTGWGRLSRKLINGIRDKQSGKTILDFLKSDGFANRNFMQLIHDDSLTFKEDIQKAQVSGQGDSLHEHIANLAGSPAIKKGILQTVKVVDELVKVMGRHKPENIVIEMARENQTTQKGQKNSRERMKRIEEGIKELGSQILKEHPVENTQLQNEKLYLYYLQNGRDMYVDQELDINRLSDYDVDHIVPQSFLKDDSIDNKVLTRSDKARGKSDNVPSEEVVKKMKNYWRQLLNAKLITQRKFDNLTKAERGGLSELDKAGFIKRQLVETRQITKHVAQILDSRMNTKYDENDKLIREVKVITLKSKLVSDFRKDFQFYKVREINNYHHAHDAYLNAVVGTALIKKYPKLESEFVYGDYKVYDVRKMIAKSEQEIGKATAKYFFYSNIMNFFKTEITLANGEIRKRPLIETNGETGEIVWDKGRDFATVRKVLSMPQVNIVKKTEVQTGGFSKESILPKRNSDKLIARKKDWDPKKYGGFDSPTVAYSVLVVAKVEKGKSKKLKSVKELLGITIMERSSFEKNPIDFLEAKGYKEVKKDLIIKLPKYSLFELENGRKRMLASAGELQKGNELALPSKYVNFLYLASHYEKLKGSPEDNEQKQLFVEQHKHYLDEIIEQISEFSKRVILADANLDKVLSAYNKHRDKPIREQAENIIHLFTLTNLGAPAAFKYFDTTIDRKRYTSTKEVLDATLIHQSITGLYETRIDLSQLGGDGGGGSGGSGGSGGSGGTLNIEDEYRLHETSKGPDVPLGSTWLSDFPQAWAETGGMGLAVRQAPLIIPLKATSTPVSIKQYPMSQEARLGIKPHIQRLLDQGILVPCQSPWNTPLLPVKKPGTNDYRPVQDLREVNKRVEDIHPTVPNPYNLLSGLPPSHQWYTVLDLKDAFFCLRLHPTSQSLFAFEWRDPEMGISGQLTWTRLPQGFKNSPTLFNEALHRDLADFRIQHPDLILLQYVDDLLLAATSELDCQQGTRALLQTLGDLGYRASAKKAQICQKQVKYLGYLLKEGQRWLTEARKETVMGQPTPKTPRQLREFLGTAGFCRLWIPGFAEMAAPLYPLTKPGTLFEWGPDQQKAYQEIKQALLTAPALGLPDLTKPFELFVDEKQGYAKGVLTQKLGPWRRPVAYLSKKLDPVAAGWPPCLRMVAAIAVLTKDAGKLTMGQPLVILAPHAVEALVKQPPDRWLSNARMTHYQALLLDTDRVQFGPIVALNPATLLPLPEEGLQHDCLDILAEAHGTRPDLTDQPLPDADHTWYTDGSSFLQEGQRKAGAAVTTETEVVWAKALPAGTSAQRAELIALTQALKMAEGKKLNVYTDSRYAFATAHIHGEIYRRRGWLTSEGKEIKNKDEILALLKALFLPKRLSIIHCPGHQKGNRAEARGNRMADQAAREVATRETPETSTLLAGKRTADGSEFEKRTADGSEFESPKKKAKVE

SEQ ID NO: 6051 - protein, 2088 aa, synthetic construct
MPAAKRVKLDGGDKKYSIGLDIGTNSVGWAVITDEYKVPSKKFKVLGNTDRHSIKKNLIGALLFDSGETAEATRLKRTARRRYTRRKNRICYLQEIFSNEMAKVDDSFFHRLEESFLVEEDKKHERHPIFGNIVDEVAYHEKYPTIYHLRKKLVDSTDKADLRLIYLALAHMIKFRGHFLIEGDLNPDNSDVDKLFIQLVQTYNQLFEENPINASGVDAKAILSARLSKSRRLENLIAQLPGEKKNGLFGNLIALSLGLTPNFKSNFDLAEDAKLQLSKDTYDDDLDNLLAQIGDQYADLFLAAKNLSDAILLSDILRVNTEITKAPLSASMIKRYDEHHQDLTLLKALVRQQLPEKYKEIFFDQSKNGYAGYIDGGASQEEFYKFIKPILEKMDGTEELLVKLNREDLLRKQRTFDNGSIPHQIHLGELHAILRRQEDFYPFLKDNREKIEKILTFRIPYYVGPLARGNSRFAWMTRKSEETITPWNFEEVVDKGASAQSFIERMTNFDKNLPNEKVLPKHSLLYEYFTVYNELTKVKYVTEGMRKPAFLSGEQKKAIVDLLFKTNRKVTVKQLKEDYFKKIECFDSVEISGVEDRFNASLGTYHDLLKIIKDKDFLDNEENEDILEDIVLTLTLFEDREMIEERLKTYAHLFDDKVMKQLKRRRYTGWGRLSRKLINGIRDKQSGKTILDFLKSDGFANRNFMQLIHDDSLTFKEDIQKAQVSGQGDSLHEHIANLAGSPAIKKGILQTVKVVDELVKVMGRHKPENIVIEMARENQTTQKGQKNSRERMKRIEEGIKELGSQILKEHPVENTQLQNEKLYLYYLQNGRDMYVDQELDINRLSDYDVDHIVPQSFLKDDSIDNKVLTRSDKARGKSDNVPSEEVVKKMKNYWRQLLNAKLITQRKFDNLTKAERGGLSELDKAGFIKRQLVETRQITKHVAQILDSRMNTKYDENDKLIREVKVITLKSKLVSDFRKDFQFYKVREINNYHHAHDAYLNAVVGTALIKKYPKLESEFVYGDYKVYDVRKMIAKSEQEIGKATAKYFFYSNIMNFFKTEITLANGEIRKRPLIETNGETGEIVWDKGRDFATVRKVLSMPQVNIVKKTEVQTGGFSKESILPKRNSDKLIARKKDWDPKKYGGFDSPTVAYSVLVVAKVEKGKSKKLKSVKELLGITIMERSSFEKNPIDFLEAKGYKEVKKDLIIKLPKYSLFELENGRKRMLASAGELQKGNELALPSKYVNFLYLASHYEKLKGSPEDNEQKQLFVEQHKHYLDEIIEQISEFSKRVILADANLDKVLSAYNKHRDKPIREQAENIIHLFTLTNLGAPAAFKYFDTTIDRKRYTSTKEVLDATLIHQSITGLYETRIDLSQLGGDGGGGSGGSGGSGGSGGIPWLMKKPLQLTTLVPLQEYEERLLKQTMLTGSYKEKLQSLFLKYDALWQHWENQVGHRRIKPHHIATGTVNPRPQKQYPINPKAKASIQTVINDLLKQGVLIQQNSIMNTPVYPVPKPDGKWRMVLDYREVNKTIPLIAAQNQHSAGILSSIFRGKYKTTLDLSNGFWAHSITPESYWLTAFTWLGQQYCWTRLPQGFLNSPALFNADVVDLLKEVPNVQVYVDDIYISHDDPREHLEQLEKVFSLLLNAGYVVSLKKSEIAQHEVEFLGFNITKEGRGLTETFKQKLLNITPPRDLKQLQSILGKLNFARNFIPNFSELVKPLYNIIATAPGKYITWTTDNSQQLQNIISMLNSAENLEERNPEVRLIMKVNTSPSAGYIRFYNEFAKRPIMYLNYVYTKAEVKFTNTEKLLTTIHKGLIKALDLGMGQEILVYSPIVSMTKIQKTPLPERKALPIRWITWMSYLEDPRIQFHYDKTLPELQQVPTVTDDIIAKIKHPSEFSMVFYTDGSAIKHPNVNKSHNAGMGIAQVQFKPEFTVINTWSIPLGDHTAQLAEVAAVEFACKKALKIDGPVLIVTDSFYVAESVNKELPYWQSNGFFNNKKKPLKHVSKWKSIADCIQLKPDIIIIHEKGHQPTASTFHTEGNNLADKLATQGSYVVNAGKRTADGSEFEKRTADGSEFESPKKKAKVE

SEQ ID NO: 6052 - protein, 2177 aa, synthetic construct
MPAAKRVKLDGGDKKYSIGLDIGTNSVGWAVITDEYKVPSKKFKVLGNTDRHSIKKNLIGALLFDSGETAEATRLKRTARRRYTRRKNRICYLQEIFSNEMAKVDDSFFHRLEESFLVEEDKKHERHPIFGNIVDEVAYHEKYPTIYHLRKKLVDSTDKADLRLIYLALAHMIKFRGHFLIEGDLNPDNSDVDKLFIQLVQTYNQLFEENPINASGVDAKAILSARLSKSRRLENLIAQLPGEKKNGLFGNLIALSLGLTPNFKSNFDLAEDAKLQLSKDTYDDDLDNLLAQIGDQYADLFLAAKNLSDAILLSDILRVNTEITKAPLSASMIKRYDEHHQDLTLLKALVRQQLPEKYKEIFFDQSKNGYAGYIDGGASQEEFYKFIKPILEKMDGTEELLVKLNREDLLRKQRTFDNGSIPHQIHLGELHAILRRQEDFYPFLKDNREKIEKILTFRIPYYVGPLARGNSRFAWMTRKSEETITPWNFEEVVDKGASAQSFIERMTNFDKNLPNEKVLPKHSLLYEYFTVYNELTKVKYVTEGMRKPAFLSGEQKKAIVDLLFKTNRKVTVKQLKEDYFKKIECFDSVEISGVEDRFNASLGTYHDLLKIIKDKDFLDNEENEDILEDIVLTLTLFEDREMIEERLKTYAHLFDDKVMKQLKRRRYTGWGRLSRKLINGIRDKQSGKTILDFLKSDGFANRNFMQLIHDDSLTFKEDIQKAQVSGQGDSLHEHIANLAGSPAIKKGILQTVKVVDELVKVMGRHKPENIVIEMARENQTTQKGQKNSRERMKRIEEGIKELGSQILKEHPVENTQLQNEKLYLYYLQNGRDMYVDQELDINRLSDYDVDHIVPQSFLKDDSIDNKVLTRSDKARGKSDNVPSEEVVKKMKNYWRQLLNAKLITQRKFDNLTKAERGGLSELDKAGFIKRQLVETRQITKHVAQILDSRMNTKYDENDKLIREVKVITLKSKLVSDFRKDFQFYKVREINNYHHAHDAYLNAVVGTALIKKYPKLESEFVYGDYKVYDVRKMIAKSEQEIGKATAKYFFYSNIMNFFKTEITLANGEIRKRPLIETNGETGEIVWDKGRDFATVRKVLSMPQVNIVKKTEVQTGGFSKESILPKRNSDKLIARKKDWDPKKYGGFDSPTVAYSVLVVAKVEKGKSKKLKSVKELLGITIMERSSFEKNPIDFLEAKGYKEVKKDLIIKLPKYSLFELENGRKRMLASAGELQKGNELALPSKYVNFLYLASHYEKLKGSPEDNEQKQLFVEQHKHYLDEIIEQISEFSKRVILADANLDKVLSAYNKHRDKPIREQAENIIHLFTLTNLGAPAAFKYFDTTIDRKRYTSTKEVLDATLIHQSITGLYETRIDLSQLGGDGGGGSGGSGGSGGSGGMDPLQLLQPLEAEIKGTKLKAHWNSGATITCVPQAFLEEEVPIKNIWIKTIHGEKEQPVYYLTFKIQGRKVEAEVISSPYDYILVSPSDIPWLMKKPLQLTTLVPLQEYEERLLKQTMLTGSYKEKLQSLFLKYDALWQHWENQVGHRRIKPHHIATGTVNPRPQKQYPINPKAKASIQTVINDLLKQGVLIQQNSIMNTPVYPVPKPDGKWRMVLDYREVNKTIPLIAAQNQHSAGILSSIFRGKYKTTLDLSNGFWAHSITPESYWLTAFTWLGQQYCWTRLPQGFLNSPALFNADVVDLLKEVPNVQVYVDDIYISHDDPREHLEQLEKVFSLLLNAGYVVSLKKSEIAQHEVEFLGFNITKEGRGLTETFKQKLLNITPPRDLKQLQSILGKLNFARNFIPNFSELVKPLYNIIATAPGKYITWTTDNSQQLQNIISMLNSAENLEERNPEVRLIMKVNTSPSAGYIRFYNEFAKRPIMYLNYVYTKAEVKFTNTEKLLTTIHKGLIKALDLGMGQEILVYSPIVSMTKIQKTPLPERKALPIRWITWMSYLEDPRIQFHYDKTLPELQQVPTVTDDIIAKIKHPSEFSMVFYTDGSAIKHPNVNKSHNAGMGIAQVQFKPEFTVINTWSIPLGDHTAQLAEVAAVEFACKKALKIDGPVLIVTDSFYVAESVNKELPYWQSNGFFNNKKKPLKHVSKWKSIADCIQLKPDIIIIHEKGHQPTASTFHTEGNNLADKLATQGSYVVNAGKRTADGSEFEKRTADGSEFESPKKKAKVE

SEQ ID NO: 6053 - protein, 2095 aa, synthetic construct
MPAAKRVKLDGGDKKYSIGLDIGTNSVGWAVITDEYKVPSKKFKVLGNTDRHSIKKNLIGALLFDSGETAEATRLKRTARRRYTRRKNRICYLQEIFSNEMAKVDDSFFHRLEESFLVEEDKKHERHPIFGNIVDEVAYHEKYPTIYHLRKKLVDSTDKADLRLIYLALAHMIKFRGHFLIEGDLNPDNSDVDKLFIQLVQTYNQLFEENPINASGVDAKAILSARLSKSRRLENLIAQLPGEKKNGLFGNLIALSLGLTPNFKSNFDLAEDAKLQLSKDTYDDDLDNLLAQIGDQYADLFLAAKNLSDAILLSDILRVNTEITKAPLSASMIKRYDEHHQDLTLLKALVRQQLPEKYKEIFFDQSKNGYAGYIDGGASQEEFYKFIKPILEKMDGTEELLVKLNREDLLRKQRTFDNGSIPHQIHLGELHAILRRQEDFYPFLKDNREKIEKILTFRIPYYVGPLARGNSRFAWMTRKSEETITPWNFEEVVDKGASAQSFIERMTNFDKNLPNEKVLPKHSLLYEYFTVYNELTKVKYVTEGMRKPAFLSGEQKKAIVDLLFKTNRKVTVKQLKEDYFKKIECFDSVEISGVEDRFNASLGTYHDLLKIIKDKDFLDNEENEDILEDIVLTLTLFEDREMIEERLKTYAHLFDDKVMKQLKRRRYTGWGRLSRKLINGIRDKQSGKTILDFLKSDGFANRNFMQLIHDDSLTFKEDIQKAQVSGQGDSLHEHIANLAGSPAIKKGILQTVKVVDELVKVMGRHKPENIVIEMARENQTTQKGQKNSRERMKRIEEGIKELGSQILKEHPVENTQLQNEKLYLYYLQNGRDMYVDQELDINRLSDYDVDHIVPQSFLKDDSIDNKVLTRSDKARGKSDNVPSEEVVKKMKNYWRQLLNAKLITQRKFDNLTKAERGGLSELDKAGFIKRQLVETRQITKHVAQILDSRMNTKYDENDKLIREVKVITLKSKLVSDFRKDFQFYKVREINNYHHAHDAYLNAVVGTALIKKYPKLESEFVYGDYKVYDVRKMIAKSEQEIGKATAKYFFYSNIMNFFKTEITLANGEIRKRPLIETNGETGEIVWDKGRDFATVRKVLSMPQVNIVKKTEVQTGGFSKESILPKRNSDKLIARKKDWDPKKYGGFDSPTVAYSVLVVAKVEKGKSKKLKSVKELLGITIMERSSFEKNPIDFLEAKGYKEVKKDLIIKLPKYSLFELENGRKRMLASAGELQKGNELALPSKYVNFLYLASHYEKLKGSPEDNEQKQLFVEQHKHYLDEIIEQISEFSKRVILADANLDKVLSAYNKHRDKPIREQAENIIHLFTLTNLGAPAAFKYFDTTIDRKRYTSTKEVLDATLIHQSITGLYETRIDLSQLGGDGGGGSGGSGGSGGSGGVLNLEEEYRLHEKPVPSSIDPSWLQLFPTVWAERAGMGLANQVPPVVVELRSGASPVAVRQYPMSKEAREGIRPHIQRFLDLGVLVPCQSPWNTPLLPVKKPGTNDYRPVQDLREINKRVQDIHPTVPNPYNLLSSLPPSHTWYSVLDLKDAFFCLKLHPNSQPLFAFEWRDPEKGNTGQLTWTRLPQGFKNSPTLFDEALHRDLAPFRALNPQVVLLQYVDDLLVAAPTYRDCKEGTQKLLQELSKLGYRVSAKKAQLCQKEVTYLGYLLKEGKRWLTPARKATVMKIPPPTTPRQVREFLGTAGFCRLWIPGFASLAAPLYPLTKESIPFIWTEEHQKAFDRIKEALLSAPALALPDLTKPFTLYVDERAGVARGVLTQTLGPWRRPVAYLSKKLDPVASGWPTCLKAVAAVALLLKDADKLTLGQNVTVIASHSLESIVRQPPDRWMTNARMTHYQSLLLNERVSFAPPAVLNPATLLPVESEATPVHRCSEILAEETGTRRDLKDQPLPGVPAWYTDGSSFIAEGKRRAGAAIVDGKRTVWASSLPEGTSAQKAELVALTQALRLAEGKDINIYTDSRYAFATAHIHGAIYKQRGLLTSAGKDIKNKEEILALLEAIHLPKRVAIIHCPGHQKGNDPVATGNRRADEAAKQAALSTRVLAETTKPAGKRTADGSEFEKRTADGSEFESPKKKAKVE

SEQ ID NO: 6054 - protein, 2097 aa, synthetic construct
MPAAKRVKLDGGDKKYSIGLDIGTNSVGWAVITDEYKVPSKKFKVLGNTDRHSIKKNLIGALLFDSGETAEATRLKRTARRRYTRRKNRICYLQEIFSNEMAKVDDSFFHRLEESFLVEEDKKHERHPIFGNIVDEVAYHEKYPTIYHLRKKLVDSTDKADLRLIYLALAHMIKFRGHFLIEGDLNPDNSDVDKLFIQLVQTYNQLFEENPINASGVDAKAILSARLSKSRRLENLIAQLPGEKKNGLFGNLIALSLGLTPNFKSNFDLAEDAKLQLSKDTYDDDLDNLLAQIGDQYADLFLAAKNLSDAILLSDILRVNTEITKAPLSASMIKRYDEHHQDLTLLKALVRQQLPEKYKEIFFDQSKNGYAGYIDGGASQEEFYKFIKPILEKMDGTEELLVKLNREDLLRKQRTFDNGSIPHQIHLGELHAILRRQEDFYPFLKDNREKIEKILTFRIPYYVGPLARGNSRFAWMTRKSEETITPWNFEEVVDKGASAQSFIERMTNFDKNLPNEKVLPKHSLLYEYFTVYNELTKVKYVTEGMRKPAFLSGEQKKAIVDLLFKTNRKVTVKQLKEDYFKKIECFDSVEISGVEDRFNASLGTYHDLLKIIKDKDFLDNEENEDILEDIVLTLTLFEDREMIEERLKTYAHLFDDKVMKQLKRRRYTGWGRLSRKLINGIRDKQSGKTILDFLKSDGFANRNFMQLIHDDSLTFKEDIQKAQVSGQGDSLHEHIANLAGSPAIKKGILQTVKVVDELVKVMGRHKPENIVIEMARENQTTQKGQKNSRERMKRIEEGIKELGSQILKEHPVENTQLQNEKLYLYYLQNGRDMYVDQELDINRLSDYDVDHIVPQSFLKDDSIDNKVLTRSDKARGKSDNVPSEEVVKKMKNYWRQLLNAKLITQRKFDNLTKAERGGLSELDKAGFIKRQLVETRQITKHVAQILDSRMNTKYDENDKLIREVKVITLKSKLVSDFRKDFQFYKVREINNYHHAHDAYLNAVVGTALIKKYPKLESEFVYGDYKVYDVRKMIAKSEQEIGKATAKYFFYSNIMNFFKTEITLANGEIRKRPLIETNGETGEIVWDKGRDFATVRKVLSMPQVNIVKKTEVQTGGFSKESILPKRNSDKLIARKKDWDPKKYGGFDSPTVAYSVLVVAKVEKGKSKKLKSVKELLGITIMERSSFEKNPIDFLEAKGYKEVKKDLIIKLPKYSLFELENGRKRMLASAGELQKGNELALPSKYVNFLYLASHYEKLKGSPEDNEQKQLFVEQHKHYLDEIIEQISEFSKRVILADANLDKVLSAYNKHRDKPIREQAENIIHLFTLTNLGAPAAFKYFDTTIDRKRYTSTKEVLDATLIHQSITGLYETRIDLSQLGGDGGGGSGGSGGSGGSGGTLNIEDEYRLHETSKEPDVPLGSTWLSDFPQAWAETGGMGLAVRQAPLIIPLKATSTPVSIKQYPMSQEARLGIKPHIQRLLDQGILVPCQSPWNTPLLPVKKPGTNDYRPVQDLREVNKRVEDIHPTVPNPYNLLSGLPPSHQWYTVLDLKDAFFCLRLHPTSQPLFAFEWRDPEMGISGQLTWTRLPQGFKNSPTLFNEALHRDLADFRIQHPDLILLQYVDDLLLAATSEQDCQRGTRALLQTLGNLGYRASAKKAQICQKQVKYLGYLLKEGQRWLTEARKETVMGQPTPKTPRQLREFLGTAGFCRLWIPGFAEMAAPLYPLTKPGTLFNWGPDQQKAYQEIKQALLTAPALGLPDLTKPFELFVDEKQGYAKGVLTQKLGPWRRPVAYLSKKLDPVAAGWPPCLRMVAAIAVLTKDAGKLTMGQPLVILAPHAVEALVKQPPDRWLSNARMTHYQAMLLDTDRVQFGPVVALNPATLLPLPEKEAPHDCLEILAETHGTRPDLTDQPIPDADYTWYTDGSSFLQEGQRRAGAAVTTETEVIWARALPAGTSAQRAELIALTQALKMAEGKKLNVYTDSRYAFATAHVHGEIYRRRGWLTSEGREIKNKNEILALLKALFLPKRLSIIHCPGHQKGNSAEARGNRMADQAAREAAMKAVLETSTLLAGKRTADGSEFEKRTADGSEFESPKKKAKVE

SEQ ID NO: 6055 - protein, 2005 aa, synthetic construct
MPAAKRVKLDGGDKKYSIGLDIGTNSVGWAVITDEYKVPSKKFKVLGNTDRHSIKKNLIGALLFDSGETAEATRLKRTARRRYTRRKNRICYLQEIFSNEMAKVDDSFFHRLEESFLVEEDKKHERHPIFGNIVDEVAYHEKYPTIYHLRKKLVDSTDKADLRLIYLALAHMIKFRGHFLIEGDLNPDNSDVDKLFIQLVQTYNQLFEENPINASGVDAKAILSARLSKSRRLENLIAQLPGEKKNGLFGNLIALSLGLTPNFKSNFDLAEDAKLQLSKDTYDDDLDNLLAQIGDQYADLFLAAKNLSDAILLSDILRVNTEITKAPLSASMIKRYDEHHQDLTLLKALVRQQLPEKYKEIFFDQSKNGYAGYIDGGASQEEFYKFIKPILEKMDGTEELLVKLNREDLLRKQRTFDNGSIPHQIHLGELHAILRRQEDFYPFLKDNREKIEKILTFRIPYYVGPLARGNSRFAWMTRKSEETITPWNFEEVVDKGASAQSFIERMTNFDKNLPNEKVLPKHSLLYEYFTVYNELTKVKYVTEGMRKPAFLSGEQKKAIVDLLFKTNRKVTVKQLKEDYFKKIECFDSVEISGVEDRFNASLGTYHDLLKIIKDKDFLDNEENEDILEDIVLTLTLFEDREMIEERLKTYAHLFDDKVMKQLKRRRYTGWGRLSRKLINGIRDKQSGKTILDFLKSDGFANRNFMQLIHDDSLTFKEDIQKAQVSGQGDSLHEHIANLAGSPAIKKGILQTVKVVDELVKVMGRHKPENIVIEMARENQTTQKGQKNSRERMKRIEEGIKELGSQILKEHPVENTQLQNEKLYLYYLQNGRDMYVDQELDINRLSDYDVDHIVPQSFLKDDSIDNKVLTRSDKARGKSDNVPSEEVVKKMKNYWRQLLNAKLITQRKFDNLTKAERGGLSELDKAGFIKRQLVETRQITKHVAQILDSRMNTKYDENDKLIREVKVITLKSKLVSDFRKDFQFYKVREINNYHHAHDAYLNAVVGTALIKKYPKLESEFVYGDYKVYDVRKMIAKSEQEIGKATAKYFFYSNIMNFFKTEITLANGEIRKRPLIETNGETGEIVWDKGRDFATVRKVLSMPQVNIVKKTEVQTGGFSKESILPKRNSDKLIARKKDWDPKKYGGFDSPTVAYSVLVVAKVEKGKSKKLKSVKELLGITIMERSSFEKNPIDFLEAKGYKEVKKDLIIKLPKYSLFELENGRKRMLASAGELQKGNELALPSKYVNFLYLASHYEKLKGSPEDNEQKQLFVEQHKHYLDEIIEQISEFSKRVILADANLDKVLSAYNKHRDKPIREQAENIIHLFTLTNLGAPAAFKYFDTTIDRKRYTSTKEVLDATLIHQSITGLYETRIDLSQLGGDGGGGSGGSGGSGGSGGSGGGVLDTPPSHIGLEHLPPPPEVPQFPLNLERLQALQDLVHRSLEAGYISPWDGPGNNPVFPVRKPNGAWRFVHDLRATNALTKPIPALSPGPPDLTAPPTHPPHIICLDLKDAFFQIPVEDRFRFYLSFTLPSPGGLQPHRRFAWRVLPQGFINSPALFQRALQEPLRQVSAAFSQSLLVSYMDDILYASPTEEQRSQCYQALAARLRDLGFQVASEKTSQTPSPVPFLGQMVHEQIVTYQSLPTLQISSPISLHQLQAVLGDLQWVSRGTPTTRRPLQLLYSSLKRHHDPRAIIQLSPEQLQGIAELRQALSHNARSRYNEQEPLLAYVHLTRAGSTLVLFQKGAQFPLAYFQTPLTDNQASPWGLLLLLGCQYLQTQALSSYAKPILKYYHNLPKTSLDNWIQSSEDPRVQELLQLWPQISSQGIQPPGPWKTLITRAEVFLTPQFSPDPIPAALCLFSDGATGRGAYCLWKDHLLDFQAVPAPESAQKGELAGLLAGLAAAPPEPVNIWVDSKYLYSLLRTWVLGAWLQPDPVPSYALLYKSLLRHPAIVVGHVRSHSSASHPIASLNNYVDQLAGKRTADGSEFEKRTADGSEFESPKKKAKVE

SEQ ID NO: 6056 - protein, 2177 aa, synthetic construct
MPAAKRVKLDGGDKKYSIGLDIGTNSVGWAVITDEYKVPSKKFKVLGNTDRHSIKKNLIGALLFDSGETAEATRLKRTARRRYTRRKNRICYLQEIFSNEMAKVDDSFFHRLEESFLVEEDKKHERHPIFGNIVDEVAYHEKYPTIYHLRKKLVDSTDKADLRLIYLALAHMIKFRGHFLIEGDLNPDNSDVDKLFIQLVQTYNQLFEENPINASGVDAKAILSARLSKSRRLENLIAQLPGEKKNGLFGNLIALSLGLTPNFKSNFDLAEDAKLQLSKDTYDDDLDNLLAQIGDQYADLFLAAKNLSDAILLSDILRVNTEITKAPLSASMIKRYDEHHQDLTLLKALVRQQLPEKYKEIFFDQSKNGYAGYIDGGASQEEFYKFIKPILEKMDGTEELLVKLNREDLLRKQRTFDNGSIPHQIHLGELHAILRRQEDFYPFLKDNREKIEKILTFRIPYYVGPLARGNSRFAWMTRKSEETITPWNFEEVVDKGASAQSFIERMTNFDKNLPNEKVLPKHSLLYEYFTVYNELTKVKYVTEGMRKPAFLSGEQKKAIVDLLFKTNRKVTVKQLKEDYFKKIECFDSVEISGVEDRFNASLGTYHDLLKIIKDKDFLDNEENEDILEDIVLTLTLFEDREMIEERLKTYAHLFDDKVMKQLKRRRYTGWGRLSRKLINGIRDKQSGKTILDFLKSDGFANRNFMQLIHDDSLTFKEDIQKAQVSGQGDSLHEHIANLAGSPAIKKGILQTVKVVDELVKVMGRHKPENIVIEMARENQTTQKGQKNSRERMKRIEEGIKELGSQILKEHPVENTQLQNEKLYLYYLQNGRDMYVDQELDINRLSDYDVDHIVPQSFLKDDSIDNKVLTRSDKARGKSDNVPSEEVVKKMKNYWRQLLNAKLITQRKFDNLTKAERGGLSELDKAGFIKRQLVETRQITKHVAQILDSRMNTKYDENDKLIREVKVITLKSKLVSDFRKDFQFYKVREINNYHHAHDAYLNAVVGTALIKKYPKLESEFVYGDYKVYDVRKMIAKSEQEIGKATAKYFFYSNIMNFFKTEITLANGEIRKRPLIETNGETGEIVWDKGRDFATVRKVLSMPQVNIVKKTEVQTGGFSKESILPKRNSDKLIARKKDWDPKKYGGFDSPTVAYSVLVVAKVEKGKSKKLKSVKELLGITIMERSSFEKNPIDFLEAKGYKEVKKDLIIKLPKYSLFELENGRKRMLASAGELQKGNELALPSKYVNFLYLASHYEKLKGSPEDNEQKQLFVEQHKHYLDEIIEQISEFSKRVILADANLDKVLSAYNKHRDKPIREQAENIIHLFTLTNLGAPAAFKYFDTTIDRKRYTSTKEVLDATLIHQSITGLYETRIDLSQLGGDGGGGSGGSGGSGGSGGSGGMDLLKPLTVERKGVKIKGYWNSQADITCVPKDLLQGEEPVRQQNVTTIHGTQEGDVYYVNLKIDGRRINTEVIGTTLDYAIITPGDVPWILKKPLELTIKLDLEEQQGTLLNNSILSKKGKEELKQLFEKYSALWQSWENQVGHRRIRPHKIATGTVKPTPQKQYHINPKAKPDIQIVINDLLKQGVLIQKESTMNTPVYPVPKPNGRWRMVLDYRAVNKVTPLIAVQNQHSYGILGSLFKGRYKTTIDLSNGFWAHPIVPEDYWITAFTWQGKQYCWTVLPQGFLNSPGLFTGDVVDLLQGIPNVEVYVDDVYISHDSEKEHLEYLDILFNRLKEAGYIISLKKSNIANSIVDFLGFQITNEGRGLTDTFKEKLENITAPTTLKQLQSILGLLNFARNFIPDFTELIAPLYALIPKSTKNYVPWQIEHSTTLETLITKLNGAEYLQGRKGDKTLIMKVNASYTTGYIRYYNEGEKKPISYVSIVFSKTELKFTELEKLLTTVHKGLLKALDLSMGQNIHVYSPIVSMQNIQKTPQTAKKALASRWLSWLSYLEDPRIRFFYDPQMPALKDLPAVDTGKDNKKHPSNFQHIFYTDGSAITSPTKEGHLNAGMGIVYFINKDGNLQKQQEWSISLGNHTAQFAEIAAFEFALKKCLPLGGNILVVTDSNYVAKAYNEELDVWASNGFVNNRKKPLKHISKWKSVADLKRLRPDVVVTHEPGHQKLDSSPHAYGNNLADQLATQASFKVHAGKRTADGSEFEKRTADGSEFESPKKKAKVE

SEQ ID NO: 6057 - protein, 2177 aa, synthetic construct
MPAAKRVKLDGGDKKYSIGLDIGTNSVGWAVITDEYKVPSKKFKVLGNTDRHSIKKNLIGALLFDSGETAEATRLKRTARRRYTRRKNRICYLQEIFSNEMAKVDDSFFHRLEESFLVEEDKKHERHPIFGNIVDEVAYHEKYPTIYHLRKKLVDSTDKADLRLIYLALAHMIKFRGHFLIEGDLNPDNSDVDKLFIQLVQTYNQLFEENPINASGVDAKAILSARLSKSRRLENLIAQLPGEKKNGLFGNLIALSLGLTPNFKSNFDLAEDAKLQLSKDTYDDDLDNLLAQIGDQYADLFLAAKNLSDAILLSDILRVNTEITKAPLSASMIKRYDEHHQDLTLLKALVRQQLPEKYKEIFFDQSKNGYAGYIDGGASQEEFYKFIKPILEKMDGTEELLVKLNREDLLRKQRTFDNGSIPHQIHLGELHAILRRQEDFYPFLKDNREKIEKILTFRIPYYVGPLARGNSRFAWMTRKSEETITPWNFEEVVDKGASAQSFIERMTNFDKNLPNEKVLPKHSLLYEYFTVYNELTKVKYVTEGMRKPAFLSGEQKKAIVDLLFKTNRKVTVKQLKEDYFKKIECFDSVEISGVEDRFNASLGTYHDLLKIIKDKDFLDNEENEDILEDIVLTLTLFEDREMIEERLKTYAHLFDDKVMKQLKRRRYTGWGRLSRKLINGIRDKQSGKTILDFLKSDGFANRNFMQLIHDDSLTFKEDIQKAQVSGQGDSLHEHIANLAGSPAIKKGILQTVKVVDELVKVMGRHKPENIVIEMARENQTTQKGQKNSRERMKRIEEGIKELGSQILKEHPVENTQLQNEKLYLYYLQNGRDMYVDQELDINRLSDYDVDHIVPQSFLKDDSIDNKVLTRSDKARGKSDNVPSEEVVKKMKNYWRQLLNAKLITQRKFDNLTKAERGGLSELDKAGFIKRQLVETRQITKHVAQILDSRMNTKYDENDKLIREVKVITLKSKLVSDFRKDFQFYKVREINNYHHAHDAYLNAVVGTALIKKYPKLESEFVYGDYKVYDVRKMIAKSEQEIGKATAKYFFYSNIMNFFKTEITLANGEIRKRPLIETNGETGEIVWDKGRDFATVRKVLSMPQVNIVKKTEVQTGGFSKESILPKRNSDKLIARKKDWDPKKYGGFDSPTVAYSVLVVAKVEKGKSKKLKSVKELLGITIMERSSFEKNPIDFLEAKGYKEVKKDLIIKLPKYSLFELENGRKRMLASAGELQKGNELALPSKYVNFLYLASHYEKLKGSPEDNEQKQLFVEQHKHYLDEIIEQISEFSKRVILADANLDKVLSAYNKHRDKPIREQAENIIHLFTLTNLGAPAAFKYFDTTIDRKRYTSTKEVLDATLIHQSITGLYETRIDLSQLGGDGGGGSGGSGGSGGSGGSGGMDLLKPLTVERKGVKIKGYWNSQADITCVPKDLLQGEEPVRQQNVTTIHGTQEGDVYYVNLKIDGRRINTEVIGTTLDYAIITPGDVPWILKKPLELTIKLDLEEQQGTLLNNSILSKKGKEELKQLFEKYSALWQSWENQVGHRRIRPHKIATGTVKPTPQKQYHINPKAKPDIQIVINDLLKQGVLIQKESTMNTPVYPVPKPNGRWRMVLDYRAVNKVTPLIAVQNQHSYGILGSLFKGRYKTTIDLSNGFWAHPIVPEDYWITAFTWQGKQYCWTVLPQGFLNSPGLFNGDVVDLLQGIPNVEVYVDDVYISHDSEKEHLEYLDILFNRLKEAGYIISLKKSNIANSIVDFLGFQITNEGRGLTDTFKEKLENITAPTTLKQLQSILGLLNFARNFIPDFTELIAPLYALIPKSPKNYVPWQIEHSTTLETLITKLNGAEYLQGRKGDKTLIMKVNASYTTGYIRYYNEGEKKPISYVSIVFSKTELKFTELEKLLTTVHKGLLKALDLSMGQNIHVYSPIVSMQNIQKTPQTAKKALASRWLSWLSYLEDPRIRFFYDPQMPALKDLPAVDTGKDNKKHPSNFQHIFYTDGSAITSPTKEGHLNAGMGIVYFINKDGNLQKQQEWSISLGNHTAQFAEIAAFEFALKKCLPLGGNILVVTDSNYVAKAYNEELDVWASNGFVNNRKKPLKHISKWKSVADLKRLRPDVVVTHEPGHQKLDSSPHAYGNNLADQLATQASFKVHAGKRTADGSEFEKRTADGSEFESPKKKAKVE

SEQ ID NO: 6058 - protein, 2099 aa, synthetic construct
MPAAKRVKLDGGDKKYSIGLDIGTNSVGWAVITDEYKVPSKKFKVLGNTDRHSIKKNLIGALLFDSGETAEATRLKRTARRRYTRRKNRICYLQEIFSNEMAKVDDSFFHRLEESFLVEEDKKHERHPIFGNIVDEVAYHEKYPTIYHLRKKLVDSTDKADLRLIYLALAHMIKFRGHFLIEGDLNPDNSDVDKLFIQLVQTYNQLFEENPINASGVDAKAILSARLSKSRRLENLIAQLPGEKKNGLFGNLIALSLGLTPNFKSNFDLAEDAKLQLSKDTYDDDLDNLLAQIGDQYADLFLAAKNLSDAILLSDILRVNTEITKAPLSASMIKRYDEHHQDLTLLKALVRQQLPEKYKEIFFDQSKNGYAGYIDGGASQEEFYKFIKPILEKMDGTEELLVKLNREDLLRKQRTFDNGSIPHQIHLGELHAILRRQEDFYPFLKDNREKIEKILTFRIPYYVGPLARGNSRFAWMTRKSEETITPWNFEEVVDKGASAQSFIERMTNFDKNLPNEKVLPKHSLLYEYFTVYNELTKVKYVTEGMRKPAFLSGEQKKAIVDLLFKTNRKVTVKQLKEDYFKKIECFDSVEISGVEDRFNASLGTYHDLLKIIKDKDFLDNEENEDILEDIVLTLTLFEDREMIEERLKTYAHLFDDKVMKQLKRRRYTGWGRLSRKLINGIRDKQSGKTILDFLKSDGFANRNFMQLIHDDSLTFKEDIQKAQVSGQGDSLHEHIANLAGSPAIKKGILQTVKVVDELVKVMGRHKPENIVIEMARENQTTQKGQKNSRERMKRIEEGIKELGSQILKEHPVENTQLQNEKLYLYYLQNGRDMYVDQELDINRLSDYDVDHIVPQSFLKDDSIDNKVLTRSDKARGKSDNVPSEEVVKKMKNYWRQLLNAKLITQRKFDNLTKAERGGLSELDKAGFIKRQLVETRQITKHVAQILDSRMNTKYDENDKLIREVKVITLKSKLVSDFRKDFQFYKVREINNYHHAHDAYLNAVVGTALIKKYPKLESEFVYGDYKVYDVRKMIAKSEQEIGKATAKYFFYSNIMNFFKTEITLANGEIRKRPLIETNGETGEIVWDKGRDFATVRKVLSMPQVNIVKKTEVQTGGFSKESILPKRNSDKLIARKKDWDPKKYGGFDSPTVAYSVLVVAKVEKGKSKKLKSVKELLGITIMERSSFEKNPIDFLEAKGYKEVKKDLIIKLPKYSLFELENGRKRMLASAGELQKGNELALPSKYVNFLYLASHYEKLKGSPEDNEQKQLFVEQHKHYLDEIIEQISEFSKRVILADANLDKVLSAYNKHRDKPIREQAENIIHLFTLTNLGAPAAFKYFDTTIDRKRYTSTKEVLDATLIHQSITGLYETRIDLSQLGGDGGGGSGGSGGSGGSGGSGGTLQLEEEYRLFEPESTQKQEMDIWLKNFPQAWAETGGMGTAHCQAPVLIQLKATATPISIRQYPMPHEAYQGIKPHIRRMLDQGILKPCQSPWNTPLLPVKKPGTEDYRPVQDLREVNKRVEDIHPTVPNPYNLLSTLPPSHPWYTVLDLKDAFFCLRLHSESQLLFAFEWRDPEIGLSGQLTWTRLPQGFKNSPTLFNEALHSDLADFRVRYPALVLLQYVDDLLLAAATRTECLEGTKALLETLGNKGYRASAKKAQICLQEVTYLGYSLKDGQRWLTKARKEAILSIPVPKNSRQVREFLGTAGYCRLWIPGFAELAAPLYPLTRPGTLFQWGTEQQLAFEDIKKALLSSPALGLPDITKPFELFIDENSGFAKGVLVQKLGPWKRPVAYLSKKLDTVASGWPPCLRMVAAIAILVKDAGKLTLGQPLTILTSHPVEALVRQPPNKWLSNARMTHYQAMLLDAERVHFGPTVSLNPATLLPLPSGGNHHDCLQILAETHGTRPDLTDQPLPDADLTWYTDGSSFIRNGEREAGAAVTTESEVIWAAPLPPGTSAQRAELIALTQALKMAEGKKLTVYTDSRYAFATTHVHGEIYRRRGWLTSEGKEIKNKNEILALLEALFLPKRLSIIHCPGHQKGDSPQAKGNRLADDTAKKAATETHSSLTVLPAGKRTADGSEFEKRTADGSEFESPKKKAKVE

SEQ ID NO: 6059 - protein, 2099 aa, synthetic construct
MPAAKRVKLDGGDKKYSIGLDIGTNSVGWAVITDEYKVPSKKFKVLGNTDRHSIKKNLIGALLFDSGETAEATRLKRTARRRYTRRKNRICYLQEIFSNEMAKVDDSFFHRLEESFLVEEDKKHERHPIFGNIVDEVAYHEKYPTIYHLRKKLVDSTDKADLRLIYLALAHMIKFRGHFLIEGDLNPDNSDVDKLFIQLVQTYNQLFEENPINASGVDAKAILSARLSKSRRLENLIAQLPGEKKNGLFGNLIALSLGLTPNFKSNFDLAEDAKLQLSKDTYDDDLDNLLAQIGDQYADLFLAAKNLSDAILLSDILRVNTEITKAPLSASMIKRYDEHHQDLTLLKALVRQQLPEKYKEIFFDQSKNGYAGYIDGGASQEEFYKFIKPILEKMDGTEELLVKLNREDLLRKQRTFDNGSIPHQIHLGELHAILRRQEDFYPFLKDNREKIEKILTFRIPYYVGPLARGNSRFAWMTRKSEETITPWNFEEVVDKGASAQSFIERMTNFDKNLPNEKVLPKHSLLYEYFTVYNELTKVKYVTEGMRKPAFLSGEQKKAIVDLLFKTNRKVTVKQLKEDYFKKIECFDSVEISGVEDRFNASLGTYHDLLKIIKDKDFLDNEENEDILEDIVLTLTLFEDREMIEERLKTYAHLFDDKVMKQLKRRRYTGWGRLSRKLINGIRDKQSGKTILDFLKSDGFANRNFMQLIHDDSLTFKEDIQKAQVSGQGDSLHEHIANLAGSPAIKKGILQTVKVVDELVKVMGRHKPENIVIEMARENQTTQKGQKNSRERMKRIEEGIKELGSQILKEHPVENTQLQNEKLYLYYLQNGRDMYVDQELDINRLSDYDVDHIVPQSFLKDDSIDNKVLTRSDKARGKSDNVPSEEVVKKMKNYWRQLLNAKLITQRKFDNLTKAERGGLSELDKAGFIKRQLVETRQITKHVAQILDSRMNTKYDENDKLIREVKVITLKSKLVSDFRKDFQFYKVREINNYHHAHDAYLNAVVGTALIKKYPKLESEFVYGDYKVYDVRKMIAKSEQEIGKATAKYFFYSNIMNFFKTEITLANGEIRKRPLIETNGETGEIVWDKGRDFATVRKVLSMPQVNIVKKTEVQTGGFSKESILPKRNSDKLIARKKDWDPKKYGGFDSPTVAYSVLVVAKVEKGKSKKLKSVKELLGITIMERSSFEKNPIDFLEAKGYKEVKKDLIIKLPKYSLFELENGRKRMLASAGELQKGNELALPSKYVNFLYLASHYEKLKGSPEDNEQKQLFVEQHKHYLDEIIEQISEFSKRVILADANLDKVLSAYNKHRDKPIREQAENIIHLFTLTNLGAPAAFKYFDTTIDRKRYTSTKEVLDATLIHQSITGLYETRIDLSQLGGDGGGGSGGSGGSGGSGGSGGTLQLEEEYRLFEPESTQKQEMDIWLKNFPQAWAETGGMGTAHCQAPVLIQLKATATPISIRQYPMPHEAYQGIKPHIRRMLDQGILKPCQSPWNTPLLPVKKPGTEDYRPVQDLREVNKRVEDIHPTVPNPYNLLSTLPPSHPWYTVLDLKDAFFCLRLHSESQLLFAFEWRDPEIGLSGQLTWTRLPQGFKNSPTLFNEALHSDLADFRVRYPALVLLQYVDDLLLAAATRTECLEGTKALLETLGNKGYRASAKKAQICLQEVTYLGYSLKDGQRWLTKARKEAILSIPVPKNSRQVREFLGKAGYCRLFIPGFAELAAPLYPLTRPGTLFQWGTEQQLAFEDIKKALLSSPALGLPDITKPFELFIDENSGFAKGVLVQKLGPWKRPVAYLSKKLDTVASGWPPCLRMVAAIAILVKDAGKLTLGQPLTILTSHPVEALVRQPPNKWLSNARMTHYQAMLLDAERVHFGPTVSLNPATLLPLPSGGNHHDCLQILAETHGTRPDLTDQPLPDADLTWYTDGSSFIRNGEREAGAAVTTESEVIWAAPLPPGTSAQRAELIALTQALKMAEGKKLTVYTDSRYAFATTHVHGEIYRRRGWLTSEGKEIKNKNEILALLEALFLPKRLSIIHCPGHQKGDSPQAKGNRLADDTAKKAATETHSSLTVLPAGKRTADGSEFEKRTADGSEFESPKKKAKVE

SEQ ID NO: 6060 - protein, 2180 aa, synthetic construct
MPAAKRVKLDGGDKKYSIGLDIGTNSVGWAVITDEYKVPSKKFKVLGNTDRHSIKKNLIGALLFDSGETAEATRLKRTARRRYTRRKNRICYLQEIFSNEMAKVDDSFFHRLEESFLVEEDKKHERHPIFGNIVDEVAYHEKYPTIYHLRKKLVDSTDKADLRLIYLALAHMIKFRGHFLIEGDLNPDNSDVDKLFIQLVQTYNQLFEENPINASGVDAKAILSARLSKSRRLENLIAQLPGEKKNGLFGNLIALSLGLTPNFKSNFDLAEDAKLQLSKDTYDDDLDNLLAQIGDQYADLFLAAKNLSDAILLSDILRVNTEITKAPLSASMIKRYDEHHQDLTLLKALVRQQLPEKYKEIFFDQSKNGYAGYIDGGASQEEFYKFIKPILEKMDGTEELLVKLNREDLLRKQRTFDNGSIPHQIHLGELHAILRRQEDFYPFLKDNREKIEKILTFRIPYYVGPLARGNSRFAWMTRKSEETITPWNFEEVVDKGASAQSFIERMTNFDKNLPNEKVLPKHSLLYEYFTVYNELTKVKYVTEGMRKPAFLSGEQKKAIVDLLFKTNRKVTVKQLKEDYFKKIECFDSVEISGVEDRFNASLGTYHDLLKIIKDKDFLDNEENEDILEDIVLTLTLFEDREMIEERLKTYAHLFDDKVMKQLKRRRYTGWGRLSRKLINGIRDKQSGKTILDFLKSDGFANRNFMQLIHDDSLTFKEDIQKAQVSGQGDSLHEHIANLAGSPAIKKGILQTVKVVDELVKVMGRHKPENIVIEMARENQTTQKGQKNSRERMKRIEEGIKELGSQILKEHPVENTQLQNEKLYLYYLQNGRDMYVDQELDINRLSDYDVDHIVPQSFLKDDSIDNKVLTRSDKARGKSDNVPSEEVVKKMKNYWRQLLNAKLITQRKFDNLTKAERGGLSELDKAGFIKRQLVETRQITKHVAQILDSRMNTKYDENDKLIREVKVITLKSKLVSDFRKDFQFYKVREINNYHHAHDAYLNAVVGTALIKKYPKLESEFVYGDYKVYDVRKMIAKSEQEIGKATAKYFFYSNIMNFFKTEITLANGEIRKRPLIETNGETGEIVWDKGRDFATVRKVLSMPQVNIVKKTEVQTGGFSKESILPKRNSDKLIARKKDWDPKKYGGFDSPTVAYSVLVVAKVEKGKSKKLKSVKELLGITIMERSSFEKNPIDFLEAKGYKEVKKDLIIKLPKYSLFELENGRKRMLASAGELQKGNELALPSKYVNFLYLASHYEKLKGSPEDNEQKQLFVEQHKHYLDEIIEQISEFSKRVILADANLDKVLSAYNKHRDKPIREQAENIIHLFTLTNLGAPAAFKYFDTTIDRKRYTSTKEVLDATLIHQSITGLYETRIDLSQLGGDGGGGSGGSGGSGGSGGSGGMNPLQLLQPLPAEIKGTKLLAHWNSGATITCIPESFLEDEQPIKKTLIKTIHGEKQQNVYYVTFKVKGRKVEAEVIASPYEYILLSPTDVPWLTQQPLQLTILVPLQEYQEKILSKTALPEDQKQQLKTLFVKYDNLWQHWENQVGHRKIRPHNIATGDYPPRPQKQYPINPKAKPSIQIVIDDLLKQGVLTPQNSTMNTPVYPVPKPDGRWRMVLDYREVNKTIPLTAAQNQHSAGILATIVRQKYKTTLDLANGFWAHPITPESYWLTAFTWQGKQYCWTRLPQGFLNSPALFNADVVDLLKEIPNVQVYVDDIYLSHDDPKEHVQQLEKVFQILLQAGYVVSLKKSEIGQKTVEFLGFNITKEGRGLTDTFKTKLLNITPPKDLKQLQSILGKLNFARNFIPNFAELVQPLYNLIAPAKGKYIEWSEENTKQLNMVIEALNTASNLEERLPEQRLVIKVNTSPSAGYVRYYNETGKKPIMYLNYVFSKAELKFSMLEKLLTTMHKALIKAMDLAMGQEILVYSPIVSMTKIQKTPLPERKALPIRWITWMTYLEDPRIQFHYDKTLPELKHIPDVYTSSQSPVKHPSQYEGVFYTDGSAIKSPDPTKSNNAGMGIVHATYKPEYQVLNQWSIPLGNHTAQMAEIAAVEFACKKALKIPGPVLVITDSFYVAESANKELPYWKSNGFVNNKKKPLKHISKWKSIAECLSMKPDITIQHEKGISLQIPVFILKGNALADKLATQGSYVVNAGKRTADGSEFEKRTADGSEFESPKKKAKVE

SEQ ID NO: 6061 - protein, 2098 aa, synthetic construct
MPAAKRVKLDGGDKKYSIGLDIGTNSVGWAVITDEYKVPSKKFKVLGNTDRHSIKKNLIGALLFDSGETAEATRLKRTARRRYTRRKNRICYLQEIFSNEMAKVDDSFFHRLEESFLVEEDKKHERHPIFGNIVDEVAYHEKYPTIYHLRKKLVDSTDKADLRLIYLALAHMIKFRGHFLIEGDLNPDNSDVDKLFIQLVQTYNQLFEENPINASGVDAKAILSARLSKSRRLENLIAQLPGEKKNGLFGNLIALSLGLTPNFKSNFDLAEDAKLQLSKDTYDDDLDNLLAQIGDQYADLFLAAKNLSDAILLSDILRVNTEITKAPLSASMIKRYDEHHQDLTLLKALVRQQLPEKYKEIFFDQSKNGYAGYIDGGASQEEFYKFIKPILEKMDGTEELLVKLNREDLLRKQRTFDNGSIPHQIHLGELHAILRRQEDFYPFLKDNREKIEKILTFRIPYYVGPLARGNSRFAWMTRKSEETITPWNFEEVVDKGASAQSFIERMTNFDKNLPNEKVLPKHSLLYEYFTVYNELTKVKYVTEGMRKPAFLSGEQKKAIVDLLFKTNRKVTVKQLKEDYFKKIECFDSVEISGVEDRFNASLGTYHDLLKIIKDKDFLDNEENEDILEDIVLTLTLFEDREMIEERLKTYAHLFDDKVMKQLKRRRYTGWGRLSRKLINGIRDKQSGKTILDFLKSDGFANRNFMQLIHDDSLTFKEDIQKAQVSGQGDSLHEHIANLAGSPAIKKGILQTVKVVDELVKVMGRHKPENIVIEMARENQTTQKGQKNSRERMKRIEEGIKELGSQILKEHPVENTQLQNEKLYLYYLQNGRDMYVDQELDINRLSDYDVDHIVPQSFLKDDSIDNKVLTRSDKARGKSDNVPSEEVVKKMKNYWRQLLNAKLITQRKFDNLTKAERGGLSELDKAGFIKRQLVETRQITKHVAQILDSRMNTKYDENDKLIREVKVITLKSKLVSDFRKDFQFYKVREINNYHHAHDAYLNAVVGTALIKKYPKLESEFVYGDYKVYDVRKMIAKSEQEIGKATAKYFFYSNIMNFFKTEITLANGEIRKRPLIETNGETGEIVWDKGRDFATVRKVLSMPQVNIVKKTEVQTGGFSKESILPKRNSDKLIARKKDWDPKKYGGFDSPTVAYSVLVVAKVEKGKSKKLKSVKELLGITIMERSSFEKNPIDFLEAKGYKEVKKDLIIKLPKYSLFELENGRKRMLASAGELQKGNELALPSKYVNFLYLASHYEKLKGSPEDNEQKQLFVEQHKHYLDEIIEQISEFSKRVILADANLDKVLSAYNKHRDKPIREQAENIIHLFTLTNLGAPAAFKYFDTTIDRKRYTSTKEVLDATLIHQSITGLYETRIDLSQLGGDGGGGSGGSGGSGGSGGSGGVLNLEEEYRLHEKPVPSSIDPSWLQLFPTVWAERAGMGLANQVPPVVVELRSGASPVAVRQYPMSKEAREGIRPHIQKFLDLGVLVPCRSPWNTPLLPVKKPGTNDYRPVQDLREINKRVQDIHPTVPNPYNLLSSLPPSYTWYSVLDLKDAFFCLRLHPNSQPLFAFEWKDPEKGNTGQLTWTRLPQGFKNSPTLFNEALHRDLAPFRALNPQVVLLQYVDDLLVAAPTYEDCKKGTQKLLQELSKLGYRVSAKKAQLCQREVTYLGYLLKEGKRWLTPARKATVMKIPVPTTPRQVREFLGKAGFCRLFIPGFASLAAPLYPLTKPSIPFIWTEEHQQAFDHIKKALLSAPALALPDLTKPFTLYIDERAGVARGVLTQTLGPWRRPVAYLSKKLDPVASGWPTCLKAVAAVALLLKDADKLTLGQNVTVIASHSLESIVRQPPDRWMTNARMTHYQSLLLNERVSFAPPAVLNPATLLPVESEATPVHRCSEILAEETGTRRDLEDQPLPGVPTWYTDGSSFITEGKRRAGAPIVDGKRTVWASSLPEGTSAQKAELVALTQALRLAEGKNINIYTDSRYAFATAHIHGAIYKQRGWLTSAGKDIKNKEEILALLEAIHLPRRVAIIHCPGHQRGSNPVATGNRRADEAAKQAALSTRVLAGTTKPAGKRTADGSEFEKRTADGSEFESPKKKAKVE

SEQ ID NO: 6062 - protein, 2010 aa, synthetic construct
MPAAKRVKLDGGDKKYSIGLDIGTNSVGWAVITDEYKVPSKKFKVLGNTDRHSIKKNLIGALLFDSGETAEATRLKRTARRRYTRRKNRICYLQEIFSNEMAKVDDSFFHRLEESFLVEEDKKHERHPIFGNIVDEVAYHEKYPTIYHLRKKLVDSTDKADLRLIYLALAHMIKFRGHFLIEGDLNPDNSDVDKLFIQLVQTYNQLFEENPINASGVDAKAILSARLSKSRRLENLIAQLPGEKKNGLFGNLIALSLGLTPNFKSNFDLAEDAKLQLSKDTYDDDLDNLLAQIGDQYADLFLAAKNLSDAILLSDILRVNTEITKAPLSASMIKRYDEHHQDLTLLKALVRQQLPEKYKEIFFDQSKNGYAGYIDGGASQEEFYKFIKPILEKMDGTEELLVKLNREDLLRKQRTFDNGSIPHQIHLGELHAILRRQEDFYPFLKDNREKIEKILTFRIPYYVGPLARGNSRFAWMTRKSEETITPWNFEEVVDKGASAQSFIERMTNFDKNLPNEKVLPKHSLLYEYFTVYNELTKVKYVTEGMRKPAFLSGEQKKAIVDLLFKTNRKVTVKQLKEDYFKKIECFDSVEISGVEDRFNASLGTYHDLLKIIKDKDFLDNEENEDILEDIVLTLTLFEDREMIEERLKTYAHLFDDKVMKQLKRRRYTGWGRLSRKLINGIRDKQSGKTILDFLKSDGFANRNFMQLIHDDSLTFKEDIQKAQVSGQGDSLHEHIANLAGSPAIKKGILQTVKVVDELVKVMGRHKPENIVIEMARENQTTQKGQKNSRERMKRIEEGIKELGSQILKEHPVENTQLQNEKLYLYYLQNGRDMYVDQELDINRLSDYDVDHIVPQSFLKDDSIDNKVLTRSDKARGKSDNVPSEEVVKKMKNYWRQLLNAKLITQRKFDNLTKAERGGLSELDKAGFIKRQLVETRQITKHVAQILDSRMNTKYDENDKLIREVKVITLKSKLVSDFRKDFQFYKVREINNYHHAHDAYLNAVVGTALIKKYPKLESEFVYGDYKVYDVRKMIAKSEQEIGKATAKYFFYSNIMNFFKTEITLANGEIRKRPLIETNGETGEIVWDKGRDFATVRKVLSMPQVNIVKKTEVQTGGFSKESILPKRNSDKLIARKKDWDPKKYGGFDSPTVAYSVLVVAKVEKGKSKKLKSVKELLGITIMERSSFEKNPIDFLEAKGYKEVKKDLIIKLPKYSLFELENGRKRMLASAGELQKGNELALPSKYVNFLYLASHYEKLKGSPEDNEQKQLFVEQHKHYLDEIIEQISEFSKRVILADANLDKVLSAYNKHRDKPIREQAENIIHLFTLTNLGAPAAFKYFDTTIDRKRYTSTKEVLDATLIHQSITGLYETRIDLSQLGGDGGGGSGGSGGSGGSGGSGGPLGTSDSPVTHADPIDWKSEEPVWVDQWPLTQEKLSAAQQLVQEQLRLGHIEPSTSAWNSPIFVIKKKSGKWRLLQDLRKVNETMMHMGALQPGLPTPSAIPDKSYIIVIDLKDCFYTIPLAPQDCKRFAFSLPSVNFKEPMQRYQWRVLPQGMTNSPTLCQKFVATAIAPVRQRFPQLYLVHYMDDILLAHTDEHLLYQAFSILKQHLSLNGLVIADEKIQTHFPYNYLGFSLYPRVYNTQLVKLQTDHLKTLNDFQKLLGDINWIRPYLKLPTYTLQPLFDILKGDSDPASPRTLSLEGRTALQSIEEAIRQQQITYCDYQRSWGLYILPTPRAPTGVLYQDKPLRWIYLSATPTKHLLPYYELVAKIIAKGRHEAIQYFGMEPPFICVPYALEQQDWLFQFSDNWSIAFANYPGQITHHYPSDKLLQFASSHAFIFPKIVRRQPIPEATLIFTDGSSNGTAALIINHQTYYAQTSFSSAQVVELFAVHQALLTVPTSFNLFTDSSYVVGALQMIETVPIIGTTSPEVLNLFTLIQQVLHCRQHPCFFGHIRAHSTLPGALVQGNHTADVLTKQVFFQSAGKRTADGSEFEKRTADGSEFESPKKKAKVE

SEQ ID NO: 6063 - protein, 2131 aa, synthetic construct
MPAAKRVKLDGGDKKYSIGLDIGTNSVGWAVITDEYKVPSKKFKVLGNTDRHSIKKNLIGALLFDSGETAEATRLKRTARRRYTRRKNRICYLQEIFSNEMAKVDDSFFHRLEESFLVEEDKKHERHPIFGNIVDEVAYHEKYPTIYHLRKKLVDSTDKADLRLIYLALAHMIKFRGHFLIEGDLNPDNSDVDKLFIQLVQTYNQLFEENPINASGVDAKAILSARLSKSRRLENLIAQLPGEKKNGLFGNLIALSLGLTPNFKSNFDLAEDAKLQLSKDTYDDDLDNLLAQIGDQYADLFLAAKNLSDAILLSDILRVNTEITKAPLSASMIKRYDEHHQDLTLLKALVRQQLPEKYKEIFFDQSKNGYAGYIDGGASQEEFYKFIKPILEKMDGTEELLVKLNREDLLRKQRTFDNGSIPHQIHLGELHAILRRQEDFYPFLKDNREKIEKILTFRIPYYVGPLARGNSRFAWMTRKSEETITPWNFEEVVDKGASAQSFIERMTNFDKNLPNEKVLPKHSLLYEYFTVYNELTKVKYVTEGMRKPAFLSGEQKKAIVDLLFKTNRKVTVKQLKEDYFKKIECFDSVEISGVEDRFNASLGTYHDLLKIIKDKDFLDNEENEDILEDIVLTLTLFEDREMIEERLKTYAHLFDDKVMKQLKRRRYTGWGRLSRKLINGIRDKQSGKTILDFLKSDGFANRNFMQLIHDDSLTFKEDIQKAQVSGQGDSLHEHIANLAGSPAIKKGILQTVKVVDELVKVMGRHKPENIVIEMARENQTTQKGQKNSRERMKRIEEGIKELGSQILKEHPVENTQLQNEKLYLYYLQNGRDMYVDQELDINRLSDYDVDHIVPQSFLKDDSIDNKVLTRSDKARGKSDNVPSEEVVKKMKNYWRQLLNAKLITQRKFDNLTKAERGGLSELDKAGFIKRQLVETRQITKHVAQILDSRMNTKYDENDKLIREVKVITLKSKLVSDFRKDFQFYKVREINNYHHAHDAYLNAVVGTALIKKYPKLESEFVYGDYKVYDVRKMIAKSEQEIGKATAKYFFYSNIMNFFKTEITLANGEIRKRPLIETNGETGEIVWDKGRDFATVRKVLSMPQVNIVKKTEVQTGGFSKESILPKRNSDKLIARKKDWDPKKYGGFDSPTVAYSVLVVAKVEKGKSKKLKSVKELLGITIMERSSFEKNPIDFLEAKGYKEVKKDLIIKLPKYSLFELENGRKRMLASAGELQKGNELALPSKYVNFLYLASHYEKLKGSPEDNEQKQLFVEQHKHYLDEIIEQISEFSKRVILADANLDKVLSAYNKHRDKPIREQAENIIHLFTLTNLGAPAAFKYFDTTIDRKRYTSTKEVLDATLIHQSITGLYETRIDLSQLGGDGGGGSGGSGGSGGSGGSGGLLGRDLLTKLKAQIQFSTEGPQVTWEDRPAMCLVLNLEEEYRLHEKPVPPSIDPSWLQLFPMVWAEKAGMGLANQVPPVVVELKSDASPVAVRQYPMSKEAREGIRPHIQRFLDLGILVPCQSPWNTPLLPVKKPGTNDYRPVQDLREVNKRVQDIHPTVPNPYNLLSSLPPSHTWYSVLDLKDAFFCLKLHPNSQPLFAFEWRDPEKGNTGQLTWTRLPQGFKNSPTLFNEALHRDLASFRALNPQVVMLQYVDDLLVAAPTYRDCKEGTRRLLQELSKLGYRVSAKKAQLCREEVTYLGYLLKGGKRWLTPARKATVMKIPTPTTPRQVREFLGTAGFCRLWIPGFASLAAPLYPLTRPKVPFTWTEAHQEAFGRIKEALLSAPALALPDLTKPFALYVDEKEGVARGVLTQTLGPWRRPVAYLSKKLDPVASGWPTCLKAIAAVALLLKDADKLTLGQNVLVIAPHNLESIVRQPPDRWMTNARMTHYQSLLLNERVSFAPPAILNPATLLPVESDDTPIHICSEILAEETGTRPDLRDQPLPGVPAWYTDGSSFIMDGRRQAGAAIVDNKRTVWASNLPEGTSAQKAELIALTQALRLAEGKSINIYTDSRYAFATAHVHGAIYKQRGWLTSAGKDIKNKEEILALLEAIHLPKRVAIIHCPGHQRGTDPVATGNRKADEAAKQAAQSTRILTETTKNAGKRTADGSEFEKRTADGSEFESPKKKAKVE

SEQ ID NO: 6064 - protein, 2222 aa, synthetic construct
MPAAKRVKLDGGDKKYSIGLDIGTNSVGWAVITDEYKVPSKKFKVLGNTDRHSIKKNLIGALLFDSGETAEATRLKRTARRRYTRRKNRICYLQEIFSNEMAKVDDSFFHRLEESFLVEEDKKHERHPIFGNIVDEVAYHEKYPTIYHLRKKLVDSTDKADLRLIYLALAHMIKFRGHFLIEGDLNPDNSDVDKLFIQLVQTYNQLFEENPINASGVDAKAILSARLSKSRRLENLIAQLPGEKKNGLFGNLIALSLGLTPNFKSNFDLAEDAKLQLSKDTYDDDLDNLLAQIGDQYADLFLAAKNLSDAILLSDILRVNTEITKAPLSASMIKRYDEHHQDLTLLKALVRQQLPEKYKEIFFDQSKNGYAGYIDGGASQEEFYKFIKPILEKMDGTEELLVKLNREDLLRKQRTFDNGSIPHQIHLGELHAILRRQEDFYPFLKDNREKIEKILTFRIPYYVGPLARGNSRFAWMTRKSEETITPWNFEEVVDKGASAQSFIERMTNFDKNLPNEKVLPKHSLLYEYFTVYNELTKVKYVTEGMRKPAFLSGEQKKAIVDLLFKTNRKVTVKQLKEDYFKKIECFDSVEISGVEDRFNASLGTYHDLLKIIKDKDFLDNEENEDILEDIVLTLTLFEDREMIEERLKTYAHLFDDKVMKQLKRRRYTGWGRLSRKLINGIRDKQSGKTILDFLKSDGFANRNFMQLIHDDSLTFKEDIQKAQVSGQGDSLHEHIANLAGSPAIKKGILQTVKVVDELVKVMGRHKPENIVIEMARENQTTQKGQKNSRERMKRIEEGIKELGSQILKEHPVENTQLQNEKLYLYYLQNGRDMYVDQELDINRLSDYDVDHIVPQSFLKDDSIDNKVLTRSDKARGKSDNVPSEEVVKKMKNYWRQLLNAKLITQRKFDNLTKAERGGLSELDKAGFIKRQLVETRQITKHVAQILDSRMNTKYDENDKLIREVKVITLKSKLVSDFRKDFQFYKVREINNYHHAHDAYLNAVVGTALIKKYPKLESEFVYGDYKVYDVRKMIAKSEQEIGKATAKYFFYSNIMNFFKTEITLANGEIRKRPLIETNGETGEIVWDKGRDFATVRKVLSMPQVNIVKKTEVQTGGFSKESILPKRNSDKLIARKKDWDPKKYGGFDSPTVAYSVLVVAKVEKGKSKKLKSVKELLGITIMERSSFEKNPIDFLEAKGYKEVKKDLIIKLPKYSLFELENGRKRMLASAGELQKGNELALPSKYVNFLYLASHYEKLKGSPEDNEQKQLFVEQHKHYLDEIIEQISEFSKRVILADANLDKVLSAYNKHRDKPIREQAENIIHLFTLTNLGAPAAFKYFDTTIDRKRYTSTKEVLDATLIHQSITGLYETRIDLSQLGGDGGGGSGGSGGSGGSGGSGGTLGDQGSRGSDPLPEPRVTLTVEGIPTEFLVNTGAEHSVLTKPMGKMGSKRTVVAGATGSKVYPWTTKRLLKIGQKQVTHSFLVIPECPAPLLGRDLLTKLKAQIQFSTEGPQVTWEDRPAMCLVLNLEEEYRLHEKPVPPSIDPSWLQLFPMVWAEKAGMGLANQVPPVVVELKSDASPVAVRQYPMSKEAREGIRPHIQRFLDLGILVPCQSPWNTPLLPVKKPGTNDYRPVQDLREVNKRVQDIHPTVPNPYNLLSSLPPSHTWYSVLDLKDAFFCLKLHPNSQPLFAFEWRDPEKGNTGQLTWTRLPQGFKNSPTLFNEALHRDLASFRALNPQVVMLQYVDDLLVAAPTYRDCKEGTRRLLQELSKLGYRVSAKKAQLCREEVTYLGYLLKGGKRWLTPARKATVMKIPTPTTPRQVREFLGTAGFCRLWIPGFASLAAPLYPLTRPKVPFTWTEAHQEAFGRIKEALLSAPALALPDLTKPFALYVDEKEGVARGVLTQTLGPWRRPVAYLSKKLDPVASGWPTCLKAIAAVALLLKDADKLTLGQNVLVIAPHNLESIVRQPPDRWMTNARMTHYQSLLLNERVSFAPPAILNPATLLPVESDDTPIHICSEILAEETGTRPDLRDQPLPGVPAWYTDGSSFIMDGRRQAGAAIVDNKRTVWASNLPEGTSAQKAELIALTQALRLAEGKSINIYTDSRYAFATAHVHGAIYKQRGWLTSAGKDIKNKEEILALLEAIHLPKRVAIIHCPGHQRGTDPVATGNRKADEAAKQAAQSTRILTETTKNAGKRTADGSEFEKRTADGSEFESPKKKAKVE

SEQ ID NO: 6065 - protein, 2222 aa, synthetic construct
MPAAKRVKLDGGDKKYSIGLDIGTNSVGWAVITDEYKVPSKKFKVLGNTDRHSIKKNLIGALLFDSGETAEATRLKRTARRRYTRRKNRICYLQEIFSNEMAKVDDSFFHRLEESFLVEEDKKHERHPIFGNIVDEVAYHEKYPTIYHLRKKLVDSTDKADLRLIYLALAHMIKFRGHFLIEGDLNPDNSDVDKLFIQLVQTYNQLFEENPINASGVDAKAILSARLSKSRRLENLIAQLPGEKKNGLFGNLIALSLGLTPNFKSNFDLAEDAKLQLSKDTYDDDLDNLLAQIGDQYADLFLAAKNLSDAILLSDILRVNTEITKAPLSASMIKRYDEHHQDLTLLKALVRQQLPEKYKEIFFDQSKNGYAGYIDGGASQEEFYKFIKPILEKMDGTEELLVKLNREDLLRKQRTFDNGSIPHQIHLGELHAILRRQEDFYPFLKDNREKIEKILTFRIPYYVGPLARGNSRFAWMTRKSEETITPWNFEEVVDKGASAQSFIERMTNFDKNLPNEKVLPKHSLLYEYFTVYNELTKVKYVTEGMRKPAFLSGEQKKAIVDLLFKTNRKVTVKQLKEDYFKKIECFDSVEISGVEDRFNASLGTYHDLLKIIKDKDFLDNEENEDILEDIVLTLTLFEDREMIEERLKTYAHLFDDKVMKQLKRRRYTGWGRLSRKLINGIRDKQSGKTILDFLKSDGFANRNFMQLIHDDSLTFKEDIQKAQVSGQGDSLHEHIANLAGSPAIKKGILQTVKVVDELVKVMGRHKPENIVIEMARENQTTQKGQKNSRERMKRIEEGIKELGSQILKEHPVENTQLQNEKLYLYYLQNGRDMYVDQELDINRLSDYDVDHIVPQSFLKDDSIDNKVLTRSDKARGKSDNVPSEEVVKKMKNYWRQLLNAKLITQRKFDNLTKAERGGLSELDKAGFIKRQLVETRQITKHVAQILDSRMNTKYDENDKLIREVKVITLKSKLVSDFRKDFQFYKVREINNYHHAHDAYLNAVVGTALIKKYPKLESEFVYGDYKVYDVRKMIAKSEQEIGKATAKYFFYSNIMNFFKTEITLANGEIRKRPLIETNGETGEIVWDKGRDFATVRKVLSMPQVNIVKKTEVQTGGFSKESILPKRNSDKLIARKKDWDPKKYGGFDSPTVAYSVLVVAKVEKGKSKKLKSVKELLGITIMERSSFEKNPIDFLEAKGYKEVKKDLIIKLPKYSLFELENGRKRMLASAGELQKGNELALPSKYVNFLYLASHYEKLKGSPEDNEQKQLFVEQHKHYLDEIIEQISEFSKRVILADANLDKVLSAYNKHRDKPIREQAENIIHLFTLTNLGAPAAFKYFDTTIDRKRYTSTKEVLDATLIHQSITGLYETRIDLSQLGGDGGGGSGGSGGSGGSGGSGGTLGDQGSRGSDPLPEPRVTLTVEGIPTEFLVNTGAEHSVLTKPMGKMGSKRTVVAGATGSKVYPWTTKRLLKIGQKQVTHSFLVIPECPAPLLGRDLLTKLKAQIQFSTEGPQVTWEDRPAMCLVLNLEEEYRLHEKPVPPSIDPSWLQLFPMVWAEKAGMGLANQVPPVVVELKSDASPVAVRQYPMSKEAREGIRPHIQRFLDLGILVPCQSPWNTPLLPVKKPGTNDYRPVQDLREVNKRVQDIHPTVPNPYNLLSSLPPSHTWYSVLDLKDAFFCLKLHPNSQPLFAFEWRDPEKGNTGQLTWTRLPQGFKNSPTLFNEALHRDLASFRALNPQVVMLQYVDDLLVAAPTYRDCKEGTRRLLQELSKLGYRVSAKKAQLCREEVTYLGYLLKGGKRWLTPARKATVMKIPTPTTPRQVREFLGKAGFCRLFIPGFASLAAPLYPLTRPKVPFTWTEAHQEAFGRIKEALLSAPALALPDLTKPFALYVDEKEGVARGVLTQTLGPWRRPVAYLSKKLDPVASGWPTCLKAIAAVALLLKDADKLTLGQNVLVIAPHNLESIVRQPPDRWMTNARMTHYQSLLLNERVSFAPPAILNPATLLPVESDDTPIHICSEILAEETGTRPDLRDQPLPGVPAWYTDGSSFIMDGRRQAGAAIVDNKRTVWASNLPEGTSAQKAELIALTQALRLAEGKSINIYTDSRYAFATAHVHGAIYKQRGWLTSAGKDIKNKEEILALLEAIHLPKRVAIIHCPGHQRGTDPVATGNRKADEAAKQAAQSTRILTETTKNAGKRTADGSEFEKRTADGSEFESPKKKAKVE

SEQ ID NO: 6066 - protein, 2100 aa, synthetic construct
MPAAKRVKLDGGDKKYSIGLDIGTNSVGWAVITDEYKVPSKKFKVLGNTDRHSIKKNLIGALLFDSGETAEATRLKRTARRRYTRRKNRICYLQEIFSNEMAKVDDSFFHRLEESFLVEEDKKHERHPIFGNIVDEVAYHEKYPTIYHLRKKLVDSTDKADLRLIYLALAHMIKFRGHFLIEGDLNPDNSDVDKLFIQLVQTYNQLFEENPINASGVDAKAILSARLSKSRRLENLIAQLPGEKKNGLFGNLIALSLGLTPNFKSNFDLAEDAKLQLSKDTYDDDLDNLLAQIGDQYADLFLAAKNLSDAILLSDILRVNTEITKAPLSASMIKRYDEHHQDLTLLKALVRQQLPEKYKEIFFDQSKNGYAGYIDGGASQEEFYKFIKPILEKMDGTEELLVKLNREDLLRKQRTFDNGSIPHQIHLGELHAILRRQEDFYPFLKDNREKIEKILTFRIPYYVGPLARGNSRFAWMTRKSEETITPWNFEEVVDKGASAQSFIERMTNFDKNLPNEKVLPKHSLLYEYFTVYNELTKVKYVTEGMRKPAFLSGEQKKAIVDLLFKTNRKVTVKQLKEDYFKKIECFDSVEISGVEDRFNASLGTYHDLLKIIKDKDFLDNEENEDILEDIVLTLTLFEDREMIEERLKTYAHLFDDKVMKQLKRRRYTGWGRLSRKLINGIRDKQSGKTILDFLKSDGFANRNFMQLIHDDSLTFKEDIQKAQVSGQGDSLHEHIANLAGSPAIKKGILQTVKVVDELVKVMGRHKPENIVIEMARENQTTQKGQKNSRERMKRIEEGIKELGSQILKEHPVENTQLQNEKLYLYYLQNGRDMYVDQELDINRLSDYDVDHIVPQSFLKDDSIDNKVLTRSDKARGKSDNVPSEEVVKKMKNYWRQLLNAKLITQRKFDNLTKAERGGLSELDKAGFIKRQLVETRQITKHVAQILDSRMNTKYDENDKLIREVKVITLKSKLVSDFRKDFQFYKVREINNYHHAHDAYLNAVVGTALIKKYPKLESEFVYGDYKVYDVRKMIAKSEQEIGKATAKYFFYSNIMNFFKTEITLANGEIRKRPLIETNGETGEIVWDKGRDFATVRKVLSMPQVNIVKKTEVQTGGFSKESILPKRNSDKLIARKKDWDPKKYGGFDSPTVAYSVLVVAKVEKGKSKKLKSVKELLGITIMERSSFEKNPIDFLEAKGYKEVKKDLIIKLPKYSLFELENGRKRMLASAGELQKGNELALPSKYVNFLYLASHYEKLKGSPEDNEQKQLFVEQHKHYLDEIIEQISEFSKRVILADANLDKVLSAYNKHRDKPIREQAENIIHLFTLTNLGAPAAFKYFDTTIDRKRYTSTKEVLDATLIHQSITGLYETRIDLSQLGGDGGGGSGGSGGSGGSGGSGGTLGIEDEYRLHETSTEPDVSLGSTWLSDFPQAWAETGGMGLAVRQAPLIIPLKATSTPVSIQQYPMSHEARLGIKPHIQRLLDQGILVPCQSPWNTPLLPVKKPGTNDYRPVQDLREVNKRVEDIHPTVPNPYNLLSGLPPSHQWYTVLDLKDAFFCLRLHPTSQPLFAFEWRDPGMGISGQLTWTRLPQGFKNSPTLFNEALHRDLADFRIQHPDLILLQYVDDILLAATSELDCQQGTRALLQTLGDLGYRASAKKAQICQKQVKYLGYLLREGQRWLTEARKETVMGQPVPKTPRQLREFLGTAGFCRLWIPGFAEMAAPLYPLTKPGTLFSWGPDQQKAYQEIKQALLTAPALGLPDLTKPFELFVDEKQGYAKGVLTQKLGPWRRPVAYLSKKLDPVAAGWPPCLRMVAAIAVLTKDAGKLTMGQPLVILAPHAVEALVKQPPDRWLSNARMTHYQAMLLDTDRVQFGPVVALNPATLLPLPEEGAPHDCLEILAETHGTRPDLTDQPIPDADHTWYTDGSSFLQEGQRKAGAAVTTETEVIWAGALPAGTSAQRAELIALTQALKMAEGKRLNVYTDSRYAFATAHIHGEIYRRRGWLTSEGREIKNKSEILALLKALFLPKRLSIIHCLGHQKGDSAEARGNRLADQAAREAAIKTPPDTSTLLAGKRTADGSEFEKRTADGSEFESPKKKAKVE

SEQ ID NO: 6067 - protein, 2100 aa, synthetic construct
MPAAKRVKLDGGDKKYSIGLDIGTNSVGWAVITDEYKVPSKKFKVLGNTDRHSIKKNLIGALLFDSGETAEATRLKRTARRRYTRRKNRICYLQEIFSNEMAKVDDSFFHRLEESFLVEEDKKHERHPIFGNIVDEVAYHEKYPTIYHLRKKLVDSTDKADLRLIYLALAHMIKFRGHFLIEGDLNPDNSDVDKLFIQLVQTYNQLFEENPINASGVDAKAILSARLSKSRRLENLIAQLPGEKKNGLFGNLIALSLGLTPNFKSNFDLAEDAKLQLSKDTYDDDLDNLLAQIGDQYADLFLAAKNLSDAILLSDILRVNTEITKAPLSASMIKRYDEHHQDLTLLKALVRQQLPEKYKEIFFDQSKNGYAGYIDGGASQEEFYKFIKPILEKMDGTEELLVKLNREDLLRKQRTFDNGSIPHQIHLGELHAILRRQEDFYPFLKDNREKIEKILTFRIPYYVGPLARGNSRFAWMTRKSEETITPWNFEEVVDKGASAQSFIERMTNFDKNLPNEKVLPKHSLLYEYFTVYNELTKVKYVTEGMRKPAFLSGEQKKAIVDLLFKTNRKVTVKQLKEDYFKKIECFDSVEISGVEDRFNASLGTYHDLLKIIKDKDFLDNEENEDILEDIVLTLTLFEDREMIEERLKTYAHLFDDKVMKQLKRRRYTGWGRLSRKLINGIRDKQSGKTILDFLKSDGFANRNFMQLIHDDSLTFKEDIQKAQVSGQGDSLHEHIANLAGSPAIKKGILQTVKVVDELVKVMGRHKPENIVIEMARENQTTQKGQKNSRERMKRIEEGIKELGSQILKEHPVENTQLQNEKLYLYYLQNGRDMYVDQELDINRLSDYDVDHIVPQSFLKDDSIDNKVLTRSDKARGKSDNVPSEEVVKKMKNYWRQLLNAKLITQRKFDNLTKAERGGLSELDKAGFIKRQLVETRQITKHVAQILDSRMNTKYDENDKLIREVKVITLKSKLVSDFRKDFQFYKVREINNYHHAHDAYLNAVVGTALIKKYPKLESEFVYGDYKVYDVRKMIAKSEQEIGKATAKYFFYSNIMNFFKTEITLANGEIRKRPLIETNGETGEIVWDKGRDFATVRKVLSMPQVNIVKKTEVQTGGFSKESILPKRNSDKLIARKKDWDPKKYGGFDSPTVAYSVLVVAKVEKGKSKKLKSVKELLGITIMERSSFEKNPIDFLEAKGYKEVKKDLIIKLPKYSLFELENGRKRMLASAGELQKGNELALPSKYVNFLYLASHYEKLKGSPEDNEQKQLFVEQHKHYLDEIIEQISEFSKRVILADANLDKVLSAYNKHRDKPIREQAENIIHLFTLTNLGAPAAFKYFDTTIDRKRYTSTKEVLDATLIHQSITGLYETRIDLSQLGGDGGGGSGGSGGSGGSGGSGGTLNIEDEYRLHETSKEPDVSLGSTWLSDFPQAWAETGGMGLAVRQAPLIIPLKATSTPVSIKQYPMSQEARLGIKPHIQRLLDQGILVPCQSPWNTPLLPVKKPGTNDYRPVQDLREVNKRVEDIHPTVPNPYNLLSGLPPSHQWYTVLDLKDAFFCLRLHPTSQPLFAFEWRDPEMGISGQLTWTRLPQGFKNSPTLFNEALHRDLAGFRIQHPDLILLQYVDDLLLAATSELDCQQGTRALLQTLGDLGYRASAKKAQICQKQVKYLGYLLKEGQRWLTEARKETVMGQPIPKTPRQLREFLGTAGFCRLWIPGFAEMAAPLYPLTKPGTLFNWGPDQQKAFQEIKQALLTAPALGLPDLTKPFELFVDEKQGYAKGVLTQKLGPWRRPVAYLSKKLDPVAAGWPPCLRMVAAIAVLTKDAGKLTMGQPLVILAPHAVEALVKQPPDRWLSNARMTHYQALLLDTDRVQFGPVVALNPATLLPLPEEGLQHDCLDILAEAHGTRSDLMDQPLPDADHTWYTDGSSFLQEGQRKAGAAVTTETEVIWARALPAGTSAQRAELIALTQALKMAEGKKLNVYTDSRYAFATAHIHGEIYRRRGWLTSEGKEIKNKDEILALLKALFLPKRLSIIHCPGHQKGNSAEARGNRMADQAAREVATRETPETSTLLAGKRTADGSEFEKRTADGSEFESPKKKAKVE

SEQ ID NO: 6068 - protein, 2100 aa, synthetic construct
MPAAKRVKLDGGDKKYSIGLDIGTNSVGWAVITDEYKVPSKKFKVLGNTDRHSIKKNLIGALLFDSGETAEATRLKRTARRRYTRRKNRICYLQEIFSNEMAKVDDSFFHRLEESFLVEEDKKHERHPIFGNIVDEVAYHEKYPTIYHLRKKLVDSTDKADLRLIYLALAHMIKFRGHFLIEGDLNPDNSDVDKLFIQLVQTYNQLFEENPINASGVDAKAILSARLSKSRRLENLIAQLPGEKKNGLFGNLIALSLGLTPNFKSNFDLAEDAKLQLSKDTYDDDLDNLLAQIGDQYADLFLAAKNLSDAILLSDILRVNTEITKAPLSASMIKRYDEHHQDLTLLKALVRQQLPEKYKEIFFDQSKNGYAGYIDGGASQEEFYKFIKPILEKMDGTEELLVKLNREDLLRKQRTFDNGSIPHQIHLGELHAILRRQEDFYPFLKDNREKIEKILTFRIPYYVGPLARGNSRFAWMTRKSEETITPWNFEEVVDKGASAQSFIERMTNFDKNLPNEKVLPKHSLLYEYFTVYNELTKVKYVTEGMRKPAFLSGEQKKAIVDLLFKTNRKVTVKQLKEDYFKKIECFDSVEISGVEDRFNASLGTYHDLLKIIKDKDFLDNEENEDILEDIVLTLTLFEDREMIEERLKTYAHLFDDKVMKQLKRRRYTGWGRLSRKLINGIRDKQSGKTILDFLKSDGFANRNFMQLIHDDSLTFKEDIQKAQVSGQGDSLHEHIANLAGSPAIKKGILQTVKVVDELVKVMGRHKPENIVIEMARENQTTQKGQKNSRERMKRIEEGIKELGSQILKEHPVENTQLQNEKLYLYYLQNGRDMYVDQELDINRLSDYDVDHIVPQSFLKDDSIDNKVLTRSDKARGKSDNVPSEEVVKKMKNYWRQLLNAKLITQRKFDNLTKAERGGLSELDKAGFIKRQLVETRQITKHVAQILDSRMNTKYDENDKLIREVKVITLKSKLVSDFRKDFQFYKVREINNYHHAHDAYLNAVVGTALIKKYPKLESEFVYGDYKVYDVRKMIAKSEQEIGKATAKYFFYSNIMNFFKTEITLANGEIRKRPLIETNGETGEIVWDKGRDFATVRKVLSMPQVNIVKKTEVQTGGFSKESILPKRNSDKLIARKKDWDPKKYGGFDSPTVAYSVLVVAKVEKGKSKKLKSVKELLGITIMERSSFEKNPIDFLEAKGYKEVKKDLIIKLPKYSLFELENGRKRMLASAGELQKGNELALPSKYVNFLYLASHYEKLKGSPEDNEQKQLFVEQHKHYLDEIIEQISEFSKRVILADANLDKVLSAYNKHRDKPIREQAENIIHLFTLTNLGAPAAFKYFDTTIDRKRYTSTKEVLDATLIHQSITGLYETRIDLSQLGGDGGGGSGGSGGSGGSGGSGGTLNIEDEHRLHETSKEPDVSLGSTWLSDFPQAWAETGGMGLAVRQAPLIIPLKATSTPVSIKQYPMSQEARLGIKPHIQRLLDQGILVPCQSPWNTPLLPVKKPGTNDYRPVQDLREVNKRVEDIHPTVPNPYNLLSGLPPSHQWYTVLDLKDAFFCLRLHPTSQPLFAFEWRDPEMGISGQLTWTRLPQGFKNSPTLFDEALHRDLADFRIQHPDLILLQYVDDLLLAATSELDCQQGTRALLQTLGNLGYRASAKKAQICQKQVKYLGYLLKEGQRWLTEARKETVMGQPTPKTPRQLREFLGTAGFCRLWIPGFAEMAAPLYPLTKTGTLFNWGPDQQKAYQEIKQALLTAPALGLPDLTKPFELFVDEKQGYAKGVLTQKLGPWRRPVAYLSKKLDPVAAGWPPCLRMVAAIAVLTKDAGKLTMGQPLVILAPHAVEALVKQPPDRWLSNARMTHYQALLLDTDRVQFGPVVALNPATLLPLPEEGLQHNCLDILAEAHGTRPDLTDQPLPDADHTWYTDGSSLLQEGQRKAGAAVTTETEVIWAKALPAGTSAQRAELIALTQALKMAEGKKLNVYTDSRYAFATAHIHGEIYRRRGLLTSEGKEIKNKDEILALLKALFLPKRLSIIHCPGHQKGHSAEARGNRMADQAARKAAITETPDTSTLLAGKRTADGSEFEKRTADGSEFESPKKKAKVE

SEQ ID NO: 6069 - protein, 2094 aa, synthetic construct
MPAAKRVKLDGGDKKYSIGLDIGTNSVGWAVITDEYKVPSKKFKVLGNTDRHSIKKNLIGALLFDSGETAEATRLKRTARRRYTRRKNRICYLQEIFSNEMAKVDDSFFHRLEESFLVEEDKKHERHPIFGNIVDEVAYHEKYPTIYHLRKKLVDSTDKADLRLIYLALAHMIKFRGHFLIEGDLNPDNSDVDKLFIQLVQTYNQLFEENPINASGVDAKAILSARLSKSRRLENLIAQLPGEKKNGLFGNLIALSLGLTPNFKSNFDLAEDAKLQLSKDTYDDDLDNLLAQIGDQYADLFLAAKNLSDAILLSDILRVNTEITKAPLSASMIKRYDEHHQDLTLLKALVRQQLPEKYKEIFFDQSKNGYAGYIDGGASQEEFYKFIKPILEKMDGTEELLVKLNREDLLRKQRTFDNGSIPHQIHLGELHAILRRQEDFYPFLKDNREKIEKILTFRIPYYVGPLARGNSRFAWMTRKSEETITPWNFEEVVDKGASAQSFIERMTNFDKNLPNEKVLPKHSLLYEYFTVYNELTKVKYVTEGMRKPAFLSGEQKKAIVDLLFKTNRKVTVKQLKEDYFKKIECFDSVEISGVEDRFNASLGTYHDLLKIIKDKDFLDNEENEDILEDIVLTLTLFEDREMIEERLKTYAHLFDDKVMKQLKRRRYTGWGRLSRKLINGIRDKQSGKTILDFLKSDGFANRNFMQLIHDDSLTFKEDIQKAQVSGQGDSLHEHIANLAGSPAIKKGILQTVKVVDELVKVMGRHKPENIVIEMARENQTTQKGQKNSRERMKRIEEGIKELGSQILKEHPVENTQLQNEKLYLYYLQNGRDMYVDQELDINRLSDYDVDHIVPQSFLKDDSIDNKVLTRSDKARGKSDNVPSEEVVKKMKNYWRQLLNAKLITQRKFDNLTKAERGGLSELDKAGFIKRQLVETRQITKHVAQILDSRMNTKYDENDKLIREVKVITLKSKLVSDFRKDFQFYKVREINNYHHAHDAYLNAVVGTALIKKYPKLESEFVYGDYKVYDVRKMIAKSEQEIGKATAKYFFYSNIMNFFKTEITLANGEIRKRPLIETNGETGEIVWDKGRDFATVRKVLSMPQVNIVKKTEVQTGGFSKESILPKRNSDKLIARKKDWDPKKYGGFDSPTVAYSVLVVAKVEKGKSKKLKSVKELLGITIMERSSFEKNPIDFLEAKGYKEVKKDLIIKLPKYSLFELENGRKRMLASAGELQKGNELALPSKYVNFLYLASHYEKLKGSPEDNEQKQLFVEQHKHYLDEIIEQISEFSKRVILADANLDKVLSAYNKHRDKPIREQAENIIHLFTLTNLGAPAAFKYFDTTIDRKRYTSTKEVLDATLIHQSITGLYETRIDLSQLGGDGGGGSGGSGGSGGSGGSGGTLQLDDEYRLYSPLVKPDQNIQFWLEQFPQAWAETAGMGLAKQVPPQVIQLKASATPVSVRQYPLSKEAQEGIRPHVQRLIQQGILVPVQSPWNTPLLPVRKPGTNDYRPVQDLREVNKRVQDIHPTVPNPYNLLCALPPQRSWYTVLDLKDAFFCLRLHPTSQPLFAFEWRDPGTGRTGQLTWTRLPQGFKNSPTIFDEALHRDLANFRIQHPQVTLLQYVDDLLLAGATKQDCLEGTKALLLELSDLGYRASAKKAQICRREVTYLGYSLRDGQRWLTEARKKTVVQIPAPTTAKQVREFLGTAGFCRLWIPGFATLAAPLYPLTKEKGEFSWAPEHQKAFDAIKKALLSAPALALPDVTKPFTLYVDERKGVARGVLTQTLGPWRRPVAYLSKKLDPVASGWPVCLKAIAAVAILVKDADKLTLGQNITVIAPHALENIVRQPPDRWMTNARMTHYQSLLLTERVTFAPPAALNPATLLPEETDEPVTHDCHQLLIEETGVRKDLTDIPLTGEVLTWFTDGSSYVVEGKRMAGAAVVDGTRTIWASSLPEGTSAQKAELMALTQALRLAEGKSINIYTDSRYAFATAHVHGAIYKQRGLLTSAGREIKNKEEILSLLEALHLPKRLAIIHCPGHQKAKDPISRGNQMADRVAKQAAQGVNLLAGKRTADGSEFEKRTADGSEFESPKKKAKVE

SEQ ID NO: 6070 - protein, 2094 aa, synthetic construct; identical to SEQ ID NO: 6069

SEQ ID NO: 6071 - protein, 2180 aa, synthetic construct
MPAAKRVKLDGGDKKYSIGLDIGTNSVGWAVITDEYKVPSKKFKVLGNTDRHSIKKNLIGALLFDSGETAEATRLKRTARRRYTRRKNRICYLQEIFSNEMAKVDDSFFHRLEESFLVEEDKKHERHPIFGNIVDEVAYHEKYPTIYHLRKKLVDSTDKADLRLIYLALAHMIKFRGHFLIEGDLNPDNSDVDKLFIQLVQTYNQLFEENPINASGVDAKAILSARLSKSRRLENLIAQLPGEKKNGLFGNLIALSLGLTPNFKSNFDLAEDAKLQLSKDTYDDDLDNLLAQIGDQYADLFLAAKNLSDAILLSDILRVNTEITKAPLSASMIKRYDEHHQDLTLLKALVRQQLPEKYKEIFFDQSKNGYAGYIDGGASQEEFYKFIKPILEKMDGTEELLVKLNREDLLRKQRTFDNGSIPHQIHLGELHAILRRQEDFYPFLKDNREKIEKILTFRIPYYVGPLARGNSRFAWMTRKSEETITPWNFEEVVDKGASAQSFIERMTNFDKNLPNEKVLPKHSLLYEYFTVYNELTKVKYVTEGMRKPAFLSGEQKKAIVDLLFKTNRKVTVKQLKEDYFKKIECFDSVEISGVEDRFNASLGTYHDLLKIIKDKDFLDNEENEDILEDIVLTLTLFEDREMIEERLKTYAHLFDDKVMKQLKRRRYTGWGRLSRKLINGIRDKQSGKTILDFLKSDGFANRNFMQLIHDDSLTFKEDIQKAQVSGQGDSLHEHIANLAGSPAIKKGILQTVKVVDELVKVMGRHKPENIVIEMARENQTTQKGQKNSRERMKRIEEGIKELGSQILKEHPVENTQLQNEKLYLYYLQNGRDMYVDQELDINRLSDYDVDHIVPQSFLKDDSIDNKVLTRSDKARGKSDNVPSEEVVKKMKNYWRQLLNAKLITQRKFDNLTKAERGGLSELDKAGFIKRQLVETRQITKHVAQILDSRMNTKYDENDKLIREVKVITLKSKLVSDFRKDFQFYKVREINNYHHAHDAYLNAVVGTALIKKYPKLESEFVYGDYKVYDVRKMIAKSEQEIGKATAKYFFYSNIMNFFKTEITLANGEIRKRPLIETNGETGEIVWDKGRDFATVRKVLSMPQVNIVKKTEVQTGGFSKESILPKRNSDKLIARKKDWDPKKYGGFDSPTVAYSVLVVAKVEKGKSKKLKSVKELLGITIMERSSFEKNPIDFLEAKGYKEVKKDLIIKLPKYSLFELENGRKRMLASAGELQKGNELALPSKYVNFLYLASHYEKLKGSPEDNEQKQLFVEQHKHYLDEIIEQISEFSKRVILADANLDKVLSAYNKHRDKPIREQAENIIHLFTLTNLGAPAAFKYFDTTIDRKRYTSTKEVLDATLIHQSITGLYETRIDLSQLGGDGGGGSGGSGGSGGSGGSGGMDPLQLLQPLEAEIKGTKLKAHWNSGATITCVPQAFLEEEVPIKNIWIKTIHGEKEQPVYYLTFKIQGRKVEAEVISSPYDYILVSPSDIPWLMKKPLQLTTLVPLQEYEERLLKQTMLTGSYKEKLQSLFLKYDALWQHWENQVGHRRIKPHHIATGTVNPRPQKQYPINPKAKASIQTVINDLLKQGVLIQQNSIMNTPVYPVPKPDGKWRMVLDYREVNKTIPLIAAQNQHSAGILSSIFRGKYKTTLDLSNGFWAHSITPESYWLTAFTWLGQQYCWTRLPQGFLNSPALFNADVVDLLKEVPNVQVYVDDIYISHDDPREHLEQLEKVFSLLLNAGYVVSLKKSEIAQHEVEFLGFNITKEGRGLTETFKQKLLNITPPRDLKQLQSILGLLNFARNFIPNFSELVKPLYNIIATAPGKYITWTTDNSQQLQNIISMLNSAENLEERNPEVRLIMKVNTSPSAGYIRFYNEFAKRPIMYLNYVYTKAEVKFTNTEKLLTTIHKGLIKALDLGMGQEILVYSPIVSMTKIQKTPLPERKALPIRWITWMSYLEDPRIQFHYDKTLPELQQVPTVTDDIIAKIKHPSEFSMVFYTDGSAIKHPNVNKSHNAGMGIAQVQFKPEFTVINTWSIPLGDHTAQLAEVAAVEFACKKALKIDGPVLIVTDSFYVAESVNKELPYWQSNGFFNNKKKPLKHVSKWKSIADCIQLKPDIIIIHEKGHQPTASTFHTEGNNLADKLATQGSYVVNAGKRTADGSEFEKRTADGSEFESPKKKAKVE

SEQ ID NO: 6072 - protein, 2180 aa, synthetic construct
MPAAKRVKLDGGDKKYSIGLDIGTNSVGWAVITDEYKVPSKKFKVLGNTDRHSIKKNLIGALLFDSGETAEATRLKRTARRRYTRRKNRICYLQEIFSNEMAKVDDSFFHRLEESFLVEEDKKHERHPIFGNIVDEVAYHEKYPTIYHLRKKLVDSTDKADLRLIYLALAHMIKFRGHFLIEGDLNPDNSDVDKLFIQLVQTYNQLFEENPINASGVDAKAILSARLSKSRRLENLIAQLPGEKKNGLFGNLIALSLGLTPNFKSNFDLAEDAKLQLSKDTYDDDLDNLLAQIGDQYADLFLAAKNLSDAILLSDILRVNTEITKAPLSASMIKRYDEHHQDLTLLKALVRQQLPEKYKEIFFDQSKNGYAGYIDGGASQEEFYKFIKPILEKMDGTEELLVKLNREDLLRKQRTFDNGSIPHQIHLGELHAILRRQEDFYPFLKDNREKIEKILTFRIPYYVGPLARGNSRFAWMTRKSEETITPWNFEEVVDKGASAQSFIERMTNFDKNLPNEKVLPKHSLLYEYFTVYNELTKVKYVTEGMRKPAFLSGEQKKAIVDLLFKTNRKVTVKQLKEDYFKKIECFDSVEISGVEDRFNASLGTYHDLLKIIKDKDFLDNEENEDILEDIVLTLTLFEDREMIEERLKTYAHLFDDKVMKQLKRRRYTGWGRLSRKLINGIRDKQSGKTILDFLKSDGFANRNFMQLIHDDSLTFKEDIQKAQVSGQGDSLHEHIANLAGSPAIKKGILQTVKVVDELVKVMGRHKPENIVIEMARENQTTQKGQKNSRERMKRIEEGIKELGSQILKEHPVENTQLQNEKLYLYYLQNGRDMYVDQELDINRLSDYDVDHIVPQSFLKDDSIDNKVLTRSDKARGKSDNVPSEEVVKKMKNYWRQLLNAKLITQRKFDNLTKAERGGLSELDKAGFIKRQLVETRQITKHVAQILDSRMNTKYDENDKLIREVKVITLKSKLVSDFRKDFQFYKVREINNYHHAHDAYLNAVVGTALIKKYPKLESEFVYGDYKVYDVRKMIAKSEQEIGKATAKYFFYSNIMNFFKTEITLANGEIRKRPLIETNGETGEIVWDKGRDFATVRKVLSMPQVNIVKKTEVQTGGFSKESILPKRNSDKLIARKKDWDPKKYGGFDSPTVAYSVLVVAKVEKGKSKKLKSVKELLGITIMERSSFEKNPIDFLEAKGYKEVKKDLIIKLPKYSLFELENGRKRMLASAGELQKGNELALPSKYVNFLYLASHYEKLKGSPEDNEQKQLFVEQHKHYLDEIIEQISEFSKRVILADANLDKVLSAYNKHRDKPIREQAENIIHLFTLTNLGAPAAFKYFDTTIDRKRYTSTKEVLDATLIHQSITGLYETRIDLSQLGGDGGGGSGGSGGSGGSGGSGGMDPLQLLQPLEAEIKGTKLKAHWNSGATITCVPQAFLEEEVPIKNIWIKTIHGEKEQPVYYLTFKIQGRKVEAEVISSPYDYILVSPSDIPWLMKKPLQLTTLVPLQEYEERLLKQTMLTGSYKEKLQSLFLKYDALWQHWENQVGHRRIKPHHIATGTVNPRPQKQYPINPKAKASIQTVINDLLKQGVLIQQNSIMNTPVYPVPKPDGKWRMVLDYREVNKTIPLIAAQNQHSAGILSSIFRGKYKTTLDLSNGFWAHSITPESYWLTAFTWLGQQYCWTRLPQGFLNSPALFNADVVDLLKEVPNVQVYVDDIYISHDDPREHLEQLEKVFSLLLNAGYVVSLKKSEIAQHEVEFLGFNITKEGRGLTETFKQKLLNITPPRDLKQLQSILGKLNFARNFIPNFSELVKPLYNIIATAPGKYITWTTDNSQQLQNIISMLNSAENLEERNPEVRLIMKVNTSPSAGYIRFYNEFAKRPIMYLNYVYTKAEVKFTNTEKLLTTIHKGLIKALDLGMGQEILVYSPIVSMTKIQKTPLPERKALPIRWITWMSYLEDPRIQFHYDKTLPELQQVPTVTDDIIAKIKHPSEFSMVFYTDGSAIKHPNVNKSHNAGMGIAQVQFKPEFTVINTWSIPLGDHTAQLAEVAAVEFACKKALKIDGPVLIVTDSFYVAESVNKELPYWQSNGFFNNKKKPLKHVSKWKSIADCIQLKPDIIIIHEKGHQPTASTFHTEGNNLADKLATQGSYVVNAGKRTADGSEFEKRTADGSEFESPKKKAKVE

SEQ ID NO: 6073 - protein, 2098 aa, synthetic construct; identical to SEQ ID NO: 4502

SEQ ID NO: 6074 - protein, 2098 aa, synthetic construct
MPAAKRVKLDGGDKKYSIGLDIGTNSVGWAVITDEYKVPSKKFKVLGNTDRHSIKKNLIGALLFDSGETAEATRLKRTARRRYTRRKNRICYLQEIFSNEMAKVDDSFFHRLEESFLVEEDKKHERHPIFGNIVDEVAYHEKYPTIYHLRKKLVDSTDKADLRLIYLALAHMIKFRGHFLIEGDLNPDNSDVDKLFIQLVQTYNQLFEENPINASGVDAKAILSARLSKSRRLENLIAQLPGEKKNGLFGNLIALSLGLTPNFKSNFDLAEDAKLQLSKDTYDDDLDNLLAQIGDQYADLFLAAKNLSDAILLSDILRVNTEITKAPLSASMIKRYDEHHQDLTLLKALVRQQLPEKYKEIFFDQSKNGYAGYIDGGASQEEFYKFIKPILEKMDGTEELLVKLNREDLLRKQRTFDNGSIPHQIHLGELHAILRRQEDFYPFLKDNREKIEKILTFRIPYYVGPLARGNSRFAWMTRKSEETITPWNFEEVVDKGASAQSFIERMTNFDKNLPNEKVLPKHSLLYEYFTVYNELTKVKYVTEGMRKPAFLSGEQKKAIVDLLFKTNRKVTVKQLKEDYFKKIECFDSVEISGVEDRFNASLGTYHDLLKIIKDKDFLDNEENEDILEDIVLTLTLFEDREMIEERLKTYAHLFDDKVMKQLKRRRYTGWGRLSRKLINGIRDKQSGKTILDFLKSDGFANRNFMQLIHDDSLTFKEDIQKAQVSGQGDSLHEHIANLAGSPAIKKGILQTVKVVDELVKVMGRHKPENIVIEMARENQTTQKGQKNSRERMKRIEEGIKELGSQILKEHPVENTQLQNEKLYLYYLQNGRDMYVDQELDINRLSDYDVDHIVPQSFLKDDSIDNKVLTRSDKARGKSDNVPSEEVVKKMKNYWRQLLNAKLITQRKFDNLTKAERGGLSELDKAGFIKRQLVETRQITKHVAQILDSRMNTKYDENDKLIREVKVITLKSKLVSDFRKDFQFYKVREINNYHHAHDAYLNAVVGTALIKKYPKLESEFVYGDYKVYDVRKMIAKSEQEIGKATAKYFFYSNIMNFFKTEITLANGEIRKRPLIETNGETGEIVWDKGRDFATVRKVLSMPQVNIVKKTEVQTGGFSKESILPKRNSDKLIARKKDWDPKKYGGFDSPTVAYSVLVVAKVEKGKSKKLKSVKELLGITIMERSSFEKNPIDFLEAKGYKEVKKDLIIKLPKYSLFELENGRKRMLASAGELQKGNELALPSKYVNFLYLASHYEKLKGSPEDNEQKQLFVEQHKHYLDEIIEQISEFSKRVILADANLDKVLSAYNKHRDKPIREQAENIIHLFTLTNLGAPAAFKYFDTTIDRKRYTSTKEVLDATLIHQSITGLYETRIDLSQLGGDGGGGSGGSGGSGGSGGSGGVLNLEEEYRLHEKPVPSSIDPSWLQLFPTVWAERAGMGLANQVPPVVVELRSGASPVAVRQYPMSKEAREGIRPHIQRFLDLGVLVPCQSPWNTPLLPVKKPGTNDYRPVQDLREINKRVQDIHPTVPNPYNLLSSLPPSHTWYSVLDLKDAFFCLKLHPNSQPLFAFEWRDPEKGNTGQLTWTRLPQGFKNSPTLFNEALHRDLAPFRALNPQVVLLQYVDDLLVAAPTYRDCKEGTQKLLQELSKLGYRVSAKKAQLCQKEVTYLGYLLKEGKRWLTPARKATVMKIPPPTTPRQVREFLGKAGFCRLFIPGFASLAAPLYPLTKPSIPFIWTEEHQKAFDRIKEALLSAPALALPDLTKPFTLYVDERAGVARGVLTQTLGPWRRPVAYLSKKLDPVASGWPTCLKAVAAVALLLKDADKLTLGQNVTVIASHSLESIVRQPPDRWMTNARMTHYQSLLLNERVSFAPPAVLNPATLLPVESEATPVHRCSEILAEETGTRRDLKDQPLPGVPAWYTDGSSFIAEGKRRAGAAIVDGKRTVWASSLPEGTSAQKAELVALTQALRLAEGKDINIYTDSRYAFATAHIHGAIYKQRGWLTSAGKDIKNKEEILALLEAIHLPKRVAIIHCPGHQKGNDPVATGNRRADEAAKQAALSTRVLAETTKPAGKRTADGSEFEKRTADGSEFESPKKKAKVE

SEQ ID NO: 6075 - protein, 2100 aa, synthetic construct
MPAAKRVKLDGGDKKYSIGLDIGTNSVGWAVITDEYKVPSKKFKVLGNTDRHSIKKNLIGALLFDSGETAEATRLKRTARRRYTRRKNRICYLQEIFSNEMAKVDDSFFHRLEESFLVEEDKKHERHPIFGNIVDEVAYHEKYPTIYHLRKKLVDSTDKADLRLIYLALAHMIKFRGHFLIEGDLNPDNSDVDKLFIQLVQTYNQLFEENPINASGVDAKAILSARLSKSRRLENLIAQLPGEKKNGLFGNLIALSLGLTPNFKSNFDLAEDAKLQLSKDTYDDDLDNLLAQIGDQYADLFLAAKNLSDAILLSDILRVNTEITKAPLSASMIKRYDEHHQDLTLLKALVRQQLPEKYKEIFFDQSKNGYAGYIDGGASQEEFYKFIKPILEKMDGTEELLVKLNREDLLRKQRTFDNGSIPHQIHLGELHAILRRQEDFYPFLKDNREKIEKILTFRIPYYVGPLARGNSRFAWMTRKSEETITPWNFEEVVDKGASAQSFIERMTNFDKNLPNEKVLPKHSLLYEYFTVYNELTKVKYVTEGMRKPAFLSGEQKKAIVDLLFKTNRKVTVKQLKEDYFKKIECFDSVEISGVEDRFNASLGTYHDLLKIIKDKDFLDNEENEDILEDIVLTLTLFEDREMIEERLKTYAHLFDDKVMKQLKRRRYTGWGRLSRKLINGIRDKQSGKTILDFLKSDGFANRNFMQLIHDDSLTFKEDIQKAQVSGQGDSLHEHIANLAGSPAIKKGILQTVKVVDELVKVMGRHKPENIVIEMARENQTTQKGQKNSRERMKRIEEGIKELGSQILKEHPVENTQLQNEKLYLYYLQNGRDMYVDQELDINRLSDYDVDHIVPQSFLKDDSIDNKVLTRSDKARGKSDNVPSEEVVKKMKNYWRQLLNAKLITQRKFDNLTKAERGGLSELDKAGFIKRQLVETRQITKHVAQILDSRMNTKYDENDKLIREVKVITLKSKLVSDFRKDFQFYKVREINNYHHAHDAYLNAVVGTALIKKYPKLESEFVYGDYKVYDVRKMIAKSEQEIGKATAKYFFYSNIMNFFKTEITLANGEIRKRPLIETNGETGEIVWDKGRDFATVRKVLSMPQVNIVKKTEVQTGGFSKESILPKRNSDKLIARKKDWDPKKYGGFDSPTVAYSVLVVAKVEKGKSKKLKSVKELLGITIMERSSFEKNPIDFLEAKGYKEVKKDLIIKLPKYSLFELENGRKRMLASAGELQKGNELALPSKYVNFLYLASHYEKLKGSPEDNEQKQLFVEQHKHYLDEIIEQISEFSKRVILADANLDKVLSAYNKHRDKPIREQAENIIHLFTLTNLGAPAAFKYFDTTIDRKRYTSTKEVLDATLIHQSITGLYETRIDLSQLGGDGGGGSGGSGGSGGSGGSGGTLNIEDEYRLHETSKEPDVPLGSTWLSDFPQAWAETGGMGLAVRQAPLIIPLKATSTPVSIKQYPMSQEARLGIKPHIQRLLDQGILVPCQSPWNTPLLPVKKPGTNDYRPVQDLREVNKRVEDIHPTVPNPYNLLSGLPPSHQWYTVLDLKDAFFCLRLHPTSQPLFAFEWRDPEMGISGQLTWTRLPQGFKNSPTLFNEALHRDLADFRIQHPDLILLQYVDDLLLAATSEQDCQRGTRALLQTLGNLGYRASAKKAQICQKQVKYLGYLLKEGQRWLTEARKETVMGQPTPKTPRQLREFLGKAGFCRLFIPGFAEMAAPLYPLTKPGTLFNWGPDQQKAYQEIKQALLTAPALGLPDLTKPFELFVDEKQGYAKGVLTQKLGPWRRPVAYLSKKLDPVAAGWPPCLRMVAAIAVLTKDAGKLTMGQPLVILAPHAVEALVKQPPDRWLSNARMTHYQAMLLDTDRVQFGPVVALNPATLLPLPEKEAPHDCLEILAETHGTRPDLTDQPIPDADYTWYTDGSSFLQEGQRRAGAAVTTETEVIWARALPAGTSAQRAELIALTQALKMAEGKKLNVYTDSRYAFATAHVHGEIYRRRGWLTSEGREIKNKNEILALLKALFLPKRLSIIHCPGHQKGNSAEARGNRMADQAAREAAMKAVLETSTLLAGKRTADGSEFEKRTADGSEFESPKKKAKVE

SEQ ID NO: 6076 - protein, 2105 aa, synthetic construct
MPAAKRVKLDGGDKKYSIGLDIGTNSVGWAVITDEYKVPSKKFKVLGNTDRHSIKKNLIGALLFDSGETAEATRLKRTARRRYTRRKNRICYLQEIFSNEMAKVDDSFFHRLEESFLVEEDKKHERHPIFGNIVDEVAYHEKYPTIYHLRKKLVDSTDKADLRLIYLALAHMIKFRGHFLIEGDLNPDNSDVDKLFIQLVQTYNQLFEENPINASGVDAKAILSARLSKSRRLENLIAQLPGEKKNGLFGNLIALSLGLTPNFKSNFDLAEDAKLQLSKDTYDDDLDNLLAQIGDQYADLFLAAKNLSDAILLSDILRVNTEITKAPLSASMIKRYDEHHQDLTLLKALVRQQLPEKYKEIFFDQSKNGYAGYIDGGASQEEFYKFIKPILEKMDGTEELLVKLNREDLLRKQRTFDNGSIPHQIHLGELHAILRRQEDFYPFLKDNREKIEKILTFRIPYYVGPLARGNSRFAWMTRKSEETITPWNFEEVVDKGASAQSFIERMTNFDKNLPNEKVLPKHSLLYEYFTVYNELTKVKYVTEGMRKPAFLSGEQKKAIVDLLFKTNRKVTVKQLKEDYFKKIECFDSVEISGVEDRFNASLGTYHDLLKIIKDKDFLDNEENEDILEDIVLTLTLFEDREMIEERLKTYAHLFDDKVMKQLKRRRYTGWGRLSRKLINGIRDKQSGKTILDFLKSDGFANRNFMQLIHDDSLTFKEDIQKAQVSGQGDSLHEHIANLAGSPAIKKGILQTVKVVDELVKVMGRHKPENIVIEMARENQTTQKGQKNSRERMKRIEEGIKELGSQILKEHPVENTQLQNEKLYLYYLQNGRDMYVDQELDINRLSDYDVDHIVPQSFLKDDSIDNKVLTRSDKARGKSDNVPSEEVVKKMKNYWRQLLNAKLITQRKFDNLTKAERGGLSELDKAGFIKRQLVETRQITKHVAQILDSRMNTKYDENDKLIREVKVITLKSKLVSDFRKDFQFYKVREINNYHHAHDAYLNAVVGTALIKKYPKLESEFVYGDYKVYDVRKMIAKSEQEIGKATAKYFFYSNIMNFFKTEITLANGEIRKRPLIETNGETGEIVWDKGRDFATVRKVLSMPQVNIVKKTEVQTGGFSKESILPKRNSDKLIARKKDWDPKKYGGFDSPTVAYSVLVVAKVEKGKSKKLKSVKELLGITIMERSSFEKNPIDFLEAKGYKEVKKDLIIKLPKYSLFELENGRKRMLASAGELQKGNELALPSKYVNFLYLASHYEKLKGSPEDNEQKQLFVEQHKHYLDEIIEQISEFSKRVILADANLDKVLSAYNKHRDKPIREQAENIIHLFTLTNLGAPAAFKYFDTTIDRKRYTSTKEVLDATLIHQSITGLYETRIDLSQLGGDGGGGSGGSGGSGGSGGSGGSGGTAPLEEEYRLFLEAPIQNVTLLEQWKREIPKVWAEINPPGLASTQAPIHVQLLSTALPVRVRQYPITLEAKRSLRETIRKFRAAGILRPVHSPWNTPLLPVRKSGTSEYRMVQDLREVNKRVETIHPTVPNPYTLLSLLPPDRIWYSVLDLKDAFFCIPLAPESQLIFAFEWADAEEGESGQLTWTRLPQGFKNSPTLFDEALNRDLQGFRLDHPSVSLLQYVDDLLIAADTQAACLSATRDLLMTLAELGYRVSGKKAQLCQEEVTYLGFKIHKGSRSLSNSRTQAILQIPVPKTKRQVREFLGTIGYCRLWIPGFAELAQPLYAATRGGNDPLVWGEKEEEAFQSLKLALTQPPALALPSLDKPFQLFVEETSGAAKGVLTQALGPWKRPVAYLSKRLDPVAAGWPRCLRAIAAAALLTREASKLTFGQDIEITSSHNLESLLRSPPDKWLTNARITQYQVLLLDPPRVRFKQTAALNPATLLPETDDTLPIHHCLDTLDSLTSTRPDLTDQPLAQAEATLFTDGSSYIRDGKRYAGAAVVTLDSVIWAEPLPIGTSAQKAELIALTKALEWSKDKSVNIYTDSRYAFATLHVHGMIYRERGLLTAGGKAIKNAPEILALLTAVWLPKRVAVMHCKGHQKDDAPTSTGNRRADEVAREVAIRPLSTQATISAGKRTADGSEFEKRTADGSEFESPKKKAKVE

SEQ ID NO: 6077 - protein, 2105 aa, synthetic construct
MPAAKRVKLDGGDKKYSIGLDIGTNSVGWAVITDEYKVPSKKFKVLGNTDRHSIKKNLIGALLFDSGETAEATRLKRTARRRYTRRKNRICYLQEIFSNEMAKVDDSFFHRLEESFLVEEDKKHERHPIFGNIVDEVAYHEKYPTIYHLRKKLVDSTDKADLRLIYLALAHMIKFRGHFLIEGDLNPDNSDVDKLFIQLVQTYNQLFEENPINASGVDAKAILSARLSKSRRLENLIAQLPGEKKNGLFGNLIALSLGLTPNFKSNFDLAEDAKLQLSKDTYDDDLDNLLAQIGDQYADLFLAAKNLSDAILLSDILRVNTEITKAPLSASMIKRYDEHHQDLTLLKALVRQQLPEKYKEIFFDQSKNGYAGYIDGGASQEEFYKFIKPILEKMDGTEELLVKLNREDLLRKQRTFDNGSIPHQIHLGELHAILRRQEDFYPFLKDNREKIEKILTFRIPYYVGPLARGNSRFAWMTRKSEETITPWNFEEVVDKGASAQSFIERMTNFDKNLPNEKVLPKHSLLYEYFTVYNELTKVKYVTEGMRKPAFLSGEQKKAIVDLLFKTNRKVTVKQLKEDYFKKIECFDSVEISGVEDRFNASLGTYHDLLKIIKDKDFLDNEENEDILEDIVLTLTLFEDREMIEERLKTYAHLFDDKVMKQLKRRRYTGWGRLSRKLINGIRDKQSGKTILDFLKSDGFANRNFMQLIHDDSLTFKEDIQKAQVSGQGDSLHEHIANLAGSPAIKKGILQTVKVVDELVKVMGRHKPENIVIEMARENQTTQKGQKNSRERMKRIEEGIKELGSQILKEHPVENTQLQNEKLYLYYLQNGRDMYVDQELDINRLSDYDVDHIVPQSFLKDDSIDNKVLTRSDKARGKSDNVPSEEVVKKMKNYWRQLLNAKLITQRKFDNLTKAERGGLSELDKAGFIKRQLVETRQITKHVAQILDSRMNTKYDENDKLIREVKVITLKSKLVSDFRKDFQFYKVREINNYHHAHDAYLNAVVGTALIKKYPKLESEFVYGDYKVYDVRKMIAKSEQEIGKATAKYFFYSNIMNFFKTEITLANGEIRKRPLIETNGETGEIVWDKGRDFATVRKVLSMPQVNIVKKTEVQTGGFSKESILPKRNSDKLIARKKDWDPKKYGGFDSPTVAYSVLVVAKVEKGKSKKLKSVKELLGITIMERSSFEKNPIDFLEAKGYKEVKKDLIIKLPKYSLFELENGRKRMLASAGELQKGNELALPSKYVNFLYLASHYEKLKGSPEDNEQKQLFVEQHKHYLDEIIEQISEFSKRVILADANLDKVLSAYNKHRDKPIREQAENIIHLFTLTNLGAPAAFKYFDTTIDRKRYTSTKEVLDATLIHQSITGLYETRIDLSQLGGDGGGGSGGSGGSGGSGGSGGSGGTAPLEEEYRLFLEAPIQNVTLLEQWKREIPKVWAEINPPGLASTQAPIHVQLLSTALPVRVRQYPITLEAKRSLRETIRKFRAAGILRPVHSPWNTPLLPVRKSGTSEYRMVQDLREVNKRVETIHPTVPNPYTLLSLLPPDRIWYSVLDLKDAFFCIPLAPESQLIFAFEWADAEEGESGQLTWTRLPQGFKNSPTLFNEALNRDLQGFRLDHPSVSLLQYVDDLLIAADTQAACLSATRDLLMTLAELGYRVSGKKAQLCQEEVTYLGFKIHKGSRSLSNSRTQAILQIPVPKTKRQVREFLGTIGYCRLWIPGFAELAQPLYAATRPGNDPLVWGEKEEEAFQSLKLALTQPPALALPSLDKPFQLFVEETSGAAKGVLTQALGPWKRPVAYLSKRLDPVAAGWPRCLRAIAAAALLTREASKLTFGQDIEITSSHNLESLLRSPPDKWLTNARITQYQVLLLDPPRVRFKQTAALNPATLLPETDDTLPIHHCLDTLDSLTSTRPDLTDQPLAQAEATLFTDGSSYIRDGKRYAGAAVVTLDSVIWAEPLPIGTSAQKAELIALTKALEWSKDKSVNIYTDSRYAFATLHVHGMIYRERGWLTAGGKAIKNAPEILALLTAVWLPKRVAVMHCKGHQKDDAPTSTGNRRADEVAREVAIRPLSTQATISAGKRTADGSEFEKRTADGSEFESPKKKAKVE

SEQ ID NO: 6078 - protein, 2105 aa, synthetic construct
MPAAKRVKLDGGDKKYSIGLDIGTNSVGWAVITDEYKVPSKKFKVLGNTDRHSIKKNLIGALLFDSGETAEATRLKRTARRRYTRRKNRICYLQEIFSNEMAKVDDSFFHRLEESFLVEEDKKHERHPIFGNIVDEVAYHEKYPTIYHLRKKLVDSTDKADLRLIYLALAHMIKFRGHFLIEGDLNPDNSDVDKLFIQLVQTYNQLFEENPINASGVDAKAILSARLSKSRRLENLIAQLPGEKKNGLFGNLIALSLGLTPNFKSNFDLAEDAKLQLSKDTYDDDLDNLLAQIGDQYADLFLAAKNLSDAILLSDILRVNTEITKAPLSASMIKRYDEHHQDLTLLKALVRQQLPEKYKEIFFDQSKNGYAGYIDGGASQEEFYKFIKPILEKMDGTEELLVKLNREDLLRKQRTFDNGSIPHQIHLGELHAILRRQEDFYPFLKDNREKIEKILTFRIPYYVGPLARGNSRFAWMTRKSEETITPWNFEEVVDKGASAQSFIERMTNFDKNLPNEKVLPKHSLLYEYFTVYNELTKVKYVTEGMRKPAFLSGEQKKAIVDLLFKTNRKVTVKQLKEDYFKKIECFDSVEISGVEDRFNASLGTYHDLLKIIKDKDFLDNEENEDILEDIVLTLTLFEDREMIEERLKTYAHLFDDKVMKQLKRRRYTGWGRLSRKLINGIRDKQSGKTILDFLKSDGFANRNFMQLIHDDSLTFKEDIQKAQVSGQGDSLHEHIANLAGSPAIKKGILQTVKVVDELVKVMGRHKPENIVIEMARENQTTQKGQKNSRERMKRIEEGIKELGSQILKEHPVENTQLQNEKLYLYYLQNGRDMYVDQELDINRLSDYDVDHIVPQSFLKDDSIDNKVLTRSDKARGKSDNVPSEEVVKKMKNYWRQLLNAKLITQRKFDNLTKAERGGLSELDKAGFIKRQLVETRQITKHVAQILDSRMNTKYDENDKLIREVKVITLKSKLVSDFRKDFQFYKVREINNYHHAHDAYLNAVVGTALIKKYPKLESEFVYGDYKVYDVRKMIAKSEQEIGKATAKYFFYSNIMNFFKTEITLANGEIRKRPLIETNGETGEIVWDKGRDFATVRKVLSMPQVNIVKKTEVQTGGFSKESILPKRNSDKLIARKKDWDPKKYGGFDSPTVAYSVLVVAKVEKGKSKKLKSVKELLGITIMERSSFEKNPIDFLEAKGYKEVKKDLIIKLPKYSLFELENGRKRMLASAGELQKGNELALPSKYVNFLYLASHYEKLKGSPEDNEQKQLFVEQHKHYLDEIIEQISEFSKRVILADANLDKVLSAYNKHRDKPIREQAENIIHLFTLTNLGAPAAFKYFDTTIDRKRYTSTKEVLDATLIHQSITGLYETRIDLSQLGGDGGGGSGGSGGSGGSGGSGGSGGTAPLEEEYRLFLEAPIQNVTLLEQWKREIPKVWAEINPPGLASTQAPIHVQLLSTALPVRVRQYPITLEAKRSLRETIRKFRAAGILRPVHSPWNTPLLPVRKSGTSEYRMVQDLREVNKRVETIHPTVPNPYTLLSLLPPDRIWYSVLDLKDAFFCIPLAPESQLIFAFEWADAEEGESGQLTWTRLPQGFKNSPTLFNEALNRDLQGFRLDHPSVSLLQYVDDLLIAADTQAACLSATRDLLMTLAELGYRVSGKKAQLCQEEVTYLGFKIHKGSRSLSNSRTQAILQIPVPKTKRQVREFLGKIGYCRLFIPGFAELAQPLYAATRPGNDPLVWGEKEEEAFQSLKLALTQPPALALPSLDKPFQLFVEETSGAAKGVLTQALGPWKRPVAYLSKRLDPVAAGWPRCLRAIAAAALLTREASKLTFGQDIEITSSHNLESLLRSPPDKWLTNARITQYQVLLLDPPRVRFKQTAALNPATLLPETDDTLPIHHCLDTLDSLTSTRPDLTDQPLAQAEATLFTDGSSYIRDGKRYAGAAVVTLDSVIWAEPLPIGTSAQKAELIALTKALEWSKDKSVNIYTDSRYAFATLHVHGMIYRERGWLTAGGKAIKNAPEILALLTAVWLPKRVAVMHCKGHQKDDAPTSTGNRRADEVAREVAIRPLSTQATISAGKRTADGSEFEKRTADGSEFESPKKKAKVE

SEQ ID NO: 6079 - protein, 2109 aa, synthetic construct
MPAAKRVKLDGGDKKYSIGLDIGTNSVGWAVITDEYKVPSKKFKVLGNTDRHSIKKNLIGALLFDSGETAEATRLKRTARRRYTRRKNRICYLQEIFSNEMAKVDDSFFHRLEESFLVEEDKKHERHPIFGNIVDEVAYHEKYPTIYHLRKKLVDSTDKADLRLIYLALAHMIKFRGHFLIEGDLNPDNSDVDKLFIQLVQTYNQLFEENPINASGVDAKAILSARLSKSRRLENLIAQLPGEKKNGLFGNLIALSLGLTPNFKSNFDLAEDAKLQLSKDTYDDDLDNLLAQIGDQYADLFLAAKNLSDAILLSDILRVNTEITKAPLSASMIKRYDEHHQDLTLLKALVRQQLPEKYKEIFFDQSKNGYAGYIDGGASQEEFYKFIKPILEKMDGTEELLVKLNREDLLRKQRTFDNGSIPHQIHLGELHAILRRQEDFYPFLKDNREKIEKILTFRIPYYVGPLARGNSRFAWMTRKSEETITPWNFEEVVDKGASAQSFIERMTNFDKNLPNEKVLPKHSLLYEYFTVYNELTKVKYVTEGMRKPAFLSGEQKKAIVDLLFKTNRKVTVKQLKEDYFKKIECFDSVEISGVEDRFNASLGTYHDLLKIIKDKDFLDNEENEDILEDIVLTLTLFEDREMIEERLKTYAHLFDDKVMKQLKRRRYTGWGRLSRKLINGIRDKQSGKTILDFLKSDGFANRNFMQLIHDDSLTFKEDIQKAQVSGQGDSLHEHIANLAGSPAIKKGILQTVKVVDELVKVMGRHKPENIVIEMARENQTTQKGQKNSRERMKRIEEGIKELGSQILKEHPVENTQLQNEKLYLYYLQNGRDMYVDQELDINRLSDYDVDHIVPQSFLKDDSIDNKVLTRSDKARGKSDNVPSEEVVKKMKNYWRQLLNAKLITQRKFDNLTKAERGGLSELDKAGFIKRQLVETRQITKHVAQILDSRMNTKYDENDKLIREVKVITLKSKLVSDFRKDFQFYKVREINNYHHAHDAYLNAVVGTALIKKYPKLESEFVYGDYKVYDVRKMIAKSEQEIGKATAKYFFYSNIMNFFKTEITLANGEIRKRPLIETNGETGEIVWDKGRDFATVRKVLSMPQVNIVKKTEVQTGGFSKESILPKRNSDKLIARKKDWDPKKYGGFDSPTVAYSVLVVAKVEKGKSKKLKSVKELLGITIMERSSFEKNPIDFLEAKGYKEVKKDLIIKLPKYSLFELENGRKRMLASAGELQKGNELALPSKYVNFLYLASHYEKLKGSPEDNEQKQLFVEQHKHYLDEIIEQISEFSKRVILADANLDKVLSAYNKHRDKPIREQAENIIHLFTLTNLGAPAAFKYFDTTIDRKRYTSTKEVLDATLIHQSITGLYETRIDLSQLGGDGGGGSGGSGGSGGSGGSGGSGGTVSLQDEHRLFDIPVTTSLPDVWLQDFPQAWAETGGLGRAKCQAPIIIDLKPTAVPVSIKQYPMSLEAHMGIRQHIIKFLELGVLRPCRSPWNTPLLPVKKPGTQDYRPVQDLREINKRTVDIHPTVPNPYNLLSTLKPDYSWYTVLDLKDAFFCLPLAPQSQELFAFEWKDPERGISGQLTWTRLPQGFKNSPTLFNEALHRDLTDFRTQHPEVTLLQYVDDLLLAAPTKKACTQGTRHLLQELGEKGYRASAKKAQICQTKVTYLGYILSEGKRWLTPGRIETVARIPPPRNPREVREFLGTAGFCRLWIPGFAELAAPLYALTKPSTPFTWQTEHQLAFEALKKALLSAPALGLPDTSKPFTLFLDERQGIAKGVLTQKLGPWKRPVAYLSKKLDPVAAGWPPCLRIMAATAMLVKDSAKLTLGQPLTVITPHTLEAIVRQPPDRWITNARLTHYQALLLDTDRVQFGPPVTLNPATLLPVPENQPSPHDCRQVLAETHGTREDLKDQELPDADHTWYTDGSSYLDSGTRRAGAAVVDGHNTIWAQSLPPGTSAQKAELIALTKALELSKGKKANIYTDSRYAFATAHTHGSIYERRGWLTSEGKEIKNKAEIIALLKALFLPQEVAIIHCPGHQKGQDPVAVGNRQADRVARQAAMAEVLTLATEPDNTSHITAGKRTADGSEFEKRTADGSEFESPKKKAKVE

SEQ ID NO: 6080 - protein, 2094 aa, synthetic construct
MPAAKRVKLDGGDKKYSIGLDIGTNSVGWAVITDEYKVPSKKFKVLGNTDRHSIKKNLIGALLFDSGETAEATRLKRTARRRYTRRKNRICYLQEIFSNEMAKVDDSFFHRLEESFLVEEDKKHERHPIFGNIVDEVAYHEKYPTIYHLRKKLVDSTDKADLRLIYLALAHMIKFRGHFLIEGDLNPDNSDVDKLFIQLVQTYNQLFEENPINASGVDAKAILSARLSKSRRLENLIAQLPGEKKNGLFGNLIALSLGLTPNFKSNFDLAEDAKLQLSKDTYDDDLDNLLAQIGDQYADLFLAAKNLSDAILLSDILRVNTEITKAPLSASMIKRYDEHHQDLTLLKALVRQQLPEKYKEIFFDQSKNGYAGYIDGGASQEEFYKFIKPILEKMDGTEELLVKLNREDLLRKQRTFDNGSIPHQIHLGELHAILRRQEDFYPFLKDNREKIEKILTFRIPYYVGPLARGNSRFAWMTRKSEETITPWNFEEVVDKGASAQSFIERMTNFDKNLPNEKVLPKHSLLYEYFTVYNELTKVKYVTEGMRKPAFLSGEQKKAIVDLLFKTNRKVTVKQLKEDYFKKIECFDSVEISGVEDRFNASLGTYHDLLKIIKDKDFLDNEENEDILEDIVLTLTLFEDREMIEERLKTYAHLFDDKVMKQLKRRRYTGWGRLSRKLINGIRDKQSGKTILDFLKSDGFANRNFMQLIHDDSLTFKEDIQKAQVSGQGDSLHEHIANLAGSPAIKKGILQTVKVVDELVKVMGRHKPENIVIEMARENQTTQKGQKNSRERMKRIEEGIKELGSQILKEHPVENTQLQNEKLYLYYLQNGRDMYVDQELDINRLSDYDVDHIVPQSFLKDDSIDNKVLTRSDKARGKSDNVPSEEVVKKMKNYWRQLLNAKLITQRKFDNLTKAERGGLSELDKAGFIKRQLVETRQITKHVAQILDSRMNTKYDENDKLIREVKVITLKSKLVSDFRKDFQFYKVREINNYHHAHDAYLNAVVGTALIKKYPKLESEFVYGDYKVYDVRKMIAKSEQEIGKATAKYFFYSNIMNFFKTEITLANGEIRKRPLIETNGETGEIVWDKGRDFATVRKVLSMPQVNIVKKTEVQTGGFSKESILPKRNSDKLIARKKDWDPKKYGGFDSPTVAYSVLVVAKVEKGKSKKLKSVKELLGITIMERSSFEKNPIDFLEAKGYKEVKKDLIIKLPKYSLFELENGRKRMLASAGELQKGNELALPSKYVNFLYLASHYEKLKGSPEDNEQKQLFVEQHKHYLDEIIEQISEFSKRVILADANLDKVLSAYNKHRDKPIREQAENIIHLFTLTNLGAPAAFKYFDTTIDRKRYTSTKEVLDATLIHQSITGLYETRIDLSQLGGDGGGGSGGSGGSGGSGGSGGSGGVPWILKKPLELTIKLDLEEQQGTLLNNSILSKKGKEELKQLFEKYSALWQSWENQVGHRRIRPHKIATGTVKPTPQKQYHINPKAKPDIQIVINDLLKQGVLIQKESTMNTPVYPVPKPNGRWRMVLDYRAVNKVTPLIAVQNQHSYGILGSLFKGRYKTTIDLSNGFWAHPIVPEDYWITAFTWQGKQYCWTVLPQGFLNSPGLFTGDVVDLLQGIPNVEVYVDDVYISHDSEKEHLEYLDILFNRLKEAGYIISLKKSNIANSIVDFLGFQITNEGRGLTDTFKEKLENITAPTTLKQLQSILGLLNFARNFIPDFTELIAPLYALIPKSTKNYVPWQIEHSTTLETLITKLNGAEYLQGRKGDKTLIMKVNASYTTGYIRYYNEGEKKPISYVSIVFSKTELKFTELEKLLTTVHKGLLKALDLSMGQNIHVYSPIVSMQNIQKTPQTAKKALASRWLSWLSYLEDPRIRFFYDPQMPALKDLPAVDTGKDNKKHPSNFQHIFYTDGSAITSPTKEGHLNAGMGIVYFINKDGNLQKQQEWSISLGNHTAQFAEIAAFEFALKKCLPLGGNILVVTDSNYVAKAYNEELDVWASNGFVNNRKKPLKHISKWKSVADLKRLRPDVVVTHEPGHQKLDSSPHAYGNNLADQLATQASFKVHAGKRTADGSEFEKRTADGSEFESPKKKAKVE

SEQ ID NO: 6081 - protein, 2180 aa, synthetic construct
MPAAKRVKLDGGDKKYSIGLDIGTNSVGWAVITDEYKVPSKKFKVLGNTDRHSIKKNLIGALLFDSGETAEATRLKRTARRRYTRRKNRICYLQEIFSNEMAKVDDSFFHRLEESFLVEEDKKHERHPIFGNIVDEVAYHEKYPTIYHLRKKLVDSTDKADLRLIYLALAHMIKFRGHFLIEGDLNPDNSDVDKLFIQLVQTYNQLFEENPINASGVDAKAILSARLSKSRRLENLIAQLPGEKKNGLFGNLIALSLGLTPNFKSNFDLAEDAKLQLSKDTYDDDLDNLLAQIGDQYADLFLAAKNLSDAILLSDILRVNTEITKAPLSASMIKRYDEHHQDLTLLKALVRQQLPEKYKEIFFDQSKNGYAGYIDGGASQEEFYKFIKPILEKMDGTEELLVKLNREDLLRKQRTFDNGSIPHQIHLGELHAILRRQEDFYPFLKDNREKIEKILTFRIPYYVGPLARGNSRFAWMTRKSEETITPWNFEEVVDKGASAQSFIERMTNFDKNLPNEKVLPKHSLLYEYFTVYNELTKVKYVTEGMRKPAFLSGEQKKAIVDLLFKTNRKVTVKQLKEDYFKKIECFDSVEISGVEDRFNASLGTYHDLLKIIKDKDFLDNEENEDILEDIVLTLTLFEDREMIEERLKTYAHLFDDKVMKQLKRRRYTGWGRLSRKLINGIRDKQSGKTILDFLKSDGFANRNFMQLIHDDSLTFKEDIQKAQVSGQGDSLHEHIANLAGSPAIKKGILQTVKVVDELVKVMGRHKPENIVIEMARENQTTQKGQKNSRERMKRIEEGIKELGSQILKEHPVENTQLQNEKLYLYYLQNGRDMYVDQELDINRLSDYDVDHIVPQSFLKDDSIDNKVLTRSDKARGKSDNVPSEEVVKKMKNYWRQLLNAKLITQRKFDNLTKAERGGLSELDKAGFIKRQLVETRQITKHVAQILDSRMNTKYDENDKLIREVKVITLKSKLVSDFRKDFQFYKVREINNYHHAHDAYLNAVVGTALIKKYPKLESEFVYGDYKVYDVRKMIAKSEQEIGKATAKYFFYSNIMNFFKTEITLANGEIRKRPLIETNGETGEIVWDKGRDFATVRKVLSMPQVNIVKKTEVQTGGFSKESILPKRNSDKLIARKKDWDPKKYGGFDSPTVAYSVLVVAKVEKGKSKKLKSVKELLGITIMERSSFEKNPIDFLEAKGYKEVKKDLIIKLPKYSLFELENGRKRMLASAGELQKGNELALPSKYVNFLYLASHYEKLKGSPEDNEQKQLFVEQHKHYLDEIIEQISEFSKRVILADANLDKVLSAYNKHRDKPIREQAENIIHLFTLTNLGAPAAFKYFDTTIDRKRYTSTKEVLDATLIHQSITGLYETRIDLSQLGGDGGGGSGGSGGSGGSGGSGGSGGMDLLKPLTVERKGVKIKGYWNSQADITCVPKDLLQGEEPVRQQNVTTIHGTQEGDVYYVNLKIDGRRINTEVIGTTLDYAIITPGDVPWILKKPLELTIKLDLEEQQGTLLNNSILSKKGKEELKQLFEKYSALWQSWENQVGHRRIRPHKIATGTVKPTPQKQYHINPKAKPDIQIVINDLLKQGVLIQKESTMNTPVYPVPKPNGRWRMVLDYRAVNKVTPLIAVQNQHSYGILGSLFKGRYKTTIDLSNGFWAHPIVPEDYWITAFTWQGKQYCWTVLPQGFLNSPGLFNGDVVDLLQGIPNVEVYVDDVYISHDSEKEHLEYLDILFNRLKEAGYIISLKKSNIANSIVDFLGFQITNEGRGLTDTFKEKLENITAPTTLKQLQSILGLLNFARNFIPDFTELIAPLYALIPKSPKNYVPWQIEHSTTLETLITKLNGAEYLQGRKGDKTLIMKVNASYTTGYIRYYNEGEKKPISYVSIVFSKTELKFTELEKLLTTVHKGLLKALDLSMGQNIHVYSPIVSMQNIQKTPQTAKKALASRWLSWLSYLEDPRIRFFYDPQMPALKDLPAVDTGKDNKKHPSNFQHIFYTDGSAITSPTKEGHLNAGMGIVYFINKDGNLQKQQEWSISLGNHTAQFAEIAAFEFALKKCLPLGGNILVVTDSNYVAKAYNEELDVWASNGFVNNRKKPLKHISKWKSVADLKRLRPDVVVTHEPGHQKLDSSPHAYGNNLADQLATQASFKVHAGKRTADGSEFEKRTADGSEFESPKKKAKVE

SEQ ID NO: 6082 - protein, 2102 aa, synthetic construct
MPAAKRVKLDGGDKKYSIGLDIGTNSVGWAVITDEYKVPSKKFKVLGNTDRHSIKKNLIGALLFDSGETAEATRLKRTARRRYTRRKNRICYLQEIFSNEMAKVDDSFFHRLEESFLVEEDKKHERHPIFGNIVDEVAYHEKYPTIYHLRKKLVDSTDKADLRLIYLALAHMIKFRGHFLIEGDLNPDNSDVDKLFIQLVQTYNQLFEENPINASGVDAKAILSARLSKSRRLENLIAQLPGEKKNGLFGNLIALSLGLTPNFKSNFDLAEDAKLQLSKDTYDDDLDNLLAQIGDQYADLFLAAKNLSDAILLSDILRVNTEITKAPLSASMIKRYDEHHQDLTLLKALVRQQLPEKYKEIFFDQSKNGYAGYIDGGASQEEFYKFIKPILEKMDGTEELLVKLNREDLLRKQRTFDNGSIPHQIHLGELHAILRRQEDFYPFLKDNREKIEKILTFRIPYYVGPLARGNSRFAWMTRKSEETITPWNFEEVVDKGASAQSFIERMTNFDKNLPNEKVLPKHSLLYEYFTVYNELTKVKYVTEGMRKPAFLSGEQKKAIVDLLFKTNRKVTVKQLKEDYFKKIECFDSVEISGVEDRFNASLGTYHDLLKIIKDKDFLDNEENEDILEDIVLTLTLFEDREMIEERLKTYAHLFDDKVMKQLKRRRYTGWGRLSRKLINGIRDKQSGKTILDFLKSDGFANRNFMQLIHDDSLTFKEDIQKAQVSGQGDSLHEHIANLAGSPAIKKGILQTVKVVDELVKVMGRHKPENIVIEMARENQTTQKGQKNSRERMKRIEEGIKELGSQILKEHPVENTQLQNEKLYLYYLQNGRDMYVDQELDINRLSDYDVDHIVPQSFLKDDSIDNKVLTRSDKARGKSDNVPSEEVVKKMKNYWRQLLNAKLITQRKFDNLTKAERGGLSELDKAGFIKRQLVETRQITKHVAQILDSRMNTKYDENDKLIREVKVITLKSKLVSDFRKDFQFYKVREINNYHHAHDAYLNAVVGTALIKKYPKLESEFVYGDYKVYDVRKMIAKSEQEIGKATAKYFFYSNIMNFFKTEITLANGEIRKRPLIETNGETGEIVWDKGRDFATVRKVLSMPQVNIVKKTEVQTGGFSKESILPKRNSDKLIARKKDWDPKKYGGFDSPTVAYSVLVVAKVEKGKSKKLKSVKELLGITIMERSSFEKNPIDFLEAKGYKEVKKDLIIKLPKYSLFELENGRKRMLASAGELQKGNELALPSKYVNFLYLASHYEKLKGSPEDNEQKQLFVEQHKHYLDEIIEQISEFSKRVILADANLDKVLSAYNKHRDKPIREQAENIIHLFTLTNLGAPAAFKYFDTTIDRKRYTSTKEVLDATLIHQSITGLYETRIDLSQLGGDGGGGSGGSGGSGGSGGSGGSGGTLQLEEEYRLFEPESTQKQEMDIWLKNFPQAWAETGGMGTAHCQAPVLIQLKATATPISIRQYPMPHEAYQGIKPHIRRMLDQGILKPCQSPWNTPLLPVKKPGTEDYRPVQDLREVNKRVEDIHPTVPNPYNLLSTLPPSHPWYTVLDLKDAFFCLRLHSESQLLFAFEWRDPEIGLSGQLTWTRLPQGFKNSPTLFNEALHSDLADFRVRYPALVLLQYVDDLLLAAATRTECLEGTKALLETLGNKGYRASAKKAQICLQEVTYLGYSLKDGQRWLTKARKEAILSIPVPKNSRQVREFLGKAGYCRLFIPGFAELAAPLYPLTRPGTLFQWGTEQQLAFEDIKKALLSSPALGLPDITKPFELFIDENSGFAKGVLVQKLGPWKRPVAYLSKKLDTVASGWPPCLRMVAAIAILVKDAGKLTLGQPLTILTSHPVEALVRQPPNKWLSNARMTHYQAMLLDAERVHFGPTVSLNPATLLPLPSGGNHHDCLQILAETHGTRPDLTDQPLPDADLTWYTDGSSFIRNGEREAGAAVTTESEVIWAAPLPPGTSAQRAELIALTQALKMAEGKKLTVYTDSRYAFATTHVHGEIYRRRGWLTSEGKEIKNKNEILALLEALFLPKRLSIIHCPGHQKGDSPQAKGNRLADDTAKKAATETHSSLTVLPAGKRTADGSEFEKRTADGSEFESPKKKAKVE

SEQ ID NO: 6083 - protein, 2094 aa, synthetic construct
MPAAKRVKLDGGDKKYSIGLDIGTNSVGWAVITDEYKVPSKKFKVLGNTDRHSIKKNLIGALLFDSGETAEATRLKRTARRRYTRRKNRICYLQEIFSNEMAKVDDSFFHRLEESFLVEEDKKHERHPIFGNIVDEVAYHEKYPTIYHLRKKLVDSTDKADLRLIYLALAHMIKFRGHFLIEGDLNPDNSDVDKLFIQLVQTYNQLFEENPINASGVDAKAILSARLSKSRRLENLIAQLPGEKKNGLFGNLIALSLGLTPNFKSNFDLAEDAKLQLSKDTYDDDLDNLLAQIGDQYADLFLAAKNLSDAILLSDILRVNTEITKAPLSASMIKRYDEHHQDLTLLKALVRQQLPEKYKEIFFDQSKNGYAGYIDGGASQEEFYKFIKPILEKMDGTEELLVKLNREDLLRKQRTFDNGSIPHQIHLGELHAILRRQEDFYPFLKDNREKIEKILTFRIPYYVGPLARGNSRFAWMTRKSEETITPWNFEEVVDKGASAQSFIERMTNFDKNLPNEKVLPKHSLLYEYFTVYNELTKVKYVTEGMRKPAFLSGEQKKAIVDLLFKTNRKVTVKQLKEDYFKKIECFDSVEISGVEDRFNASLGTYHDLLKIIKDKDFLDNEENEDILEDIVLTLTLFEDREMIEERLKTYAHLFDDKVMKQLKRRRYTGWGRLSRKLINGIRDKQSGKTILDFLKSDGFANRNFMQLIHDDSLTFKEDIQKAQVSGQGDSLHEHIANLAGSPAIKKGILQTVKVVDELVKVMGRHKPENIVIEMARENQTTQKGQKNSRERMKRIEEGIKELGSQILKEHPVENTQLQNEKLYLYYLQNGRDMYVDQELDINRLSDYDVDHIVPQSFLKDDSIDNKVLTRSDKARGKSDNVPSEEVVKKMKNYWRQLLNAKLITQRKFDNLTKAERGGLSELDKAGFIKRQLVETRQITKHVAQILDSRMNTKYDENDKLIREVKVITLKSKLVSDFRKDFQFYKVREINNYHHAHDAYLNAVVGTALIKKYPKLESEFVYGDYKVYDVRKMIAKSEQEIGKATAKYFFYSNIMNFFKTEITLANGEIRKRPLIETNGETGEIVWDKGRDFATVRKVLSMPQVNIVKKTEVQTGGFSKESILPKRNSDKLIARKKDWDPKKYGGFDSPTVAYSVLVVAKVEKGKSKKLKSVKELLGITIMERSSFEKNPIDFLEAKGYKEVKKDLIIKLPKYSLFELENGRKRMLASAGELQKGNELALPSKYVNFLYLASHYEKLKGSPEDNEQKQLFVEQHKHYLDEIIEQISEFSKRVILADANLDKVLSAYNKHRDKPIREQAENIIHLFTLTNLGAPAAFKYFDTTIDRKRYTSTKEVLDATLIHQSITGLYETRIDLSQLGGDGGGGSGGSGGSGGSGGSGGSGGVPWLTQQPLQLTILVPLQEYQEKILSKTALPEDQKQQLKTLFVKYDNLWQHWENQVGHRKIRPHNIATGDYPPRPQKQYPINPKAKPSIQIVIDDLLKQGVLTPQNSTMNTPVYPVPKPDGRWRMVLDYREVNKTIPLTAAQNQHSAGILATIVRQKYKTTLDLANGFWAHPITPESYWLTAFTWQGKQYCWTRLPQGFLNSPALFNADVVDLLKEIPNVQVYVDDIYLSHDDPKEHVQQLEKVFQILLQAGYVVSLKKSEIGQKTVEFLGFNITKEGRGLTDTFKTKLLNITPPKDLKQLQSILGLLNFARNFIPNFAELVQPLYNLIAPAKGKYIEWSEENTKQLNMVIEALNTASNLEERLPEQRLVIKVNTSPSAGYVRYYNETGKKPIMYLNYVFSKAELKFSMLEKLLTTMHKALIKAMDLAMGQEILVYSPIVSMTKIQKTPLPERKALPIRWITWMTYLEDPRIQFHYDKTLPELKHIPDVYTSSQSPVKHPSQYEGVFYTDGSAIKSPDPTKSNNAGMGIVHATYKPEYQVLNQWSIPLGNHTAQMAEIAAVEFACKKALKIPGPVLVITDSFYVAESANKELPYWKSNGFVNNKKKPLKHISKWKSIAECLSMKPDITIQHEKGISLQIPVFILKGNALADKLATQGSYVVNAGKRTADGSEFEKRTADGSEFESPKKKAKVE

SEQ ID NO: 6084 - protein, 2101 aa, synthetic construct
MPAAKRVKLDGGDKKYSIGLDIGTNSVGWAVITDEYKVPSKKFKVLGNTDRHSIKKNLIGALLFDSGETAEATRLKRTARRRYTRRKNRICYLQEIFSNEMAKVDDSFFHRLEESFLVEEDKKHERHPIFGNIVDEVAYHEKYPTIYHLRKKLVDSTDKADLRLIYLALAHMIKFRGHFLIEGDLNPDNSDVDKLFIQLVQTYNQLFEENPINASGVDAKAILSARLSKSRRLENLIAQLPGEKKNGLFGNLIALSLGLTPNFKSNFDLAEDAKLQLSKDTYDDDLDNLLAQIGDQYADLFLAAKNLSDAILLSDILRVNTEITKAPLSASMIKRYDEHHQDLTLLKALVRQQLPEKYKEIFFDQSKNGYAGYIDGGASQEEFYKFIKPILEKMDGTEELLVKLNREDLLRKQRTFDNGSIPHQIHLGELHAILRRQEDFYPFLKDNREKIEKILTFRIPYYVGPLARGNSRFAWMTRKSEETITPWNFEEVVDKGASAQSFIERMTNFDKNLPNEKVLPKHSLLYEYFTVYNELTKVKYVTEGMRKPAFLSGEQKKAIVDLLFKTNRKVTVKQLKEDYFKKIECFDSVEISGVEDRFNASLGTYHDLLKIIKDKDFLDNEENEDILEDIVLTLTLFEDREMIEERLKTYAHLFDDKVMKQLKRRRYTGWGRLSRKLINGIRDKQSGKTILDFLKSDGFANRNFMQLIHDDSLTFKEDIQKAQVSGQGDSLHEHIANLAGSPAIKKGILQTVKVVDELVKVMGRHKPENIVIEMARENQTTQKGQKNSRERMKRIEEGIKELGSQILKEHPVENTQLQNEKLYLYYLQNGRDMYVDQELDINRLSDYDVDHIVPQSFLKDDSIDNKVLTRSDKARGKSDNVPSEEVVKKMKNYWRQLLNAKLITQRKFDNLTKAERGGLSELDKAGFIKRQLVETRQITKHVAQILDSRMNTKYDENDKLIREVKVITLKSKLVSDFRKDFQFYKVREINNYHHAHDAYLNAVVGTALIKKYPKLESEFVYGDYKVYDVRKMIAKSEQEIGKATAKYFFYSNIMNFFKTEITLANGEIRKRPLIETNGETGEIVWDKGRDFATVRKVLSMPQVNIVKKTEVQTGGFSKESILPKRNSDKLIARKKDWDPKKYGGFDSPTVAYSVLVVAKVEKGKSKKLKSVKELLGITIMERSSFEKNPIDFLEAKGYKEVKKDLIIKLPKYSLFELENGRKRMLASAGELQKGNELALPSKYVNFLYLASHYEKLKGSPEDNEQKQLFVEQHKHYLDEIIEQISEFSKRVILADANLDKVLSAYNKHRDKPIREQAENIIHLFTLTNLGAPAAFKYFDTTIDRKRYTSTKEVLDATLIHQSITGLYETRIDLSQLGGDGGGGSGGSGGSGGSGGSGGSGGVLNLEEEYRLHEKPVPSSIDPSWLQLFPTVWAERAGMGLANQVPPVVVELRSGASPVAVRQYPMSKEAREGIRPHIQKFLDLGVLVPCRSPWNTPLLPVKKPGTNDYRPVQDLREINKRVQDIHPTVPNPYNLLSSLPPSYTWYSVLDLKDAFFCLRLHPNSQPLFAFEWKDPEKGNTGQLTWTRLPQGFKNSPTLFNEALHRDLAPFRALNPQVVLLQYVDDLLVAAPTYEDCKKGTQKLLQELSKLGYRVSAKKAQLCQREVTYLGYLLKEGKRWLTPARKATVMKIPVPTTPRQVREFLGKAGFCRLFIPGFASLAAPLYPLTKPSIPFIWTEEHQQAFDHIKKALLSAPALALPDLTKPFTLYIDERAGVARGVLTQTLGPWRRPVAYLSKKLDPVASGWPTCLKAVAAVALLLKDADKLTLGQNVTVIASHSLESIVRQPPDRWMTNARMTHYQSLLLNERVSFAPPAVLNPATLLPVESEATPVHRCSEILAEETGTRRDLEDQPLPGVPTWYTDGSSFITEGKRRAGAPIVDGKRTVWASSLPEGTSAQKAELVALTQALRLAEGKNINIYTDSRYAFATAHIHGAIYKQRGWLTSAGKDIKNKEEILALLEAIHLPRRVAIIHCPGHQRGSNPVATGNRRADEAAKQAALSTRVLAGTTKPAGKRTADGSEFEKRTADGSEFESPKKKAKVE

SEQ ID NO: 6085 - protein, 2020 aa, synthetic construct
MPAAKRVKLDGGDKKYSIGLDIGTNSVGWAVITDEYKVPSKKFKVLGNTDRHSIKKNLIGALLFDSGETAEATRLKRTARRRYTRRKNRICYLQEIFSNEMAKVDDSFFHRLEESFLVEEDKKHERHPIFGNIVDEVAYHEKYPTIYHLRKKLVDSTDKADLRLIYLALAHMIKFRGHFLIEGDLNPDNSDVDKLFIQLVQTYNQLFEENPINASGVDAKAILSARLSKSRRLENLIAQLPGEKKNGLFGNLIALSLGLTPNFKSNFDLAEDAKLQLSKDTYDDDLDNLLAQIGDQYADLFLAAKNLSDAILLSDILRVNTEITKAPLSASMIKRYDEHHQDLTLLKALVRQQLPEKYKEIFFDQSKNGYAGYIDGGASQEEFYKFIKPILEKMDGTEELLVKLNREDLLRKQRTFDNGSIPHQIHLGELHAILRRQEDFYPFLKDNREKIEKILTFRIPYYVGPLARGNSRFAWMTRKSEETITPWNFEEVVDKGASAQSFIERMTNFDKNLPNEKVLPKHSLLYEYFTVYNELTKVKYVTEGMRKPAFLSGEQKKAIVDLLFKTNRKVTVKQLKEDYFKKIECFDSVEISGVEDRFNASLGTYHDLLKIIKDKDFLDNEENEDILEDIVLTLTLFEDREMIEERLKTYAHLFDDKVMKQLKRRRYTGWGRLSRKLINGIRDKQSGKTILDFLKSDGFANRNFMQLIHDDSLTFKEDIQKAQVSGQGDSLHEHIANLAGSPAIKKGILQTVKVVDELVKVMGRHKPENIVIEMARENQTTQKGQKNSRERMKRIEEGIKELGSQILKEHPVENTQLQNEKLYLYYLQNGRDMYVDQELDINRLSDYDVDHIVPQSFLKDDSIDNKVLTRSDKARGKSDNVPSEEVVKKMKNYWRQLLNAKLITQRKFDNLTKAERGGLSELDKAGFIKRQLVETRQITKHVAQILDSRMNTKYDENDKLIREVKVITLKSKLVSDFRKDFQFYKVREINNYHHAHDAYLNAVVGTALIKKYPKLESEFVYGDYKVYDVRKMIAKSEQEIGKATAKYFFYSNIMNFFKTEITLANGEIRKRPLIETNGETGEIVWDKGRDFATVRKVLSMPQVNIVKKTEVQTGGFSKESILPKRNSDKLIARKKDWDPKKYGGFDSPTVAYSVLVVAKVEKGKSKKLKSVKELLGITIMERSSFEKNPIDFLEAKGYKEVKKDLIIKLPKYSLFELENGRKRMLASAGELQKGNELALPSKYVNFLYLASHYEKLKGSPEDNEQKQLFVEQHKHYLDEIIEQISEFSKRVILADANLDKVLSAYNKHRDKPIREQAENIIHLFTLTNLGAPAAFKYFDTTIDRKRYTSTKEVLDATLIHQSITGLYETRIDLSQLGGDGGGGSGGSGGSGGSGGSGGSGGAVLGLEHLPRPPQISQFPLNPERLQALQHLVRKALEAGHIEPYTGPGNNPVFPVKKANGTWRFIHDLRATNSLTIDLSSSSPGPPDLSSLPTTLAHLQTIDLRDAFFQIPLPKQFQPYFAFTVPQQCNYGPGTRYAWKVLPQGFKNSPTLFEMQLAHILQPIRQAFPQCTILQYMDDILLASPSHEDLLLLSEATMASLISHGLPVSENKTQQTPGTIKFLGQIISPNHLTYDAVPTVPIRSRWALPELQALLGEIQWVSKGTPTLRQPLHSLYCALQRHTDPRDQIYLNPSQVQSLVQLRQALSQNCRSRLVQTLPLLGAIMLTLTGTTTVVFQSKEQWPLVWLHAPLPHTSQCPWGQLLASAVLLLDKYTLQSYGLLCQTIHHNISTQTFNQFIQTSDHPSVPILLHHSHRFKNLGAQTGELWNTFLKTAAPLAPVKALMPVFTLSPVIINTAPCLFSDGSTSRAAYILWDKQILSQRSFPLPPPHKSAQRAELLGLLHGLSSARSWRCLNIFLDSKYLYHYLRTLALGTFQGRSSQAPFQALLPRLLSRKVVYLHHVRSHTNLPDPISRLNALTDALLITPVLQLAGKRTADGSEFEKRTADGSEFESPKKKAKVE

SEQ ID NO: 6086 - protein, 2016 aa, synthetic construct
MPAAKRVKLDGGDKKYSIGLDIGTNSVGWAVITDEYKVPSKKFKVLGNTDRHSIKKNLIGALLFDSGETAEATRLKRTARRRYTRRKNRICYLQEIFSNEMAKVDDSFFHRLEESFLVEEDKKHERHPIFGNIVDEVAYHEKYPTIYHLRKKLVDSTDKADLRLIYLALAHMIKFRGHFLIEGDLNPDNSDVDKLFIQLVQTYNQLFEENPINASGVDAKAILSARLSKSRRLENLIAQLPGEKKNGLFGNLIALSLGLTPNFKSNFDLAEDAKLQLSKDTYDDDLDNLLAQIGDQYADLFLAAKNLSDAILLSDILRVNTEITKAPLSASMIKRYDEHHQDLTLLKALVRQQLPEKYKEIFFDQSKNGYAGYIDGGASQEEFYKFIKPILEKMDGTEELLVKLNREDLLRKQRTFDNGSIPHQIHLGELHAILRRQEDFYPFLKDNREKIEKILTFRIPYYVGPLARGNSRFAWMTRKSEETITPWNFEEVVDKGASAQSFIERMTNFDKNLPNEKVLPKHSLLYEYFTVYNELTKVKYVTEGMRKPAFLSGEQKKAIVDLLFKTNRKVTVKQLKEDYFKKIECFDSVEISGVEDRFNASLGTYHDLLKIIKDKDFLDNEENEDILEDIVLTLTLFEDREMIEERLKTYAHLFDDKVMKQLKRRRYTGWGRLSRKLINGIRDKQSGKTILDFLKSDGFANRNFMQLIHDDSLTFKEDIQKAQVSGQGDSLHEHIANLAGSPAIKKGILQTVKVVDELVKVMGRHKPENIVIEMARENQTTQKGQKNSRERMKRIEEGIKELGSQILKEHPVENTQLQNEKLYLYYLQNGRDMYVDQELDINRLSDYDVDHIVPQSFLKDDSIDNKVLTRSDKARGKSDNVPSEEVVKKMKNYWRQLLNAKLITQRKFDNLTKAERGGLSELDKAGFIKRQLVETRQITKHVAQILDSRMNTKYDENDKLIREVKVITLKSKLVSDFRKDFQFYKVREINNYHHAHDAYLNAVVGTALIKKYPKLESEFVYGDYKVYDVRKMIAKSEQEIGKATAKYFFYSNIMNFFKTEITLANGEIRKRPLIETNGETGEIVWDKGRDFATVRKVLSMPQVNIVKKTEVQTGGFSKESILPKRNSDKLIARKKDWDPKKYGGFDSPTVAYSVLVVAKVEKGKSKKLKSVKELLGITIMERSSFEKNPIDFLEAKGYKEVKKDLIIKLPKYSLFELENGRKRMLASAGELQKGNELALPSKYVNFLYLASHYEKLKGSPEDNEQKQLFVEQHKHYLDEIIEQISEFSKRVILADANLDKVLSAYNKHRDKPIREQAENIIHLFTLTNLGAPAAFKYFDTTIDRKRYTSTKEVLDATLIHQSITGLYETRIDLSQLGGDGGGGSGGSGGSGGSGGSGGSGGGLEHLPPPPEVSQFPLNPERLQALTDLVSRALEAKHIEPYQGPGNNPIFPVKKPNGKWRFIHDLRATNSLTRDLASPSPGPPDLTSPPQDLPHLRTIDLTDAFFQIPLPAVFQPYFAFTLPQPNNHGPGTRYSWRVLPQGFKNSPTLFQQQLSHILAPVRKAFPNSLIIQYMDDILLASPALRELTALTDKVTNALTKEGLPMSLEKTQATPGSIHFLGQVISPDCITYETLPSIHVKSIWSLAELQSMLGELQWVSKGTPVLRSSLHQLYLALRGHRDPRDTIELTSTQVQALKTIQKALALNCRSRLVSQLPILALIILRPTGTTAVLFQTKQKWPLVWLHTPHPATSLRPWGQLLANAIITLDKYSLQHYGQICKSFHHNISNQALTYYLHTSDQSSVAILLQHSHRFHNLGAQPSGPWRSLLQVPQIFQNIDVLRPPFIISPVVIDHAPCLFSDGATSKAAFILWDKQVIHQQVLPLPSTCSAQAGELFGLLAGLQKSKPWPALNIFLDSKFLIGHLRRMAWGAFLGPSTQCDLHARLFPLLQGKTVYVHHVRSHTLLQDPISRLNEATDALMLAPLLPLAGKRTADGSEFEKRTADGSEFESPKKKAKVE

SEQ ID NO: 6087 - protein, 2013 aa, synthetic construct
MPAAKRVKLDGGDKKYSIGLDIGTNSVGWAVITDEYKVPSKKFKVLGNTDRHSIKKNLIGALLFDSGETAEATRLKRTARRRYTRRKNRICYLQEIFSNEMAKVDDSFFHRLEESFLVEEDKKHERHPIFGNIVDEVAYHEKYPTIYHLRKKLVDSTDKADLRLIYLALAHMIKFRGHFLIEGDLNPDNSDVDKLFIQLVQTYNQLFEENPINASGVDAKAILSARLSKSRRLENLIAQLPGEKKNGLFGNLIALSLGLTPNFKSNFDLAEDAKLQLSKDTYDDDLDNLLAQIGDQYADLFLAAKNLSDAILLSDILRVNTEITKAPLSASMIKRYDEHHQDLTLLKALVRQQLPEKYKEIFFDQSKNGYAGYIDGGASQEEFYKFIKPILEKMDGTEELLVKLNREDLLRKQRTFDNGSIPHQIHLGELHAILRRQEDFYPFLKDNREKIEKILTFRIPYYVGPLARGNSRFAWMTRKSEETITPWNFEEVVDKGASAQSFIERMTNFDKNLPNEKVLPKHSLLYEYFTVYNELTKVKYVTEGMRKPAFLSGEQKKAIVDLLFKTNRKVTVKQLKEDYFKKIECFDSVEISGVEDRFNASLGTYHDLLKIIKDKDFLDNEENEDILEDIVLTLTLFEDREMIEERLKTYAHLFDDKVMKQLKRRRYTGWGRLSRKLINGIRDKQSGKTILDFLKSDGFANRNFMQLIHDDSLTFKEDIQKAQVSGQGDSLHEHIANLAGSPAIKKGILQTVKVVDELVKVMGRHKPENIVIEMARENQTTQKGQKNSRERMKRIEEGIKELGSQILKEHPVENTQLQNEKLYLYYLQNGRDMYVDQELDINRLSDYDVDHIVPQSFLKDDSIDNKVLTRSDKARGKSDNVPSEEVVKKMKNYWRQLLNAKLITQRKFDNLTKAERGGLSELDKAGFIKRQLVETRQITKHVAQILDSRMNTKYDENDKLIREVKVITLKSKLVSDFRKDFQFYKVREINNYHHAHDAYLNAVVGTALIKKYPKLESEFVYGDYKVYDVRKMIAKSEQEIGKATAKYFFYSNIMNFFKTEITLANGEIRKRPLIETNGETGEIVWDKGRDFATVRKVLSMPQVNIVKKTEVQTGGFSKESILPKRNSDKLIARKKDWDPKKYGGFDSPTVAYSVLVVAKVEKGKSKKLKSVKELLGITIMERSSFEKNPIDFLEAKGYKEVKKDLIIKLPKYSLFELENGRKRMLASAGELQKGNELALPSKYVNFLYLASHYEKLKGSPEDNEQKQLFVEQHKHYLDEIIEQISEFSKRVILADANLDKVLSAYNKHRDKPIREQAENIIHLFTLTNLGAPAAFKYFDTTIDRKRYTSTKEVLDATLIHQSITGLYETRIDLSQLGGDGGGGSGGSGGSGGSGGSGGSGGPLGTSDSPVTHADPIDWKSEEPVWVDQWPLTQEKLSAAQQLVQEQLRLGHIEPSTSAWNSPIFVIKKKSGKWRLLQDLRKVNETMMHMGALQPGLPTPSPIPDKSYIIVIDLKDCFYTIPLAPQDCKRFAFSLPSVNFKEPMQRYQWRVLPQGMTNSPTLCQKFVATAIAPVRQRFPQLYLVHYMDDILLAHTDEHLLYQAFSILKQHLSLNGLVIADEKIQTHFPYNYLGFSLYPRVYNTQLVKLQTDHLKTLNDFQKLLGDINWIRPYLKLPTYTLQPLFDILKGDSDPASPRTLSLEGRTALQSIEEAIRQQQITYCDYQRSWGLYILPTPRAPTGVLYQDKPLRWIYLSATPTKHLLPYYELVAKIIAKGRHEAIQYFGMEPPFICVPYALEQQDWLFQFSDNWSIAFANYPGQITHHYPSDKLLQFASSHAFIFPKIVRRQPIPEATLIFTDGSSNGTAALIINHQTYYAQTSFSSAQVVELFAVHQALLTVPTSFNLFTDSSYVVGALQMIETVPIIGTTSPEVLNLFTLIQQVLHCRQHPCFFGHIRAHSTLPGALVQGNHTADVLTKQVFFQSAGKRTADGSEFEKRTADGSEFESPKKKAKVE

SEQ ID NO: 6088 - protein, 2134 aa, synthetic construct
MPAAKRVKLDGGDKKYSIGLDIGTNSVGWAVITDEYKVPSKKFKVLGNTDRHSIKKNLIGALLFDSGETAEATRLKRTARRRYTRRKNRICYLQEIFSNEMAKVDDSFFHRLEESFLVEEDKKHERHPIFGNIVDEVAYHEKYPTIYHLRKKLVDSTDKADLRLIYLALAHMIKFRGHFLIEGDLNPDNSDVDKLFIQLVQTYNQLFEENPINASGVDAKAILSARLSKSRRLENLIAQLPGEKKNGLFGNLIALSLGLTPNFKSNFDLAEDAKLQLSKDTYDDDLDNLLAQIGDQYADLFLAAKNLSDAILLSDILRVNTEITKAPLSASMIKRYDEHHQDLTLLKALVRQQLPEKYKEIFFDQSKNGYAGYIDGGASQEEFYKFIKPILEKMDGTEELLVKLNREDLLRKQRTFDNGSIPHQIHLGELHAILRRQEDFYPFLKDNREKIEKILTFRIPYYVGPLARGNSRFAWMTRKSEETITPWNFEEVVDKGASAQSFIERMTNFDKNLPNEKVLPKHSLLYEYFTVYNELTKVKYVTEGMRKPAFLSGEQKKAIVDLLFKTNRKVTVKQLKEDYFKKIECFDSVEISGVEDRFNASLGTYHDLLKIIKDKDFLDNEENEDILEDIVLTLTLFEDREMIEERLKTYAHLFDDKVMKQLKRRRYTGWGRLSRKLINGIRDKQSGKTILDFLKSDGFANRNFMQLIHDDSLTFKEDIQKAQVSGQGDSLHEHIANLAGSPAIKKGILQTVKVVDELVKVMGRHKPENIVIEMARENQTTQKGQKNSRERMKRIEEGIKELGSQILKEHPVENTQLQNEKLYLYYLQNGRDMYVDQELDINRLSDYDVDHIVPQSFLKDDSIDNKVLTRSDKARGKSDNVPSEEVVKKMKNYWRQLLNAKLITQRKFDNLTKAERGGLSELDKAGFIKRQLVETRQITKHVAQILDSRMNTKYDENDKLIREVKVITLKSKLVSDFRKDFQFYKVREINNYHHAHDAYLNAVVGTALIKKYPKLESEFVYGDYKVYDVRKMIAKSEQEIGKATAKYFFYSNIMNFFKTEITLANGEIRKRPLIETNGETGEIVWDKGRDFATVRKVLSMPQVNIVKKTEVQTGGFSKESILPKRNSDKLIARKKDWDPKKYGGFDSPTVAYSVLVVAKVEKGKSKKLKSVKELLGITIMERSSFEKNPIDFLEAKGYKEVKKDLIIKLPKYSLFELENGRKRMLASAGELQKGNELALPSKYVNFLYLASHYEKLKGSPEDNEQKQLFVEQHKHYLDEIIEQISEFSKRVILADANLDKVLSAYNKHRDKPIREQAENIIHLFTLTNLGAPAAFKYFDTTIDRKRYTSTKEVLDATLIHQSITGLYETRIDLSQLGGDGGGGSGGSGGSGGSGGSGGSGGLLGRDLLTKLKAQIQFSTEGPQVTWEDRPAMCLVLNLEEEYRLHEKPVPPSIDPSWLQLFPMVWAEKAGMGLANQVPPVVVELKSDASPVAVRQYPMSKEAREGIRPHIQRFLDLGILVPCQSPWNTPLLPVKKPGTNDYRPVQDLREVNKRVQDIHPTVPNPYNLLSSLPPSHTWYSVLDLKDAFFCLKLHPNSQPLFAFEWRDPEKGNTGQLTWTRLPQGFKNSPTLFNEALHRDLASFRALNPQVVMLQYVDDLLVAAPTYRDCKEGTRRLLQELSKLGYRVSAKKAQLCREEVTYLGYLLKGGKRWLTPARKATVMKIPTPTTPRQVREFLGKAGFCRLFIPGFASLAAPLYPLTRPKVPFTWTEAHQEAFGRIKEALLSAPALALPDLTKPFALYVDEKEGVARGVLTQTLGPWRRPVAYLSKKLDPVASGWPTCLKAIAAVALLLKDADKLTLGQNVLVIAPHNLESIVRQPPDRWMTNARMTHYQSLLLNERVSFAPPAILNPATLLPVESDDTPIHICSEILAEETGTRPDLRDQPLPGVPAWYTDGSSFIMDGRRQAGAAIVDNKRTVWASNLPEGTSAQKAELIALTQALRLAEGKSINIYTDSRYAFATAHVHGAIYKQRGWLTSAGKDIKNKEEILALLEAIHLPKRVAIIHCPGHQRGTDPVATGNRKADEAAKQAAQSTRILTETTKNAGKRTADGSEFEKRTADGSEFESPKKKAKVE

SEQ ID NO: 6089 - protein, 2225 aa, synthetic construct
MPAAKRVKLDGGDKKYSIGLDIGTNSVGWAVITDEYKVPSKKFKVLGNTDRHSIKKNLIGALLFDSGETAEATRLKRTARRRYTRRKNRICYLQEIFSNEMAKVDDSFFHRLEESFLVEEDKKHERHPIFGNIVDEVAYHEKYPTIYHLRKKLVDSTDKADLRLIYLALAHMIKFRGHFLIEGDLNPDNSDVDKLFIQLVQTYNQLFEENPINASGVDAKAILSARLSKSRRLENLIAQLPGEKKNGLFGNLIALSLGLTPNFKSNFDLAEDAKLQLSKDTYDDDLDNLLAQIGDQYADLFLAAKNLSDAILLSDILRVNTEITKAPLSASMIKRYDEHHQDLTLLKALVRQQLPEKYKEIFFDQSKNGYAGYIDGGASQEEFYKFIKPILEKMDGTEELLVKLNREDLLRKQRTFDNGSIPHQIHLGELHAILRRQEDFYPFLKDNREKIEKILTFRIPYYVGPLARGNSRFAWMTRKSEETITPWNFEEVVDKGASAQSFIERMTNFDKNLPNEKVLPKHSLLYEYFTVYNELTKVKYVTEGMRKPAFLSGEQKKAIVDLLFKTNRKVTVKQLKEDYFKKIECFDSVEISGVEDRFNASLGTYHDLLKIIKDKDFLDNEENEDILEDIVLTLTLFEDREMIEERLKTYAHLFDDKVMKQLKRRRYTGWGRLSRKLINGIRDKQSGKTILDFLKSDGFANRNFMQLIHDDSLTFKEDIQKAQVSGQGDSLHEHIANLAGSPAIKKGILQTVKVVDELVKVMGRHKPENIVIEMARENQTTQKGQKNSRERMKRIEEGIKELGSQILKEHPVENTQLQNEKLYLYYLQNGRDMYVDQELDINRLSDYDVDHIVPQSFLKDDSIDNKVLTRSDKARGKSDNVPSEEVVKKMKNYWRQLLNAKLITQRKFDNLTKAERGGLSELDKAGFIKRQLVETRQITKHVAQILDSRMNTKYDENDKLIREVKVITLKSKLVSDFRKDFQFYKVREINNYHHAHDAYLNAVVGTALIKKYPKLESEFVYGDYKVYDVRKMIAKSEQEIGKATAKYFFYSNIMNFFKTEITLANGEIRKRPLIETNGETGEIVWDKGRDFATVRKVLSMPQVNIVKKTEVQTGGFSKESILPKRNSDKLIARKKDWDPKKYGGFDSPTVAYSVLVVAKVEKGKSKKLKSVKELLGITIMERSSFEKNPIDFLEAKGYKEVKKDLIIKLPKYSLFELENGRKRMLASAGELQKGNELALPSKYVNFLYLASHYEKLKGSPEDNEQKQLFVEQHKHYLDEIIEQISEFSKRVILADANLDKVLSAYNKHRDKPIREQAENIIHLFTLTNLGAPAAFKYFDTTIDRKRYTSTKEVLDATLIHQSITGLYETRIDLSQLGGDGGGGSGGSGGSGGSGGSGGSGGTLGDQGSRGSDPLPEPRVTLTVEGIPTEFLVNTGAEHSVLTKPMGKMGSKRTVVAGATGSKVYPWTTKRLLKIGQKQVTHSFLVIPECPAPLLGRDLLTKLKAQIQFSTEGPQVTWEDRPAMCLVLNLEEEYRLHEKPVPPSIDPSWLQLFPMVWAEKAGMGLANQVPPVVVELKSDASPVAVRQYPMSKEAREGIRPHIQRFLDLGILVPCQSPWNTPLLPVKKPGTNDYRPVQDLREVNKRVQDIHPTVPNPYNLLSSLPPSHTWYSVLDLKDAFFCLKLHPNSQPLFAFEWRDPEKGNTGQLTWTRLPQGFKNSPTLFNEALHRDLASFRALNPQVVMLQYVDDLLVAAPTYRDCKEGTRRLLQELSKLGYRVSAKKAQLCREEVTYLGYLLKGGKRWLTPARKATVMKIPTPTTPRQVREFLGKAGFCRLFIPGFASLAAPLYPLTRPKVPFTWTEAHQEAFGRIKEALLSAPALALPDLTKPFALYVDEKEGVARGVLTQTLGPWRRPVAYLSKKLDPVASGWPTCLKAIAAVALLLKDADKLTLGQNVLVIAPHNLESIVRQPPDRWMTNARMTHYQSLLLNERVSFAPPAILNPATLLPVESDDTPIHICSEILAEETGTRPDLRDQPLPGVPAWYTDGSSFIMDGRRQAGAAIVDNKRTVWASNLPEGTSAQKAELIALTQALRLAEGKSINIYTDSRYAFATAHVHGAIYKQRGWLTSAGKDIKNKEEILALLEAIHLPKRVAIIHCPGHQRGTDPVATGNRKADEAAKQAAQSTRILTETTKNAGKRTADGSEFEKRTADGSEFESPKKKAKVE

SEQ ID NO: 6090 - protein, 2103 aa, synthetic construct; identical to SEQ ID NO: 4503

SEQ ID NO: 6091 - protein, 2103 aa, synthetic construct; identical to SEQ ID NO: 4503

SEQ ID NO: 6092 - protein, 2103 aa, synthetic construct
MPAAKRVKLDGGDKKYSIGLDIGTNSVGWAVITDEYKVPSKKFKVLGNTDRHSIKKNLIGALLFDSGETAEATRLKRTARRRYTRRKNRICYLQEIFSNEMAKVDDSFFHRLEESFLVEEDKKHERHPIFGNIVDEVAYHEKYPTIYHLRKKLVDSTDKADLRLIYLALAHMIKFRGHFLIEGDLNPDNSDVDKLFIQLVQTYNQLFEENPINASGVDAKAILSARLSKSRRLENLIAQLPGEKKNGLFGNLIALSLGLTPNFKSNFDLAEDAKLQLSKDTYDDDLDNLLAQIGDQYADLFLAAKNLSDAILLSDILRVNTEITKAPLSASMIKRYDEHHQDLTLLKALVRQQLPEKYKEIFFDQSKNGYAGYIDGGASQEEFYKFIKPILEKMDGTEELLVKLNREDLLRKQRTFDNGSIPHQIHLGELHAILRRQEDFYPFLKDNREKIEKILTFRIPYYVGPLARGNSRFAWMTRKSEETITPWNFEEVVDKGASAQSFIERMTNFDKNLPNEKVLPKHSLLYEYFTVYNELTKVKYVTEGMRKPAFLSGEQKKAIVDLLFKTNRKVTVKQLKEDYFKKIECFDSVEISGVEDRFNASLGTYHDLLKIIKDKDFLDNEENEDILEDIVLTLTLFEDREMIEERLKTYAHLFDDKVMKQLKRRRYTGWGRLSRKLINGIRDKQSGKTILDFLKSDGFANRNFMQLIHDDSLTFKEDIQKAQVSGQGDSLHEHIANLAGSPAIKKGILQTVKVVDELVKVMGRHKPENIVIEMARENQTTQKGQKNSRERMKRIEEGIKELGSQILKEHPVENTQLQNEKLYLYYLQNGRDMYVDQELDINRLSDYDVDHIVPQSFLKDDSIDNKVLTRSDKARGKSDNVPSEEVVKKMKNYWRQLLNAKLITQRKFDNLTKAERGGLSELDKAGFIKRQLVETRQITKHVAQILDSRMNTKYDENDKLIREVKVITLKSKLVSDFRKDFQFYKVREINNYHHAHDAYLNAVVGTALIKKYPKLESEFVYGDYKVYDVRKMIAKSEQEIGKATAKYFFYSNIMNFFKTEITLANGEIRKRPLIETNGETGEIVWDKGRDFATVRKVLSMPQVNIVKKTEVQTGGFSKESILPKRNSDKLIARKKDWDPKKYGGFDSPTVAYSVLVVAKVEKGKSKKLKSVKELLGITIMERSSFEKNPIDFLEAKGYKEVKKDLIIKLPKYSLFELENGRKRMLASAGELQKGNELALPSKYVNFLYLASHYEKLKGSPEDNEQKQLFVEQHKHYLDEIIEQISEFSKRVILADANLDKVLSAYNKHRDKPIREQAENIIHLFTLTNLGAPAAFKYFDTTIDRKRYTSTKEVLDATLIHQSITGLYETRIDLSQLGGDGGGGSGGSGGSGGSGGSGGSGGTLGIEDEYRLHETSTEPDVSLGSTWLSDFPQAWAETGGMGLAVRQAPLIIPLKATSTPVSIQQYPMSHEARLGIKPHIQRLLDQGILVPCQSPWNTPLLPVKKPGTNDYRPVQDLREVNKRVEDIHPTVPNPYNLLSGLPPSHQWYTVLDLKDAFFCLRLHPTSQPLFAFEWRDPGMGISGQLTWTRLPQGFKNSPTLFDEALHRDLADFRIQHPDLILLQYVDDILLAATSELDCQQGTRALLQTLGDLGYRASAKKAQICQKQVKYLGYLLREGQRWLTEARKETVMGQPVPKTPRQLREFLGTAGFCRLWIPGFAEMAAPLYPLTKTGTLFSWGPDQQKAYQEIKQALLTAPALGLPDLTKPFELFVDEKQGYAKGVLTQKLGPWRRPVAYLSKKLDPVAAGWPPCLRMVAAIAVLTKDAGKLTMGQPLVILAPHAVEALVKQPPDRWLSNARMTHYQAMLLDTDRVQFGPVVALNPATLLPLPEEGAPHDCLEILAETHGTRPDLTDQPIPDADHTWYTDGSSFLQEGQRKAGAAVTTETEVIWAGALPAGTSAQRAELIALTQALKMAEGKRLNVYTDSRYAFATAHIHGEIYRRRGLLTSEGREIKNKSEILALLKALFLPKRLSIIHCLGHQKGDSAEARGNRLADQAAREAAIKTPPDTSTLLAGKRTADGSEFEKRTADGSEFESPKKKAKVE

SEQ ID NO: 6093 - protein, 2103 aa, synthetic construct
MPAAKRVKLDGGDKKYSIGLDIGTNSVGWAVITDEYKVPSKKFKVLGNTDRHSIKKNLIGALLFDSGETAEATRLKRTARRRYTRRKNRICYLQEIFSNEMAKVDDSFFHRLEESFLVEEDKKHERHPIFGNIVDEVAYHEKYPTIYHLRKKLVDSTDKADLRLIYLALAHMIKFRGHFLIEGDLNPDNSDVDKLFIQLVQTYNQLFEENPINASGVDAKAILSARLSKSRRLENLIAQLPGEKKNGLFGNLIALSLGLTPNFKSNFDLAEDAKLQLSKDTYDDDLDNLLAQIGDQYADLFLAAKNLSDAILLSDILRVNTEITKAPLSASMIKRYDEHHQDLTLLKALVRQQLPEKYKEIFFDQSKNGYAGYIDGGASQEEFYKFIKPILEKMDGTEELLVKLNREDLLRKQRTFDNGSIPHQIHLGELHAILRRQEDFYPFLKDNREKIEKILTFRIPYYVGPLARGNSRFAWMTRKSEETITPWNFEEVVDKGASAQSFIERMTNFDKNLPNEKVLPKHSLLYEYFTVYNELTKVKYVTEGMRKPAFLSGEQKKAIVDLLFKTNRKVTVKQLKEDYFKKIECFDSVEISGVEDRFNASLGTYHDLLKIIKDKDFLDNEENEDILEDIVLTLTLFEDREMIEERLKTYAHLFDDKVMKQLKRRRYTGWGRLSRKLINGIRDKQSGKTILDFLKSDGFANRNFMQLIHDDSLTFKEDIQKAQVSGQGDSLHEHIANLAGSPAIKKGILQTVKVVDELVKVMGRHKPENIVIEMARENQTTQKGQKNSRERMKRIEEGIKELGSQILKEHPVENTQLQNEKLYLYYLQNGRDMYVDQELDINRLSDYDVDHIVPQSFLKDDSIDNKVLTRSDKARGKSDNVPSEEVVKKMKNYWRQLLNAKLITQRKFDNLTKAERGGLSELDKAGFIKRQLVETRQITKHVAQILDSRMNTKYDENDKLIREVKVITLKSKLVSDFRKDFQFYKVREINNYHHAHDAYLNAVVGTALIKKYPKLESEFVYGDYKVYDVRKMIAKSEQEIGKATAKYFFYSNIMNFFKTEITLANGEIRKRPLIETNGETGEIVWDKGRDFATVRKVLSMPQVNIVKKTEVQTGGFSKESILPKRNSDKLIARKKDWDPKKYGGFDSPTVAYSVLVVAKVEKGKSKKLKSVKELLGITIMERSSFEKNPIDFLEAKGYKEVKKDLIIKLPKYSLFELENGRKRMLASAGELQKGNELALPSKYVNFLYLASHYEKLKGSPEDNEQKQLFVEQHKHYLDEIIEQISEFSKRVILADANLDKVLSAYNKHRDKPIREQAENIIHLFTLTNLGAPAAFKYFDTTIDRKRYTSTKEVLDATLIHQSITGLYETRIDLSQLGGDGGGGSGGSGGSGGSGGSGGSGGTLGIEDEYRLHETSTEPDVSLGSTWLSDFPQAWAETGGMGLAVRQAPLIIPLKATSTPVSIQQYPMSHEARLGIKPHIQRLLDQGILVPCQSPWNTPLLPVKKPGTNDYRPVQDLREVNKRVEDIHPTVPNPYNLLSGLPPSHQWYTVLDLKDAFFCLRLHPTSQPLFAFEWRDPGMGISGQLTWTRLPQGFKNSPTLFNEALHRDLADFRIQHPDLILLQYVDDILLAATSELDCQQGTRALLQTLGDLGYRASAKKAQICQKQVKYLGYLLREGQRWLTEARKETVMGQPVPKTPRQLREFLGTAGFCRLWIPGFAEMAAPLYPLTKPGTLFSWGPDQQKAYQEIKQALLTAPALGLPDLTKPFELFVDEKQGYAKGVLTQKLGPWRRPVAYLSKKLDPVAAGWPPCLRMVAAIAVLTKDAGKLTMGQPLVILAPHAVEALVKQPPDRWLSNARMTHYQAMLLDTDRVQFGPVVALNPATLLPLPEEGAPHDCLEILAETHGTRPDLTDQPIPDADHTWYTDGSSFLQEGQRKAGAAVTTETEVIWAGALPAGTSAQRAELIALTQALKMAEGKRLNVYTDSRYAFATAHIHGEIYRRRGWLTSEGREIKNKSEILALLKALFLPKRLSIIHCLGHQKGDSAEARGNRLADQAAREAAIKTPPDTSTLLAGKRTADGSEFEKRTADGSEFESPKKKAKVE

SEQ ID NO: 6094 - protein, 2103 aa, synthetic construct
MPAAKRVKLDGGDKKYSIGLDIGTNSVGWAVITDEYKVPSKKFKVLGNTDRHSIKKNLIGALLFDSGETAEATRLKRTARRRYTRRKNRICYLQEIFSNEMAKVDDSFFHRLEESFLVEEDKKHERHPIFGNIVDEVAYHEKYPTIYHLRKKLVDSTDKADLRLIYLALAHMIKFRGHFLIEGDLNPDNSDVDKLFIQLVQTYNQLFEENPINASGVDAKAILSARLSKSRRLENLIAQLPGEKKNGLFGNLIALSLGLTPNFKSNFDLAEDAKLQLSKDTYDDDLDNLLAQIGDQYADLFLAAKNLSDAILLSDILRVNTEITKAPLSASMIKRYDEHHQDLTLLKALVRQQLPEKYKEIFFDQSKNGYAGYIDGGASQEEFYKFIKPILEKMDGTEELLVKLNREDLLRKQRTFDNGSIPHQIHLGELHAILRRQEDFYPFLKDNREKIEKILTFRIPYYVGPLARGNSRFAWMTRKSEETITPWNFEEVVDKGASAQSFIERMTNFDKNLPNEKVLPKHSLLYEYFTVYNELTKVKYVTEGMRKPAFLSGEQKKAIVDLLFKTNRKVTVKQLKEDYFKKIECFDSVEISGVEDRFNASLGTYHDLLKIIKDKDFLDNEENEDILEDIVLTLTLFEDREMIEERLKTYAHLFDDKVMKQLKRRRYTGWGRLSRKLINGIRDKQSGKTILDFLKSDGFANRNFMQLIHDDSLTFKEDIQKAQVSGQGDSLHEHIANLAGSPAIKKGILQTVKVVDELVKVMGRHKPENIVIEMARENQTTQKGQKNSRERMKRIEEGIKELGSQILKEHPVENTQLQNEKLYLYYLQNGRDMYVDQELDINRLSDYDVDHIVPQSFLKDDSIDNKVLTRSDKARGKSDNVPSEEVVKKMKNYWRQLLNAKLITQRKFDNLTKAERGGLSELDKAGFIKRQLVETRQITKHVAQILDSRMNTKYDENDKLIREVKVITLKSKLVSDFRKDFQFYKVREINNYHHAHDAYLNAVVGTALIKKYPKLESEFVYGDYKVYDVRKMIAKSEQEIGKATAKYFFYSNIMNFFKTEITLANGEIRKRPLIETNGETGEIVWDKGRDFATVRKVLSMPQVNIVKKTEVQTGGFSKESILPKRNSDKLIARKKDWDPKKYGGFDSPTVAYSVLVVAKVEKGKSKKLKSVKELLGITIMERSSFEKNPIDFLEAKGYKEVKKDLIIKLPKYSLFELENGRKRMLASAGELQKGNELALPSKYVNFLYLASHYEKLKGSPEDNEQKQLFVEQHKHYLDEIIEQISEFSKRVILADANLDKVLSAYNKHRDKPIREQAENIIHLFTLTNLGAPAAFKYFDTTIDRKRYTSTKEVLDATLIHQSITGLYETRIDLSQLGGDGGGGSGGSGGSGGSGGSGGSGGTLNIEDEYRLHETSKEPDVSLGSTWLSDFPQAWAETGGMGLAVRQAPLIIPLKATSTPVSIKQYPMSQEARLGIKPHIQRLLDQGILVPCQSPWNTPLLPVKKPGTNDYRPVQDLREVNKRVEDIHPTVPNPYNLLSGLPPSHQWYTVLDLKDAFFCLRLHPTSQPLFAFEWRDPEMGISGQLTWTRLPQGFKNSPTLFNEALHRDLAGFRIQHPDLILLQYVDDLLLAATSELDCQQGTRALLQTLGDLGYRASAKKAQICQKQVKYLGYLLKEGQRWLTEARKETVMGQPIPKTPRQLREFLGTAGFCRLWIPGFAEMAAPLYPLTKPGTLFNWGPDQQKAFQEIKQALLTAPALGLPDLTKPFELFVDEKQGYAKGVLTQKLGPWRRPVAYLSKKLDPVAAGWPPCLRMVAAIAVLTKDAGKLTMGQPLVILAPHAVEALVKQPPDRWLSNARMTHYQALLLDTDRVQFGPVVALNPATLLPLPEEGLQHDCLDILAEAHGTRSDLMDQPLPDADHTWYTDGSSFLQEGQRKAGAAVTTETEVIWARALPAGTSAQRAELIALTQALKMAEGKKLNVYTDSRYAFATAHIHGEIYRRRGWLTSEGKEIKNKDEILALLKALFLPKRLSIIHCPGHQKGNSAEARGNRMADQAAREVATRETPETSTLLAGKRTADGSEFEKRTADGSEFESPKKKAKVE

SEQ ID NO: 6095 - protein, 2103 aa, synthetic construct
MPAAKRVKLDGGDKKYSIGLDIGTNSVGWAVITDEYKVPSKKFKVLGNTDRHSIKKNLIGALLFDSGETAEATRLKRTARRRYTRRKNRICYLQEIFSNEMAKVDDSFFHRLEESFLVEEDKKHERHPIFGNIVDEVAYHEKYPTIYHLRKKLVDSTDKADLRLIYLALAHMIKFRGHFLIEGDLNPDNSDVDKLFIQLVQTYNQLFEENPINASGVDAKAILSARLSKSRRLENLIAQLPGEKKNGLFGNLIALSLGLTPNFKSNFDLAEDAKLQLSKDTYDDDLDNLLAQIGDQYADLFLAAKNLSDAILLSDILRVNTEITKAPLSASMIKRYDEHHQDLTLLKALVRQQLPEKYKEIFFDQSKNGYAGYIDGGASQEEFYKFIKPILEKMDGTEELLVKLNREDLLRKQRTFDNGSIPHQIHLGELHAILRRQEDFYPFLKDNREKIEKILTFRIPYYVGPLARGNSRFAWMTRKSEETITPWNFEEVVDKGASAQSFIERMTNFDKNLPNEKVLPKHSLLYEYFTVYNELTKVKYVTEGMRKPAFLSGEQKKAIVDLLFKTNRKVTVKQLKEDYFKKIECFDSVEISGVEDRFNASLGTYHDLLKIIKDKDFLDNEENEDILEDIVLTLTLFEDREMIEERLKTYAHLFDDKVMKQLKRRRYTGWGRLSRKLINGIRDKQSGKTILDFLKSDGFANRNFMQLIHDDSLTFKEDIQKAQVSGQGDSLHEHIANLAGSPAIKKGILQTVKVVDELVKVMGRHKPENIVIEMARENQTTQKGQKNSRERMKRIEEGIKELGSQILKEHPVENTQLQNEKLYLYYLQNGRDMYVDQELDINRLSDYDVDHIVPQSFLKDDSIDNKVLTRSDKARGKSDNVPSEEVVKKMKNYWRQLLNAKLITQRKFDNLTKAERGGLSELDKAGFIKRQLVETRQITKHVAQILDSRMNTKYDENDKLIREVKVITLKSKLVSDFRKDFQFYKVREINNYHHAHDAYLNAVVGTALIKKYPKLESEFVYGDYKVYDVRKMIAKSEQEIGKATAKYFFYSNIMNFFKTEITLANGEIRKRPLIETNGETGEIVWDKGRDFATVRKVLSMPQVNIVKKTEVQTGGFSKESILPKRNSDKLIARKKDWDPKKYGGFDSPTVAYSVLVVAKVEKGKSKKLKSVKELLGITIMERSSFEKNPIDFLEAKGYKEVKKDLIIKLPKYSLFELENGRKRMLASAGELQKGNELALPSKYVNFLYLASHYEKLKGSPEDNEQKQLFVEQHKHYLDEIIEQISEFSKRVILADANLDKVLSAYNKHRDKPIREQAENIIHLFTLTNLGAPAAFKYFDTTIDRKRYTSTKEVLDATLIHQSITGLYETRIDLSQLGGDGGGGSGGSGGSGGSGGSGGSGGTLNIEDEYRLHETSKGPDVPLGSTWLSDFPQAWAETGGMGLAFRQAPLIISLKATSTPVSIKQYPMSQEARLGIKPHIQRLLDQGILVPCQSPWNTPLLPVKKPGTNDYRPVQDLREVNKRVEDIHPTVPNPYNLLSGLPPSHQWYTVLDLKDAFFCLRLHPTSQSLFAFEWKDPEMGISGQLTWTRLPQGFKNSPTLFNEALHRDLADFRIQHPDLILLQYVDDLLLAATSELDCQQGTRALLQTLGDLGYRASAKKAQICQKQVKYLGYLLKEGQRWLTEARKETVMGQPTPKTPRQLREFLGKAGLCRLFIPGFAEMAAPLYPLTKPGTLFKWGPDQQKAYQEIKQALLTAPALGLPDLTKPFELFVDEKQGYAKGVLTQKLGPWRRPVAYLSKKLDPVAAGWPPCLRMVAAIAVLTKDVGKLTMGQPLVILAPHAVEALVKQPPDRWLSNARMTHYQALLLDTDRVQFGPIVALNPATLLPLPEEGLQHDCLDILAEAHGTRPDLTDQPLPDADHTWYTDGSSFLQEGQRRAGAAVTTETEVIWAKALPAGTSAQRAELIALTQALKMAAGKKLNVYTDSRYAFATAHIHGEIYRRRGWLTSEGKEIKNKDEILALLKALFLPKRLSIIHCPGHQKGNHAEARGNRMADQAAREVATRETPETSTLLAGKRTADGSEFEKRTADGSEFESPKKKAKVE

SEQ ID NO: 6096 - protein, 2103 aa, synthetic construct
MPAAKRVKLDGGDKKYSIGLDIGTNSVGWAVITDEYKVPSKKFKVLGNTDRHSIKKNLIGALLFDSGETAEATRLKRTARRRYTRRKNRICYLQEIFSNEMAKVDDSFFHRLEESFLVEEDKKHERHPIFGNIVDEVAYHEKYPTIYHLRKKLVDSTDKADLRLIYLALAHMIKFRGHFLIEGDLNPDNSDVDKLFIQLVQTYNQLFEENPINASGVDAKAILSARLSKSRRLENLIAQLPGEKKNGLFGNLIALSLGLTPNFKSNFDLAEDAKLQLSKDTYDDDLDNLLAQIGDQYADLFLAAKNLSDAILLSDILRVNTEITKAPLSASMIKRYDEHHQDLTLLKALVRQQLPEKYKEIFFDQSKNGYAGYIDGGASQEEFYKFIKPILEKMDGTEELLVKLNREDLLRKQRTFDNGSIPHQIHLGELHAILRRQEDFYPFLKDNREKIEKILTFRIPYYVGPLARGNSRFAWMTRKSEETITPWNFEEVVDKGASAQSFIERMTNFDKNLPNEKVLPKHSLLYEYFTVYNELTKVKYVTEGMRKPAFLSGEQKKAIVDLLFKTNRKVTVKQLKEDYFKKIECFDSVEISGVEDRFNASLGTYHDLLKIIKDKDFLDNEENEDILEDIVLTLTLFEDREMIEERLKTYAHLFDDKVMKQLKRRRYTGWGRLSRKLINGIRDKQSGKTILDFLKSDGFANRNFMQLIHDDSLTFKEDIQKAQVSGQGDSLHEHIANLAGSPAIKKGILQTVKVVDELVKVMGRHKPENIVIEMARENQTTQKGQKNSRERMKRIEEGIKELGSQILKEHPVENTQLQNEKLYLYYLQNGRDMYVDQELDINRLSDYDVDHIVPQSFLKDDSIDNKVLTRSDKARGKSDNVPSEEVVKKMKNYWRQLLNAKLITQRKFDNLTKAERGGLSELDKAGFIKRQLVETRQITKHVAQILDSRMNTKYDENDKLIREVKVITLKSKLVSDFRKDFQFYKVREINNYHHAHDAYLNAVVGTALIKKYPKLESEFVYGDYKVYDVRKMIAKSEQEIGKATAKYFFYSNIMNFFKTEITLANGEIRKRPLIETNGETGEIVWDKGRDFATVRKVLSMPQVNIVKKTEVQTGGFSKESILPKRNSDKLIARKKDWDPKKYGGFDSPTVAYSVLVVAKVEKGKSKKLKSVKELLGITIMERSSFEKNPIDFLEAKGYKEVKKDLIIKLPKYSLFELENGRKRMLASAGELQKGNELALPSKYVNFLYLASHYEKLKGSPEDNEQKQLFVEQHKHYLDEIIEQISEFSKRVILADANLDKVLSAYNKHRDKPIREQAENIIHLFTLTNLGAPAAFKYFDTTIDRKRYTSTKEVLDATLIHQSITGLYETRIDLSQLGGDGGGGSGGSGGSGGSGGSGGSGGTLNIEDEYRLHETSKGPDVPLGSTWLSDFPQAWAETGGMGLAVRQAPLIIPLKATSTPVSIKQYPMSQEARLGIKPHIQRLLDQGILVPCQSPWNTPLLPVKKPGTNDYRPVQDLREVNKRVEDIHPTVPNPYNLLSGLPPSHQWYTVLDLKDAFFCLRLHPTSQSLFAFEWRDPEMGISGQLTWTRLPQGFKNSPTLFNEALHRDLADFRIQHPDLILLQYVDDLLLAATSELDCQQGTRALLQTLGDLGYRASAKKAQICQKQVKYLGYLLKEGQRWLTEARKETVMGQPTPKTPRQLREFLGTAGFCRLWIPGFAEMAAPLYPLTKPGTLFEWGPDQQKAYQEIKQALLTAPALGLPDLTKPFELFVDEKQGYAKGVLTQKLGPWRRPVAYLSKKLDPVAAGWPPCLRMVAAIAVLTKDAGKLTMGQPLVILAPHAVEALVKQPPDRWLSNARMTHYQALLLDTDRVQFGPIVALNPATLLPLPEEGLQHDCLDILAEAHGTRPDLTDQPLPDADHTWYTDGSSFLQEGQRKAGAAVTTETEVVWAKALPAGTSAQRAELIALTQALKMAEGKKLNVYTDSRYAFATAHIHGEIYRRRGWLTSEGKEIKNKDEILALLKALFLPKRLSIIHCPGHQKGNRAEARGNRMADQAAREVATRETPETSTLLAGKRTADGSEFEKRTADGSEFESPKKKAKVE

SEQ ID NO: 6097 - protein, 2103 aa, synthetic construct
MPAAKRVKLDGGDKKYSIGLDIGTNSVGWAVITDEYKVPSKKFKVLGNTDRHSIKKNLIGALLFDSGETAEATRLKRTARRRYTRRKNRICYLQEIFSNEMAKVDDSFFHRLEESFLVEEDKKHERHPIFGNIVDEVAYHEKYPTIYHLRKKLVDSTDKADLRLIYLALAHMIKFRGHFLIEGDLNPDNSDVDKLFIQLVQTYNQLFEENPINASGVDAKAILSARLSKSRRLENLIAQLPGEKKNGLFGNLIALSLGLTPNFKSNFDLAEDAKLQLSKDTYDDDLDNLLAQIGDQYADLFLAAKNLSDAILLSDILRVNTEITKAPLSASMIKRYDEHHQDLTLLKALVRQQLPEKYKEIFFDQSKNGYAGYIDGGASQEEFYKFIKPILEKMDGTEELLVKLNREDLLRKQRTFDNGSIPHQIHLGELHAILRRQEDFYPFLKDNREKIEKILTFRIPYYVGPLARGNSRFAWMTRKSEETITPWNFEEVVDKGASAQSFIERMTNFDKNLPNEKVLPKHSLLYEYFTVYNELTKVKYVTEGMRKPAFLSGEQKKAIVDLLFKTNRKVTVKQLKEDYFKKIECFDSVEISGVEDRFNASLGTYHDLLKIIKDKDFLDNEENEDILEDIVLTLTLFEDREMIEERLKTYAHLFDDKVMKQLKRRRYTGWGRLSRKLINGIRDKQSGKTILDFLKSDGFANRNFMQLIHDDSLTFKEDIQKAQVSGQGDSLHEHIANLAGSPAIKKGILQTVKVVDELVKVMGRHKPENIVIEMARENQTTQKGQKNSRERMKRIEEGIKELGSQILKEHPVENTQLQNEKLYLYYLQNGRDMYVDQELDINRLSDYDVDHIVPQSFLKDDSIDNKVLTRSDKARGKSDNVPSEEVVKKMKNYWRQLLNAKLITQRKFDNLTKAERGGLSELDKAGFIKRQLVETRQITKHVAQILDSRMNTKYDENDKLIREVKVITLKSKLVSDFRKDFQFYKVREINNYHHAHDAYLNAVVGTALIKKYPKLESEFVYGDYKVYDVRKMIAKSEQEIGKATAKYFFYSNIMNFFKTEITLANGEIRKRPLIETNGETGEIVWDKGRDFATVRKVLSMPQVNIVKKTEVQTGGFSKESILPKRNSDKLIARKKDWDPKKYGGFDSPTVAYSVLVVAKVEKGKSKKLKSVKELLGITIMERSSFEKNPIDFLEAKGYKEVKKDLIIKLPKYSLFELENGRKRMLASAGELQKGNELALPSKYVNFLYLASHYEKLKGSPEDNEQKQLFVEQHKHYLDEIIEQISEFSKRVILADANLDKVLSAYNKHRDKPIREQAENIIHLFTLTNLGAPAAFKYFDTTIDRKRYTSTKEVLDATLIHQSITGLYETRIDLSQLGGDGGGGSGGSGGSGGSGGSGGSGGTLNIEDEHRLHETSKEPDVSLGSTWLSDFPQAWAETGGMGLAVRQAPLIIPLKATSTPVSIKQYPMSQEARLGIKPHIQRLLDQGILVPCQSPWNTPLLPVKKPGTNDYRPVQDLREVNKRVEDIHPTVPNPYNLLSGLPPSHQWYTVLDLKDAFFCLRLHPTSQPLFAFEWRDPEMGISGQLTWTRLPQGFKNSPTLFDEALHRDLADFRIQHPDLILLQYVDDLLLAATSELDCQQGTRALLQTLGNLGYRASAKKAQICQKQVKYLGYLLKEGQRWLTEARKETVMGQPTPKTPRQLREFLGTAGFCRLWIPGFAEMAAPLYPLTKTGTLFNWGPDQQKAYQEIKQALLTAPALGLPDLTKPFELFVDEKQGYAKGVLTQKLGPWRRPVAYLSKKLDPVAAGWPPCLRMVAAIAVLTKDAGKLTMGQPLVILAPHAVEALVKQPPDRWLSNARMTHYQALLLDTDRVQFGPVVALNPATLLPLPEEGLQHNCLDILAEAHGTRPDLTDQPLPDADHTWYTDGSSLLQEGQRKAGAAVTTETEVIWAKALPAGTSAQRAELIALTQALKMAEGKKLNVYTDSRYAFATAHIHGEIYRRRGLLTSEGKEIKNKDEILALLKALFLPKRLSIIHCPGHQKGHSAEARGNRMADQAARKAAITETPDTSTLLAGKRTADGSEFEKRTADGSEFESPKKKAKVE

SEQ ID NO: 6098 - protein, 2103 aa, synthetic construct
MPAAKRVKLDGGDKKYSIGLDIGTNSVGWAVITDEYKVPSKKFKVLGNTDRHSIKKNLIGALLFDSGETAEATRLKRTARRRYTRRKNRICYLQEIFSNEMAKVDDSFFHRLEESFLVEEDKKHERHPIFGNIVDEVAYHEKYPTIYHLRKKLVDSTDKADLRLIYLALAHMIKFRGHFLIEGDLNPDNSDVDKLFIQLVQTYNQLFEENPINASGVDAKAILSARLSKSRRLENLIAQLPGEKKNGLFGNLIALSLGLTPNFKSNFDLAEDAKLQLSKDTYDDDLDNLLAQIGDQYADLFLAAKNLSDAILLSDILRVNTEITKAPLSASMIKRYDEHHQDLTLLKALVRQQLPEKYKEIFFDQSKNGYAGYIDGGASQEEFYKFIKPILEKMDGTEELLVKLNREDLLRKQRTFDNGSIPHQIHLGELHAILRRQEDFYPFLKDNREKIEKILTFRIPYYVGPLARGNSRFAWMTRKSEETITPWNFEEVVDKGASAQSFIERMTNFDKNLPNEKVLPKHSLLYEYFTVYNELTKVKYVTEGMRKPAFLSGEQKKAIVDLLFKTNRKVTVKQLKEDYFKKIECFDSVEISGVEDRFNASLGTYHDLLKIIKDKDFLDNEENEDILEDIVLTLTLFEDREMIEERLKTYAHLFDDKVMKQLKRRRYTGWGRLSRKLINGIRDKQSGKTILDFLKSDGFANRNFMQLIHDDSLTFKEDIQKAQVSGQGDSLHEHIANLAGSPAIKKGILQTVKVVDELVKVMGRHKPENIVIEMARENQTTQKGQKNSRERMKRIEEGIKELGSQILKEHPVENTQLQNEKLYLYYLQNGRDMYVDQELDINRLSDYDVDHIVPQSFLKDDSIDNKVLTRSDKARGKSDNVPSEEVVKKMKNYWRQLLNAKLITQRKFDNLTKAERGGLSELDKAGFIKRQLVETRQITKHVAQILDSRMNTKYDENDKLIREVKVITLKSKLVSDFRKDFQFYKVREINNYHHAHDAYLNAVVGTALIKKYPKLESEFVYGDYKVYDVRKMIAKSEQEIGKATAKYFFYSNIMNFFKTEITLANGEIRKRPLIETNGETGEIVWDKGRDFATVRKVLSMPQVNIVKKTEVQTGGFSKESILPKRNSDKLIARKKDWDPKKYGGFDSPTVAYSVLVVAKVEKGKSKKLKSVKELLGITIMERSSFEKNPIDFLEAKGYKEVKKDLIIKLPKYSLFELENGRKRMLASAGELQKGNELALPSKYVNFLYLASHYEKLKGSPEDNEQKQLFVEQHKHYLDEIIEQISEFSKRVILADANLDKVLSAYNKHRDKPIREQAENIIHLFTLTNLGAPAAFKYFDTTIDRKRYTSTKEVLDATLIHQSITGLYETRIDLSQLGGDGGGGSGGSGGSGGSGGSGGSGGTLNIEDEHRLHETSKEPDVSLGSTWLSDFPQAWAETGGMGLAVRQAPLIIPLKATSTPVSIKQYPMSQEARLGIKPHIQRLLDQGILVPCQSPWNTPLLPVKKPGTNDYRPVQDLREVNKRVEDIHPTVPNPYNLLSGLPPSHQWYTVLDLKDAFFCLRLHPTSQPLFAFEWRDPEMGISGQLTWTRLPQGFKNSPTLFNEALHRDLADFRIQHPDLILLQYVDDLLLAATSELDCQQGTRALLQTLGNLGYRASAKKAQICQKQVKYLGYLLKEGQRWLTEARKETVMGQPTPKTPRQLREFLGTAGFCRLWIPGFAEMAAPLYPLTKPGTLFNWGPDQQKAYQEIKQALLTAPALGLPDLTKPFELFVDEKQGYAKGVLTQKLGPWRRPVAYLSKKLDPVAAGWPPCLRMVAAIAVLTKDAGKLTMGQPLVILAPHAVEALVKQPPDRWLSNARMTHYQALLLDTDRVQFGPVVALNPATLLPLPEEGLQHNCLDILAEAHGTRPDLTDQPLPDADHTWYTDGSSLLQEGQRKAGAAVTTETEVIWAKALPAGTSAQRAELIALTQALKMAEGKKLNVYTDSRYAFATAHIHGEIYRRRGWLTSEGKEIKNKDEILALLKALFLPKRLSIIHCPGHQKGHSAEARGNRMADQAARKAAITETPDTSTLLAGKRTADGSEFEKRTADGSEFESPKKKAKVE

SEQ ID NO: 6099 - protein, 2103 aa, synthetic construct; identical to SEQ ID NO: 6098

SEQ ID NO: 6100 - protein, 2017 aa, synthetic construct
MPAAKRVKLDGGDKKYSIGLDIGTNSVGWAVITDEYKVPSKKFKVLGNTDRHSIKKNLIGALLFDSGETAEATRLKRTARRRYTRRKNRICYLQEIFSNEMAKVDDSFFHRLEESFLVEEDKKHERHPIFGNIVDEVAYHEKYPTIYHLRKKLVDSTDKADLRLIYLALAHMIKFRGHFLIEGDLNPDNSDVDKLFIQLVQTYNQLFEENPINASGVDAKAILSARLSKSRRLENLIAQLPGEKKNGLFGNLIALSLGLTPNFKSNFDLAEDAKLQLSKDTYDDDLDNLLAQIGDQYADLFLAAKNLSDAILLSDILRVNTEITKAPLSASMIKRYDEHHQDLTLLKALVRQQLPEKYKEIFFDQSKNGYAGYIDGGASQEEFYKFIKPILEKMDGTEELLVKLNREDLLRKQRTFDNGSIPHQIHLGELHAILRRQEDFYPFLKDNREKIEKILTFRIPYYVGPLARGNSRFAWMTRKSEETITPWNFEEVVDKGASAQSFIERMTNFDKNLPNEKVLPKHSLLYEYFTVYNELTKVKYVTEGMRKPAFLSGEQKKAIVDLLFKTNRKVTVKQLKEDYFKKIECFDSVEISGVEDRFNASLGTYHDLLKIIKDKDFLDNEENEDILEDIVLTLTLFEDREMIEERLKTYAHLFDDKVMKQLKRRRYTGWGRLSRKLINGIRDKQSGKTILDFLKSDGFANRNFMQLIHDDSLTFKEDIQKAQVSGQGDSLHEHIANLAGSPAIKKGILQTVKVVDELVKVMGRHKPENIVIEMARENQTTQKGQKNSRERMKRIEEGIKELGSQILKEHPVENTQLQNEKLYLYYLQNGRDMYVDQELDINRLSDYDVDHIVPQSFLKDDSIDNKVLTRSDKARGKSDNVPSEEVVKKMKNYWRQLLNAKLITQRKFDNLTKAERGGLSELDKAGFIKRQLVETRQITKHVAQILDSRMNTKYDENDKLIREVKVITLKSKLVSDFRKDFQFYKVREINNYHHAHDAYLNAVVGTALIKKYPKLESEFVYGDYKVYDVRKMIAKSEQEIGKATAKYFFYSNIMNFFKTEITLANGEIRKRPLIETNGETGEIVWDKGRDFATVRKVLSMPQVNIVKKTEVQTGGFSKESILPKRNSDKLIARKKDWDPKKYGGFDSPTVAYSVLVVAKVEKGKSKKLKSVKELLGITIMERSSFEKNPIDFLEAKGYKEVKKDLIIKLPKYSLFELENGRKRMLASAGELQKGNELALPSKYVNFLYLASHYEKLKGSPEDNEQKQLFVEQHKHYLDEIIEQISEFSKRVILADANLDKVLSAYNKHRDKPIREQAENIIHLFTLTNLGAPAAFKYFDTTIDRKRYTSTKEVLDATLIHQSITGLYETRIDLSQLGGDGGGGSGGSGGSGGSGGSGGSGGLTAAIDILAPQQCAEPITWKSDEPVWVDQWPLTNDKLAAAQQLVQEQLEAGHITESSSPWNTPIFVIKKKSGKWRLLQDLRAVNATMVLMGALQPGLPSPVAPPQGYLKIIIDLKDCFFSIPLHPSDQKRFAFSLPSTNFKEPMQRFQWKVLPQGMANSPTLCQKYVATAIHKVRHAWKQMYIIHYMDDILIAGKDGQQVLQCFDQLKQELTAAGLHIAPEKVQLQDPYTYLGFELNGPKITNQKAVIRKDKLQTLNDFQKLLGDINWLRPYLKLTTGDLKPLFDTLKPDSDPNSHRSLSKEALASLEKVETAIAEQFVTHINYSLPLIFLIFNTALTPTGLFWQDNPIMWIHLPASPKKVLLPYYDAIADLIILGRDHSKKYFGIEPSTIIQPYSKSQIDWLMQNTEMWPIACASFVGILDNHYPPNKLIQFCKLHTFVFPQIISKTPLNNALLVFTDGSSTGMAAYTLTDTTIKFQTNLNSAQLVELQALIAVLSAFPNQPLNIYTDSAYLAHSIPLLETVAQIKHISETAKLFLQCQQLIYNRSIPFYIGHVRAHSGLPGPIAQGNQRADLATKIVASNINTAGKRTADGSEFEKRTADGSEFESPKKKAKVE

SEQ ID NO: 6101 - protein, 2183 aa, synthetic construct
MPAAKRVKLDGGDKKYSIGLDIGTNSVGWAVITDEYKVPSKKFKVLGNTDRHSIKKNLIGALLFDSGETAEATRLKRTARRRYTRRKNRICYLQEIFSNEMAKVDDSFFHRLEESFLVEEDKKHERHPIFGNIVDEVAYHEKYPTIYHLRKKLVDSTDKADLRLIYLALAHMIKFRGHFLIEGDLNPDNSDVDKLFIQLVQTYNQLFEENPINASGVDAKAILSARLSKSRRLENLIAQLPGEKKNGLFGNLIALSLGLTPNFKSNFDLAEDAKLQLSKDTYDDDLDNLLAQIGDQYADLFLAAKNLSDAILLSDILRVNTEITKAPLSASMIKRYDEHHQDLTLLKALVRQQLPEKYKEIFFDQSKNGYAGYIDGGASQEEFYKFIKPILEKMDGTEELLVKLNREDLLRKQRTFDNGSIPHQIHLGELHAILRRQEDFYPFLKDNREKIEKILTFRIPYYVGPLARGNSRFAWMTRKSEETITPWNFEEVVDKGASAQSFIERMTNFDKNLPNEKVLPKHSLLYEYFTVYNELTKVKYVTEGMRKPAFLSGEQKKAIVDLLFKTNRKVTVKQLKEDYFKKIECFDSVEISGVEDRFNASLGTYHDLLKIIKDKDFLDNEENEDILEDIVLTLTLFEDREMIEERLKTYAHLFDDKVMKQLKRRRYTGWGRLSRKLINGIRDKQSGKTILDFLKSDGFANRNFMQLIHDDSLTFKEDIQKAQVSGQGDSLHEHIANLAGSPAIKKGILQTVKVVDELVKVMGRHKPENIVIEMARENQTTQKGQKNSRERMKRIEEGIKELGSQILKEHPVENTQLQNEKLYLYYLQNGRDMYVDQELDINRLSDYDVDHIVPQSFLKDDSIDNKVLTRSDKARGKSDNVPSEEVVKKMKNYWRQLLNAKLITQRKFDNLTKAERGGLSELDKAGFIKRQLVETRQITKHVAQILDSRMNTKYDENDKLIREVKVITLKSKLVSDFRKDFQFYKVREINNYHHAHDAYLNAVVGTALIKKYPKLESEFVYGDYKVYDVRKMIAKSEQEIGKATAKYFFYSNIMNFFKTEITLANGEIRKRPLIETNGETGEIVWDKGRDFATVRKVLSMPQVNIVKKTEVQTGGFSKESILPKRNSDKLIARKKDWDPKKYGGFDSPTVAYSVLVVAKVEKGKSKKLKSVKELLGITIMERSSFEKNPIDFLEAKGYKEVKKDLIIKLPKYSLFELENGRKRMLASAGELQKGNELALPSKYVNFLYLASHYEKLKGSPEDNEQKQLFVEQHKHYLDEIIEQISEFSKRVILADANLDKVLSAYNKHRDKPIREQAENIIHLFTLTNLGAPAAFKYFDTTIDRKRYTSTKEVLDATLIHQSITGLYETRIDLSQLGGDGGGGSGGSGGSGGSGGSGGSGGMDPLQLLQPLEAEIKGTKLKAHWNSGATITCVPQAFLEEEVPIKNIWIKTIHGEKEQPVYYLTFKIQGRKVEAEVISSPYDYILVSPSDIPWLMKKPLQLTTLVPLQEYEERLLKQTMLTGSYKEKLQSLFLKYDALWQHWENQVGHRRIKPHHIATGTVNPRPQKQYPINPKAKASIQTVINDLLKQGVLIQQNSIMNTPVYPVPKPDGKWRMVLDYREVNKTIPLIAAQNQHSAGILSSIFRGKYKTTLDLSNGFWAHSITPESYWLTAFTWLGQQYCWTRLPQGFLNSPALFTADVVDLLKEVPNVQVYVDDIYISHDDPREHLEQLEKVFSLLLNAGYVVSLKKSEIAQHEVEFLGFNITKEGRGLTETFKQKLLNITPPRDLKQLQSILGLLNFARNFIPNFSELVKPLYNIIATANGKYITWTTDNSQQLQNIISMLNSAENLEERNPEVRLIMKVNTSPSAGYIRFYNEFAKRPIMYLNYVYTKAEVKFTNTEKLLTTIHKGLIKALDLGMGQEILVYSPIVSMTKIQKTPLPERKALPIRWITWMSYLEDPRIQFHYDKTLPELQQVPTVTDDIIAKIKHPSEFSMVFYTDGSAIKHPNVNKSHNAGMGIAQVQFKPEFTVINTWSIPLGDHTAQLAEVAAVEFACKKALKIDGPVLIVTDSFYVAESVNKELPYWQSNGFFNNKKKPLKHVSKWKSIADCIQLKPDIIIIHEKGHQPTASTFHTEGNNLADKLATQGSYVVNAGKRTADGSEFEKRTADGSEFESPKKKAKVE

SEQ ID NO: 6102 - protein, 2094 aa, synthetic construct
MPAAKRVKLDGGDKKYSIGLDIGTNSVGWAVITDEYKVPSKKFKVLGNTDRHSIKKNLIGALLFDSGETAEATRLKRTARRRYTRRKNRICYLQEIFSNEMAKVDDSFFHRLEESFLVEEDKKHERHPIFGNIVDEVAYHEKYPTIYHLRKKLVDSTDKADLRLIYLALAHMIKFRGHFLIEGDLNPDNSDVDKLFIQLVQTYNQLFEENPINASGVDAKAILSARLSKSRRLENLIAQLPGEKKNGLFGNLIALSLGLTPNFKSNFDLAEDAKLQLSKDTYDDDLDNLLAQIGDQYADLFLAAKNLSDAILLSDILRVNTEITKAPLSASMIKRYDEHHQDLTLLKALVRQQLPEKYKEIFFDQSKNGYAGYIDGGASQEEFYKFIKPILEKMDGTEELLVKLNREDLLRKQRTFDNGSIPHQIHLGELHAILRRQEDFYPFLKDNREKIEKILTFRIPYYVGPLARGNSRFAWMTRKSEETITPWNFEEVVDKGASAQSFIERMTNFDKNLPNEKVLPKHSLLYEYFTVYNELTKVKYVTEGMRKPAFLSGEQKKAIVDLLFKTNRKVTVKQLKEDYFKKIECFDSVEISGVEDRFNASLGTYHDLLKIIKDKDFLDNEENEDILEDIVLTLTLFEDREMIEERLKTYAHLFDDKVMKQLKRRRYTGWGRLSRKLINGIRDKQSGKTILDFLKSDGFANRNFMQLIHDDSLTFKEDIQKAQVSGQGDSLHEHIANLAGSPAIKKGILQTVKVVDELVKVMGRHKPENIVIEMARENQTTQKGQKNSRERMKRIEEGIKELGSQILKEHPVENTQLQNEKLYLYYLQNGRDMYVDQELDINRLSDYDVDHIVPQSFLKDDSIDNKVLTRSDKARGKSDNVPSEEVVKKMKNYWRQLLNAKLITQRKFDNLTKAERGGLSELDKAGFIKRQLVETRQITKHVAQILDSRMNTKYDENDKLIREVKVITLKSKLVSDFRKDFQFYKVREINNYHHAHDAYLNAVVGTALIKKYPKLESEFVYGDYKVYDVRKMIAKSEQEIGKATAKYFFYSNIMNFFKTEITLANGEIRKRPLIETNGETGEIVWDKGRDFATVRKVLSMPQVNIVKKTEVQTGGFSKESILPKRNSDKLIARKKDWDPKKYGGFDSPTVAYSVLVVAKVEKGKSKKLKSVKELLGITIMERSSFEKNPIDFLEAKGYKEVKKDLIIKLPKYSLFELENGRKRMLASAGELQKGNELALPSKYVNFLYLASHYEKLKGSPEDNEQKQLFVEQHKHYLDEIIEQISEFSKRVILADANLDKVLSAYNKHRDKPIREQAENIIHLFTLTNLGAPAAFKYFDTTIDRKRYTSTKEVLDATLIHQSITGLYETRIDLSQLGGDGGGGSGGSGGSGGSGGSGGSGGIPWLMKKPLQLTTLVPLQEYEERLLKQTMLTGSYKEKLQSLFLKYDALWQHWENQVGHRRIKPHHIATGTVNPRPQKQYPINPKAKASIQTVINDLLKQGVLIQQNSIMNTPVYPVPKPDGKWRMVLDYREVNKTIPLIAAQNQHSAGILSSIFRGKYKTTLDLSNGFWAHSITPESYWLTAFTWLGQQYCWTRLPQGFLNSPALFNADVVDLLKEVPNVQVYVDDIYISHDDPREHLEQLEKVFSLLLNAGYVVSLKKSEIAQHEVEFLGFNITKEGRGLTETFKQKLLNITPPRDLKQLQSILGLLNFARNFIPNFSELVKPLYNIIATAPGKYITWTTDNSQQLQNIISMLNSAENLEERNPEVRLIMKVNTSPSAGYIRFYNEFAKRPIMYLNYVYTKAEVKFTNTEKLLTTIHKGLIKALDLGMGQEILVYSPIVSMTKIQKTPLPERKALPIRWITWMSYLEDPRIQFHYDKTLPELQQVPTVTDDIIAKIKHPSEFSMVFYTDGSAIKHPNVNKSHNAGMGIAQVQFKPEFTVINTWSIPLGDHTAQLAEVAAVEFACKKALKIDGPVLIVTDSFYVAESVNKELPYWQSNGFFNNKKKPLKHVSKWKSIADCIQLKPDIIIIHEKGHQPTASTFHTEGNNLADKLATQGSYVVNAGKRTADGSEFEKRTADGSEFESPKKKAKVE

SEQ ID NO: 6103 - protein, 2094 aa, synthetic construct
MPAAKRVKLDGGDKKYSIGLDIGTNSVGWAVITDEYKVPSKKFKVLGNTDRHSIKKNLIGALLFDSGETAEATRLKRTARRRYTRRKNRICYLQEIFSNEMAKVDDSFFHRLEESFLVEEDKKHERHPIFGNIVDEVAYHEKYPTIYHLRKKLVDSTDKADLRLIYLALAHMIKFRGHFLIEGDLNPDNSDVDKLFIQLVQTYNQLFEENPINASGVDAKAILSARLSKSRRLENLIAQLPGEKKNGLFGNLIALSLGLTPNFKSNFDLAEDAKLQLSKDTYDDDLDNLLAQIGDQYADLFLAAKNLSDAILLSDILRVNTEITKAPLSASMIKRYDEHHQDLTLLKALVRQQLPEKYKEIFFDQSKNGYAGYIDGGASQEEFYKFIKPILEKMDGTEELLVKLNREDLLRKQRTFDNGSIPHQIHLGELHAILRRQEDFYPFLKDNREKIEKILTFRIPYYVGPLARGNSRFAWMTRKSEETITPWNFEEVVDKGASAQSFIERMTNFDKNLPNEKVLPKHSLLYEYFTVYNELTKVKYVTEGMRKPAFLSGEQKKAIVDLLFKTNRKVTVKQLKEDYFKKIECFDSVEISGVEDRFNASLGTYHDLLKIIKDKDFLDNEENEDILEDIVLTLTLFEDREMIEERLKTYAHLFDDKVMKQLKRRRYTGWGRLSRKLINGIRDKQSGKTILDFLKSDGFANRNFMQLIHDDSLTFKEDIQKAQVSGQGDSLHEHIANLAGSPAIKKGILQTVKVVDELVKVMGRHKPENIVIEMARENQTTQKGQKNSRERMKRIEEGIKELGSQILKEHPVENTQLQNEKLYLYYLQNGRDMYVDQELDINRLSDYDVDHIVPQSFLKDDSIDNKVLTRSDKARGKSDNVPSEEVVKKMKNYWRQLLNAKLITQRKFDNLTKAERGGLSELDKAGFIKRQLVETRQITKHVAQILDSRMNTKYDENDKLIREVKVITLKSKLVSDFRKDFQFYKVREINNYHHAHDAYLNAVVGTALIKKYPKLESEFVYGDYKVYDVRKMIAKSEQEIGKATAKYFFYSNIMNFFKTEITLANGEIRKRPLIETNGETGEIVWDKGRDFATVRKVLSMPQVNIVKKTEVQTGGFSKESILPKRNSDKLIARKKDWDPKKYGGFDSPTVAYSVLVVAKVEKGKSKKLKSVKELLGITIMERSSFEKNPIDFLEAKGYKEVKKDLIIKLPKYSLFELENGRKRMLASAGELQKGNELALPSKYVNFLYLASHYEKLKGSPEDNEQKQLFVEQHKHYLDEIIEQISEFSKRVILADANLDKVLSAYNKHRDKPIREQAENIIHLFTLTNLGAPAAFKYFDTTIDRKRYTSTKEVLDATLIHQSITGLYETRIDLSQLGGDGGGGSGGSGGSGGSGGSGGSGGIPWLMKKPLQLTTLVPLQEYEERLLKQTMLTGSYKEKLQSLFLKYDALWQHWENQVGHRRIKPHHIATGTVNPRPQKQYPINPKAKASIQTVINDLLKQGVLIQQNSIMNTPVYPVPKPDGKWRMVLDYREVNKTIPLIAAQNQHSAGILSSIFRGKYKTTLDLSNGFWAHSITPESYWLTAFTWLGQQYCWTRLPQGFLNSPALFNADVVDLLKEVPNVQVYVDDIYISHDDPREHLEQLEKVFSLLLNAGYVVSLKKSEIAQHEVEFLGFNITKEGRGLTETFKQKLLNITPPRDLKQLQSILGKLNFARNFIPNFSELVKPLYNIIATAPGKYITWTTDNSQQLQNIISMLNSAENLEERNPEVRLIMKVNTSPSAGYIRFYNEFAKRPIMYLNYVYTKAEVKFTNTEKLLTTIHKGLIKALDLGMGQEILVYSPIVSMTKIQKTPLPERKALPIRWITWMSYLEDPRIQFHYDKTLPELQQVPTVTDDIIAKIKHPSEFSMVFYTDGSAIKHPNVNKSHNAGMGIAQVQFKPEFTVINTWSIPLGDHTAQLAEVAAVEFACKKALKIDGPVLIVTDSFYVAESVNKELPYWQSNGFFNNKKKPLKHVSKWKSIADCIQLKPDIIIIHEKGHQPTASTFHTEGNNLADKLATQGSYVVNAGKRTADGSEFEKRTADGSEFESPKKKAKVE

SEQ ID NO: 6104 - protein, 2024 aa, synthetic construct
MPAAKRVKLDGGDKKYSIGLDIGTNSVGWAVITDEYKVPSKKFKVLGNTDRHSIKKNLIGALLFDSGETAEATRLKRTARRRYTRRKNRICYLQEIFSNEMAKVDDSFFHRLEESFLVEEDKKHERHPIFGNIVDEVAYHEKYPTIYHLRKKLVDSTDKADLRLIYLALAHMIKFRGHFLIEGDLNPDNSDVDKLFIQLVQTYNQLFEENPINASGVDAKAILSARLSKSRRLENLIAQLPGEKKNGLFGNLIALSLGLTPNFKSNFDLAEDAKLQLSKDTYDDDLDNLLAQIGDQYADLFLAAKNLSDAILLSDILRVNTEITKAPLSASMIKRYDEHHQDLTLLKALVRQQLPEKYKEIFFDQSKNGYAGYIDGGASQEEFYKFIKPILEKMDGTEELLVKLNREDLLRKQRTFDNGSIPHQIHLGELHAILRRQEDFYPFLKDNREKIEKILTFRIPYYVGPLARGNSRFAWMTRKSEETITPWNFEEVVDKGASAQSFIERMTNFDKNLPNEKVLPKHSLLYEYFTVYNELTKVKYVTEGMRKPAFLSGEQKKAIVDLLFKTNRKVTVKQLKEDYFKKIECFDSVEISGVEDRFNASLGTYHDLLKIIKDKDFLDNEENEDILEDIVLTLTLFEDREMIEERLKTYAHLFDDKVMKQLKRRRYTGWGRLSRKLINGIRDKQSGKTILDFLKSDGFANRNFMQLIHDDSLTFKEDIQKAQVSGQGDSLHEHIANLAGSPAIKKGILQTVKVVDELVKVMGRHKPENIVIEMARENQTTQKGQKNSRERMKRIEEGIKELGSQILKEHPVENTQLQNEKLYLYYLQNGRDMYVDQELDINRLSDYDVDHIVPQSFLKDDSIDNKVLTRSDKARGKSDNVPSEEVVKKMKNYWRQLLNAKLITQRKFDNLTKAERGGLSELDKAGFIKRQLVETRQITKHVAQILDSRMNTKYDENDKLIREVKVITLKSKLVSDFRKDFQFYKVREINNYHHAHDAYLNAVVGTALIKKYPKLESEFVYGDYKVYDVRKMIAKSEQEIGKATAKYFFYSNIMNFFKTEITLANGEIRKRPLIETNGETGEIVWDKGRDFATVRKVLSMPQVNIVKKTEVQTGGFSKESILPKRNSDKLIARKKDWDPKKYGGFDSPTVAYSVLVVAKVEKGKSKKLKSVKELLGITIMERSSFEKNPIDFLEAKGYKEVKKDLIIKLPKYSLFELENGRKRMLASAGELQKGNELALPSKYVNFLYLASHYEKLKGSPEDNEQKQLFVEQHKHYLDEIIEQISEFSKRVILADANLDKVLSAYNKHRDKPIREQAENIIHLFTLTNLGAPAAFKYFDTTIDRKRYTSTKEVLDATLIHQSITGLYETRIDLSQLGGDGGGGSGGSGGSGGSGGSGGSGGPRSRAIDIPVPHADKISWKITDPVWVDQWPLTYEKTLAAIALVQEQLAAGHIEPTNSPWNTPIFIIKKKSGSWRLLQDLRAVNKVMVPMGALQPGLPSPVAIPLNYHKIVIDLKDCFFTIPLHPEDRPYFAFSVPQINFQSPMPRYQWKVLPQGMANSPTLCQKFVAAAIAPVRSQWPEAYILHYMDDILLACDSAEAAKACYAHIISCLTSYGLKIAPDKVQVSEPFSYLGFELHHQQVFTPRVCLKTDHLKTLNDFQKLLGDIQWLRPYLKLPTSALVPLNNILKGDPNPLSVRALTPEAKQSLALINKAIQNQSVQQISYNLPLVLLLLPTPHTPTAVFWQPNGTDPTKNGSPLLWLHLPASPSKVLLTYPSLLAMLIIKGRYTGRQLFGRDPHSIIIPYTQDQLTWLLQTSDEWAIALSSFTGDIDNHYPSDPVIQFAKLHQFIFPKITKCAPIPQATLVFTDGSSNGIAAYVIDNQPISIKSPYLSAQLVELYAILQVFTVLAHQPFNLYTDSAYIAQSVPLLETVPFIKSSTNATPLFSKLQQLILNRQHPFFIGHLRAHLNLPGPLAEGNALADAATQIFPIISDAGKRTADGSEFEKRTADGSEFESPKKKAKVE

SEQ ID NO: 6105 - protein, 2101 aa, synthetic construct
MPAAKRVKLDGGDKKYSIGLDIGTNSVGWAVITDEYKVPSKKFKVLGNTDRHSIKKNLIGALLFDSGETAEATRLKRTARRRYTRRKNRICYLQEIFSNEMAKVDDSFFHRLEESFLVEEDKKHERHPIFGNIVDEVAYHEKYPTIYHLRKKLVDSTDKADLRLIYLALAHMIKFRGHFLIEGDLNPDNSDVDKLFIQLVQTYNQLFEENPINASGVDAKAILSARLSKSRRLENLIAQLPGEKKNGLFGNLIALSLGLTPNFKSNFDLAEDAKLQLSKDTYDDDLDNLLAQIGDQYADLFLAAKNLSDAILLSDILRVNTEITKAPLSASMIKRYDEHHQDLTLLKALVRQQLPEKYKEIFFDQSKNGYAGYIDGGASQEEFYKFIKPILEKMDGTEELLVKLNREDLLRKQRTFDNGSIPHQIHLGELHAILRRQEDFYPFLKDNREKIEKILTFRIPYYVGPLARGNSRFAWMTRKSEETITPWNFEEVVDKGASAQSFIERMTNFDKNLPNEKVLPKHSLLYEYFTVYNELTKVKYVTEGMRKPAFLSGEQKKAIVDLLFKTNRKVTVKQLKEDYFKKIECFDSVEISGVEDRFNASLGTYHDLLKIIKDKDFLDNEENEDILEDIVLTLTLFEDREMIEERLKTYAHLFDDKVMKQLKRRRYTGWGRLSRKLINGIRDKQSGKTILDFLKSDGFANRNFMQLIHDDSLTFKEDIQKAQVSGQGDSLHEHIANLAGSPAIKKGILQTVKVVDELVKVMGRHKPENIVIEMARENQTTQKGQKNSRERMKRIEEGIKELGSQILKEHPVENTQLQNEKLYLYYLQNGRDMYVDQELDINRLSDYDVDHIVPQSFLKDDSIDNKVLTRSDKARGKSDNVPSEEVVKKMKNYWRQLLNAKLITQRKFDNLTKAERGGLSELDKAGFIKRQLVETRQITKHVAQILDSRMNTKYDENDKLIREVKVITLKSKLVSDFRKDFQFYKVREINNYHHAHDAYLNAVVGTALIKKYPKLESEFVYGDYKVYDVRKMIAKSEQEIGKATAKYFFYSNIMNFFKTEITLANGEIRKRPLIETNGETGEIVWDKGRDFATVRKVLSMPQVNIVKKTEVQTGGFSKESILPKRNSDKLIARKKDWDPKKYGGFDSPTVAYSVLVVAKVEKGKSKKLKSVKELLGITIMERSSFEKNPIDFLEAKGYKEVKKDLIIKLPKYSLFELENGRKRMLASAGELQKGNELALPSKYVNFLYLASHYEKLKGSPEDNEQKQLFVEQHKHYLDEIIEQISEFSKRVILADANLDKVLSAYNKHRDKPIREQAENIIHLFTLTNLGAPAAFKYFDTTIDRKRYTSTKEVLDATLIHQSITGLYETRIDLSQLGGDGGGGSGGSGGSGGSGGSGGSGGVLNLEEEYRLHEKPVPSSIDPSWLQLFPTVWAERAGMGLANQVPPVVVELRSGASPVAVRQYPMSKEAREGIRPHIQRFLDLGVLVPCQSPWNTPLLPVKKPGTNDYRPVQDLREINKRVQDIHPTVPNPYNLLSSLPPSHTWYSVLDLKDAFFCLKLHPNSQPLFAFEWRDPEKGNTGQLTWTRLPQGFKNSPTLFDEALHRDLAPFRALNPQVVLLQYVDDLLVAAPTYRDCKEGTQKLLQELSKLGYRVSAKKAQLCQKEVTYLGYLLKEGKRWLTPARKATVMKIPPPTTPRQVREFLGTAGFCRLWIPGFASLAAPLYPLTKESIPFIWTEEHQKAFDRIKEALLSAPALALPDLTKPFTLYVDERAGVARGVLTQTLGPWRRPVAYLSKKLDPVASGWPTCLKAVAAVALLLKDADKLTLGQNVTVIASHSLESIVRQPPDRWMTNARMTHYQSLLLNERVSFAPPAVLNPATLLPVESEATPVHRCSEILAEETGTRRDLKDQPLPGVPAWYTDGSSFIAEGKRRAGAAIVDGKRTVWASSLPEGTSAQKAELVALTQALRLAEGKDINIYTDSRYAFATAHIHGAIYKQRGLLTSAGKDIKNKEEILALLEAIHLPKRVAIIHCPGHQKGNDPVATGNRRADEAAKQAALSTRVLAETTKPAGKRTADGSEFEKRTADGSEFESPKKKAKVE

SEQ ID NO: 6106 - protein, 2101 aa, synthetic construct
MPAAKRVKLDGGDKKYSIGLDIGTNSVGWAVITDEYKVPSKKFKVLGNTDRHSIKKNLIGALLFDSGETAEATRLKRTARRRYTRRKNRICYLQEIFSNEMAKVDDSFFHRLEESFLVEEDKKHERHPIFGNIVDEVAYHEKYPTIYHLRKKLVDSTDKADLRLIYLALAHMIKFRGHFLIEGDLNPDNSDVDKLFIQLVQTYNQLFEENPINASGVDAKAILSARLSKSRRLENLIAQLPGEKKNGLFGNLIALSLGLTPNFKSNFDLAEDAKLQLSKDTYDDDLDNLLAQIGDQYADLFLAAKNLSDAILLSDILRVNTEITKAPLSASMIKRYDEHHQDLTLLKALVRQQLPEKYKEIFFDQSKNGYAGYIDGGASQEEFYKFIKPILEKMDGTEELLVKLNREDLLRKQRTFDNGSIPHQIHLGELHAILRRQEDFYPFLKDNREKIEKILTFRIPYYVGPLARGNSRFAWMTRKSEETITPWNFEEVVDKGASAQSFIERMTNFDKNLPNEKVLPKHSLLYEYFTVYNELTKVKYVTEGMRKPAFLSGEQKKAIVDLLFKTNRKVTVKQLKEDYFKKIECFDSVEISGVEDRFNASLGTYHDLLKIIKDKDFLDNEENEDILEDIVLTLTLFEDREMIEERLKTYAHLFDDKVMKQLKRRRYTGWGRLSRKLINGIRDKQSGKTILDFLKSDGFANRNFMQLIHDDSLTFKEDIQKAQVSGQGDSLHEHIANLAGSPAIKKGILQTVKVVDELVKVMGRHKPENIVIEMARENQTTQKGQKNSRERMKRIEEGIKELGSQILKEHPVENTQLQNEKLYLYYLQNGRDMYVDQELDINRLSDYDVDHIVPQSFLKDDSIDNKVLTRSDKARGKSDNVPSEEVVKKMKNYWRQLLNAKLITQRKFDNLTKAERGGLSELDKAGFIKRQLVETRQITKHVAQILDSRMNTKYDENDKLIREVKVITLKSKLVSDFRKDFQFYKVREINNYHHAHDAYLNAVVGTALIKKYPKLESEFVYGDYKVYDVRKMIAKSEQEIGKATAKYFFYSNIMNFFKTEITLANGEIRKRPLIETNGETGEIVWDKGRDFATVRKVLSMPQVNIVKKTEVQTGGFSKESILPKRNSDKLIARKKDWDPKKYGGFDSPTVAYSVLVVAKVEKGKSKKLKSVKELLGITIMERSSFEKNPIDFLEAKGYKEVKKDLIIKLPKYSLFELENGRKRMLASAGELQKGNELALPSKYVNFLYLASHYEKLKGSPEDNEQKQLFVEQHKHYLDEIIEQISEFSKRVILADANLDKVLSAYNKHRDKPIREQAENIIHLFTLTNLGAPAAFKYFDTTIDRKRYTSTKEVLDATLIHQSITGLYETRIDLSQLGGDGGGGSGGSGGSGGSGGSGGSGGVLNLEEEYRLHEKPVPSSIDPSWLQLFPTVWAERAGMGLANQVPPVVVELRSGASPVAVRQYPMSKEAREGIRPHIQRFLDLGVLVPCQSPWNTPLLPVKKPGTNDYRPVQDLREINKRVQDIHPTVPNPYNLLSSLPPSHTWYSVLDLKDAFFCLKLHPNSQPLFAFEWRDPEKGNTGQLTWTRLPQGFKNSPTLFNEALHRDLAPFRALNPQVVLLQYVDDLLVAAPTYRDCKEGTQKLLQELSKLGYRVSAKKAQLCQKEVTYLGYLLKEGKRWLTPARKATVMKIPPPTTPRQVREFLGTAGFCRLWIPGFASLAAPLYPLTKPSIPFIWTEEHQKAFDRIKEALLSAPALALPDLTKPFTLYVDERAGVARGVLTQTLGPWRRPVAYLSKKLDPVASGWPTCLKAVAAVALLLKDADKLTLGQNVTVIASHSLESIVRQPPDRWMTNARMTHYQSLLLNERVSFAPPAVLNPATLLPVESEATPVHRCSEILAEETGTRRDLKDQPLPGVPAWYTDGSSFIAEGKRRAGAAIVDGKRTVWASSLPEGTSAQKAELVALTQALRLAEGKDINIYTDSRYAFATAHIHGAIYKQRGWLTSAGKDIKNKEEILALLEAIHLPKRVAIIHCPGHQKGNDPVATGNRRADEAAKQAALSTRVLAETTKPAGKRTADGSEFEKRTADGSEFESPKKKAKVE

SEQ ID NO: 6107 - protein, 2103 aa, synthetic construct
MPAAKRVKLDGGDKKYSIGLDIGTNSVGWAVITDEYKVPSKKFKVLGNTDRHSIKKNLIGALLFDSGETAEATRLKRTARRRYTRRKNRICYLQEIFSNEMAKVDDSFFHRLEESFLVEEDKKHERHPIFGNIVDEVAYHEKYPTIYHLRKKLVDSTDKADLRLIYLALAHMIKFRGHFLIEGDLNPDNSDVDKLFIQLVQTYNQLFEENPINASGVDAKAILSARLSKSRRLENLIAQLPGEKKNGLFGNLIALSLGLTPNFKSNFDLAEDAKLQLSKDTYDDDLDNLLAQIGDQYADLFLAAKNLSDAILLSDILRVNTEITKAPLSASMIKRYDEHHQDLTLLKALVRQQLPEKYKEIFFDQSKNGYAGYIDGGASQEEFYKFIKPILEKMDGTEELLVKLNREDLLRKQRTFDNGSIPHQIHLGELHAILRRQEDFYPFLKDNREKIEKILTFRIPYYVGPLARGNSRFAWMTRKSEETITPWNFEEVVDKGASAQSFIERMTNFDKNLPNEKVLPKHSLLYEYFTVYNELTKVKYVTEGMRKPAFLSGEQKKAIVDLLFKTNRKVTVKQLKEDYFKKIECFDSVEISGVEDRFNASLGTYHDLLKIIKDKDFLDNEENEDILEDIVLTLTLFEDREMIEERLKTYAHLFDDKVMKQLKRRRYTGWGRLSRKLINGIRDKQSGKTILDFLKSDGFANRNFMQLIHDDSLTFKEDIQKAQVSGQGDSLHEHIANLAGSPAIKKGILQTVKVVDELVKVMGRHKPENIVIEMARENQTTQKGQKNSRERMKRIEEGIKELGSQILKEHPVENTQLQNEKLYLYYLQNGRDMYVDQELDINRLSDYDVDHIVPQSFLKDDSIDNKVLTRSDKARGKSDNVPSEEVVKKMKNYWRQLLNAKLITQRKFDNLTKAERGGLSELDKAGFIKRQLVETRQITKHVAQILDSRMNTKYDENDKLIREVKVITLKSKLVSDFRKDFQFYKVREINNYHHAHDAYLNAVVGTALIKKYPKLESEFVYGDYKVYDVRKMIAKSEQEIGKATAKYFFYSNIMNFFKTEITLANGEIRKRPLIETNGETGEIVWDKGRDFATVRKVLSMPQVNIVKKTEVQTGGFSKESILPKRNSDKLIARKKDWDPKKYGGFDSPTVAYSVLVVAKVEKGKSKKLKSVKELLGITIMERSSFEKNPIDFLEAKGYKEVKKDLIIKLPKYSLFELENGRKRMLASAGELQKGNELALPSKYVNFLYLASHYEKLKGSPEDNEQKQLFVEQHKHYLDEIIEQISEFSKRVILADANLDKVLSAYNKHRDKPIREQAENIIHLFTLTNLGAPAAFKYFDTTIDRKRYTSTKEVLDATLIHQSITGLYETRIDLSQLGGDGGGGSGGSGGSGGSGGSGGSGGTLNIEDEYRLHETSKEPDVPLGSTWLSDFPQAWAETGGMGLAVRQAPLIIPLKATSTPVSIKQYPMSQEARLGIKPHIQRLLDQGILVPCQSPWNTPLLPVKKPGTNDYRPVQDLREVNKRVEDIHPTVPNPYNLLSGLPPSHQWYTVLDLKDAFFCLRLHPTSQPLFAFEWRDPEMGISGQLTWTRLPQGFKNSPTLFNEALHRDLADFRIQHPDLILLQYVDDLLLAATSEQDCQRGTRALLQTLGNLGYRASAKKAQICQKQVKYLGYLLKEGQRWLTEARKETVMGQPTPKTPRQLREFLGKAGFCRLFIPGFAEMAAPLYPLTKPGTLFNWGPDQQKAYQEIKQALLTAPALGLPDLTKPFELFVDEKQGYAKGVLTQKLGPWRRPVAYLSKKLDPVAAGWPPCLRMVAAIAVLTKDAGKLTMGQPLVILAPHAVEALVKQPPDRWLSNARMTHYQAMLLDTDRVQFGPVVALNPATLLPLPEKEAPHDCLEILAETHGTRPDLTDQPIPDADYTWYTDGSSFLQEGQRRAGAAVTTETEVIWARALPAGTSAQRAELIALTQALKMAEGKKLNVYTDSRYAFATAHVHGEIYRRRGWLTSEGREIKNKNEILALLKALFLPKRLSIIHCPGHQKGNSAEARGNRMADQAAREAAMKAVLETSTLLAGKRTADGSEFEKRTADGSEFESPKKKAKVE

SEQ ID NO: 6108 - protein, 2092 aa, synthetic construct
MPAAKRVKLDGGDKKYSIGLDIGTNSVGWAVITDEYKVPSKKFKVLGNTDRHSIKKNLIGALLFDSGETAEATRLKRTARRRYTRRKNRICYLQEIFSNEMAKVDDSFFHRLEESFLVEEDKKHERHPIFGNIVDEVAYHEKYPTIYHLRKKLVDSTDKADLRLIYLALAHMIKFRGHFLIEGDLNPDNSDVDKLFIQLVQTYNQLFEENPINASGVDAKAILSARLSKSRRLENLIAQLPGEKKNGLFGNLIALSLGLTPNFKSNFDLAEDAKLQLSKDTYDDDLDNLLAQIGDQYADLFLAAKNLSDAILLSDILRVNTEITKAPLSASMIKRYDEHHQDLTLLKALVRQQLPEKYKEIFFDQSKNGYAGYIDGGASQEEFYKFIKPILEKMDGTEELLVKLNREDLLRKQRTFDNGSIPHQIHLGELHAILRRQEDFYPFLKDNREKIEKILTFRIPYYVGPLARGNSRFAWMTRKSEETITPWNFEEVVDKGASAQSFIERMTNFDKNLPNEKVLPKHSLLYEYFTVYNELTKVKYVTEGMRKPAFLSGEQKKAIVDLLFKTNRKVTVKQLKEDYFKKIECFDSVEISGVEDRFNASLGTYHDLLKIIKDKDFLDNEENEDILEDIVLTLTLFEDREMIEERLKTYAHLFDDKVMKQLKRRRYTGWGRLSRKLINGIRDKQSGKTILDFLKSDGFANRNFMQLIHDDSLTFKEDIQKAQVSGQGDSLHEHIANLAGSPAIKKGILQTVKVVDELVKVMGRHKPENIVIEMARENQTTQKGQKNSRERMKRIEEGIKELGSQILKEHPVENTQLQNEKLYLYYLQNGRDMYVDQELDINRLSDYDVDHIVPQSFLKDDSIDNKVLTRSDKARGKSDNVPSEEVVKKMKNYWRQLLNAKLITQRKFDNLTKAERGGLSELDKAGFIKRQLVETRQITKHVAQILDSRMNTKYDENDKLIREVKVITLKSKLVSDFRKDFQFYKVREINNYHHAHDAYLNAVVGTALIKKYPKLESEFVYGDYKVYDVRKMIAKSEQEIGKATAKYFFYSNIMNFFKTEITLANGEIRKRPLIETNGETGEIVWDKGRDFATVRKVLSMPQVNIVKKTEVQTGGFSKESILPKRNSDKLIARKKDWDPKKYGGFDSPTVAYSVLVVAKVEKGKSKKLKSVKELLGITIMERSSFEKNPIDFLEAKGYKEVKKDLIIKLPKYSLFELENGRKRMLASAGELQKGNELALPSKYVNFLYLASHYEKLKGSPEDNEQKQLFVEQHKHYLDEIIEQISEFSKRVILADANLDKVLSAYNKHRDKPIREQAENIIHLFTLTNLGAPAAFKYFDTTIDRKRYTSTKEVLDATLIHQSITGLYETRIDLSQLGGDGGGGGGSGGTAPLEEEYRLFLEAPIQNVTLLEQWKREIPKVWAEINPPGLASTQAPIHVQLLSTALPVRVRQYPITLEAKRSLRETIRKFRAAGILRPVHSPWNTPLLPVRKSGTSEYRMVQDLREVNKRVETIHPTVPNPYTLLSLLPPDRIWYSVLDLKDAFFCIPLAPESQLIFAFEWADAEEGESGQLTWTRLPQGFKNSPTLFNEALNRDLQGFRLDHPSVSLLQYVDDLLIAADTQAACLSATRDLLMTLAELGYRVSGKKAQLCQEEVTYLGFKIHKGSRSLSNSRTQAILQIPVPKTKRQVREFLGKIGYCRLFIPGFAELAQPLYAATRPGNDPLVWGEKEEEAFQSLKLALTQPPALALPSLDKPFQLFVEETSGAAKGVLTQALGPWKRPVAYLSKRLDPVAAGWPRCLRAIAAAALLTREASKLTFGQDIEITSSHNLESLLRSPPDKWLTNARITQYQVLLLDPPRVRFKQTAALNPATLLPETDDTLPIHHCLDTLDSLTSTRPDLTDQPLAQAEATLFTDGSSYIRDGKRYAGAAVVTLDSVIWAEPLPIGTSAQKAELIALTKALEWSKDKSVNIYTDSRYAFATLHVHGMIYRERGWLTAGGKAIKNAPEILALLTAVWLPKRVAVMHCKGHQKDDAPTSTGNRRADEVAREVAIRPLSTQATISAGKRTADGSEFEKRTADGSEFESPKKKAKVE

SEQ ID NO: 6109 - protein, 2081 aa, synthetic construct
MPAAKRVKLDGGDKKYSIGLDIGTNSVGWAVITDEYKVPSKKFKVLGNTDRHSIKKNLIGALLFDSGETAEATRLKRTARRRYTRRKNRICYLQEIFSNEMAKVDDSFFHRLEESFLVEEDKKHERHPIFGNIVDEVAYHEKYPTIYHLRKKLVDSTDKADLRLIYLALAHMIKFRGHFLIEGDLNPDNSDVDKLFIQLVQTYNQLFEENPINASGVDAKAILSARLSKSRRLENLIAQLPGEKKNGLFGNLIALSLGLTPNFKSNFDLAEDAKLQLSKDTYDDDLDNLLAQIGDQYADLFLAAKNLSDAILLSDILRVNTEITKAPLSASMIKRYDEHHQDLTLLKALVRQQLPEKYKEIFFDQSKNGYAGYIDGGASQEEFYKFIKPILEKMDGTEELLVKLNREDLLRKQRTFDNGSIPHQIHLGELHAILRRQEDFYPFLKDNREKIEKILTFRIPYYVGPLARGNSRFAWMTRKSEETITPWNFEEVVDKGASAQSFIERMTNFDKNLPNEKVLPKHSLLYEYFTVYNELTKVKYVTEGMRKPAFLSGEQKKAIVDLLFKTNRKVTVKQLKEDYFKKIECFDSVEISGVEDRFNASLGTYHDLLKIIKDKDFLDNEENEDILEDIVLTLTLFEDREMIEERLKTYAHLFDDKVMKQLKRRRYTGWGRLSRKLINGIRDKQSGKTILDFLKSDGFANRNFMQLIHDDSLTFKEDIQKAQVSGQGDSLHEHIANLAGSPAIKKGILQTVKVVDELVKVMGRHKPENIVIEMARENQTTQKGQKNSRERMKRIEEGIKELGSQILKEHPVENTQLQNEKLYLYYLQNGRDMYVDQELDINRLSDYDVDHIVPQSFLKDDSIDNKVLTRSDKARGKSDNVPSEEVVKKMKNYWRQLLNAKLITQRKFDNLTKAERGGLSELDKAGFIKRQLVETRQITKHVAQILDSRMNTKYDENDKLIREVKVITLKSKLVSDFRKDFQFYKVREINNYHHAHDAYLNAVVGTALIKKYPKLESEFVYGDYKVYDVRKMIAKSEQEIGKATAKYFFYSNIMNFFKTEITLANGEIRKRPLIETNGETGEIVWDKGRDFATVRKVLSMPQVNIVKKTEVQTGGFSKESILPKRNSDKLIARKKDWDPKKYGGFDSPTVAYSVLVVAKVEKGKSKKLKSVKELLGITIMERSSFEKNPIDFLEAKGYKEVKKDLIIKLPKYSLFELENGRKRMLASAGELQKGNELALPSKYVNFLYLASHYEKLKGSPEDNEQKQLFVEQHKHYLDEIIEQISEFSKRVILADANLDKVLSAYNKHRDKPIREQAENIIHLFTLTNLGAPAAFKYFDTTIDRKRYTSTKEVLDATLIHQSITGLYETRIDLSQLGGDGGGGGGSGGVPWILKKPLELTIKLDLEEQQGTLLNNSILSKKGKEELKQLFEKYSALWQSWENQVGHRRIRPHKIATGTVKPTPQKQYHINPKAKPDIQIVINDLLKQGVLIQKESTMNTPVYPVPKPNGRWRMVLDYRAVNKVTPLIAVQNQHSYGILGSLFKGRYKTTIDLSNGFWAHPIVPEDYWITAFTWQGKQYCWTVLPQGFLNSPGLFTGDVVDLLQGIPNVEVYVDDVYISHDSEKEHLEYLDILFNRLKEAGYIISLKKSNIANSIVDFLGFQITNEGRGLTDTFKEKLENITAPTTLKQLQSILGLLNFARNFIPDFTELIAPLYALIPKSTKNYVPWQIEHSTTLETLITKLNGAEYLQGRKGDKTLIMKVNASYTTGYIRYYNEGEKKPISYVSIVFSKTELKFTELEKLLTTVHKGLLKALDLSMGQNIHVYSPIVSMQNIQKTPQTAKKALASRWLSWLSYLEDPRIRFFYDPQMPALKDLPAVDTGKDNKKHPSNFQHIFYTDGSAITSPTKEGHLNAGMGIVYFINKDGNLQKQQEWSISLGNHTAQFAEIAAFEFALKKCLPLGGNILVVTDSNYVAKAYNEELDVWASNGFVNNRKKPLKHISKWKSVADLKRLRPDVVVTHEPGHQKLDSSPHAYGNNLADQLATQASFKVHAGKRTADGSEFEKRTADGSEFESPKKKAKVE

SEQ ID NO: 6110 - protein, 2088 aa, synthetic construct
MPAAKRVKLDGGDKKYSIGLDIGTNSVGWAVITDEYKVPSKKFKVLGNTDRHSIKKNLIGALLFDSGETAEATRLKRTARRRYTRRKNRICYLQEIFSNEMAKVDDSFFHRLEESFLVEEDKKHERHPIFGNIVDEVAYHEKYPTIYHLRKKLVDSTDKADLRLIYLALAHMIKFRGHFLIEGDLNPDNSDVDKLFIQLVQTYNQLFEENPINASGVDAKAILSARLSKSRRLENLIAQLPGEKKNGLFGNLIALSLGLTPNFKSNFDLAEDAKLQLSKDTYDDDLDNLLAQIGDQYADLFLAAKNLSDAILLSDILRVNTEITKAPLSASMIKRYDEHHQDLTLLKALVRQQLPEKYKEIFFDQSKNGYAGYIDGGASQEEFYKFIKPILEKMDGTEELLVKLNREDLLRKQRTFDNGSIPHQIHLGELHAILRRQEDFYPFLKDNREKIEKILTFRIPYYVGPLARGNSRFAWMTRKSEETITPWNFEEVVDKGASAQSFIERMTNFDKNLPNEKVLPKHSLLYEYFTVYNELTKVKYVTEGMRKPAFLSGEQKKAIVDLLFKTNRKVTVKQLKEDYFKKIECFDSVEISGVEDRFNASLGTYHDLLKIIKDKDFLDNEENEDILEDIVLTLTLFEDREMIEERLKTYAHLFDDKVMKQLKRRRYTGWGRLSRKLINGIRDKQSGKTILDFLKSDGFANRNFMQLIHDDSLTFKEDIQKAQVSGQGDSLHEHIANLAGSPAIKKGILQTVKVVDELVKVMGRHKPENIVIEMARENQTTQKGQKNSRERMKRIEEGIKELGSQILKEHPVENTQLQNEKLYLYYLQNGRDMYVDQELDINRLSDYDVDHIVPQSFLKDDSIDNKVLTRSDKARGKSDNVPSEEVVKKMKNYWRQLLNAKLITQRKFDNLTKAERGGLSELDKAGFIKRQLVETRQITKHVAQILDSRMNTKYDENDKLIREVKVITLKSKLVSDFRKDFQFYKVREINNYHHAHDAYLNAVVGTALIKKYPKLESEFVYGDYKVYDVRKMIAKSEQEIGKATAKYFFYSNIMNFFKTEITLANGEIRKRPLIETNGETGEIVWDKGRDFATVRKVLSMPQVNIVKKTEVQTGGFSKESILPKRNSDKLIARKKDWDPKKYGGFDSPTVAYSVLVVAKVEKGKSKKLKSVKELLGITIMERSSFEKNPIDFLEAKGYKEVKKDLIIKLPKYSLFELENGRKRMLASAGELQKGNELALPSKYVNFLYLASHYEKLKGSPEDNEQKQLFVEQHKHYLDEIIEQISEFSKRVILADANLDKVLSAYNKHRDKPIREQAENIIHLFTLTNLGAPAAFKYFDTTIDRKRYTSTKEVLDATLIHQSITGLYETRIDLSQLGGDGGGGGGSGGVLNLEEEYRLHEKPVPSSIDPSWLQLFPTVWAERAGMGLANQVPPVVVELRSGASPVAVRQYPMSKEAREGIRPHIQKFLDLGVLVPCRSPWNTPLLPVKKPGTNDYRPVQDLREINKRVQDIHPTVPNPYNLLSSLPPSYTWYSVLDLKDAFFCLRLHPNSQPLFAFEWKDPEKGNTGQLTWTRLPQGFKNSPTLFNEALHRDLAPFRALNPQVVLLQYVDDLLVAAPTYEDCKKGTQKLLQELSKLGYRVSAKKAQLCQREVTYLGYLLKEGKRWLTPARKATVMKIPVPTTPRQVREFLGTAGFCRLWIPGFASLAAPLYPLTKPSIPFIWTEEHQQAFDHIKKALLSAPALALPDLTKPFTLYIDERAGVARGVLTQTLGPWRRPVAYLSKKLDPVASGWPTCLKAVAAVALLLKDADKLTLGQNVTVIASHSLESIVRQPPDRWMTNARMTHYQSLLLNERVSFAPPAVLNPATLLPVESEATPVHRCSEILAEETGTRRDLEDQPLPGVPTWYTDGSSFITEGKRRAGAPIVDGKRTVWASSLPEGTSAQKAELVALTQALRLAEGKNINIYTDSRYAFATAHIHGAIYKQRGWLTSAGKDIKNKEEILALLEAIHLPRRVAIIHCPGHQRGSNPVATGNRRADEAAKQAALSTRVLAGTTKPAGKRTADGSEFEKRTADGSEFESPKKKAKVE

SEQ ID NO: 6111 - protein, 2090 aa, synthetic construct
MPAAKRVKLDGGDKKYSIGLDIGTNSVGWAVITDEYKVPSKKFKVLGNTDRHSIKKNLIGALLFDSGETAEATRLKRTARRRYTRRKNRICYLQEIFSNEMAKVDDSFFHRLEESFLVEEDKKHERHPIFGNIVDEVAYHEKYPTIYHLRKKLVDSTDKADLRLIYLALAHMIKFRGHFLIEGDLNPDNSDVDKLFIQLVQTYNQLFEENPINASGVDAKAILSARLSKSRRLENLIAQLPGEKKNGLFGNLIALSLGLTPNFKSNFDLAEDAKLQLSKDTYDDDLDNLLAQIGDQYADLFLAAKNLSDAILLSDILRVNTEITKAPLSASMIKRYDEHHQDLTLLKALVRQQLPEKYKEIFFDQSKNGYAGYIDGGASQEEFYKFIKPILEKMDGTEELLVKLNREDLLRKQRTFDNGSIPHQIHLGELHAILRRQEDFYPFLKDNREKIEKILTFRIPYYVGPLARGNSRFAWMTRKSEETITPWNFEEVVDKGASAQSFIERMTNFDKNLPNEKVLPKHSLLYEYFTVYNELTKVKYVTEGMRKPAFLSGEQKKAIVDLLFKTNRKVTVKQLKEDYFKKIECFDSVEISGVEDRFNASLGTYHDLLKIIKDKDFLDNEENEDILEDIVLTLTLFEDREMIEERLKTYAHLFDDKVMKQLKRRRYTGWGRLSRKLINGIRDKQSGKTILDFLKSDGFANRNFMQLIHDDSLTFKEDIQKAQVSGQGDSLHEHIANLAGSPAIKKGILQTVKVVDELVKVMGRHKPENIVIEMARENQTTQKGQKNSRERMKRIEEGIKELGSQILKEHPVENTQLQNEKLYLYYLQNGRDMYVDQELDINRLSDYDVDHIVPQSFLKDDSIDNKVLTRSDKARGKSDNVPSEEVVKKMKNYWRQLLNAKLITQRKFDNLTKAERGGLSELDKAGFIKRQLVETRQITKHVAQILDSRMNTKYDENDKLIREVKVITLKSKLVSDFRKDFQFYKVREINNYHHAHDAYLNAVVGTALIKKYPKLESEFVYGDYKVYDVRKMIAKSEQEIGKATAKYFFYSNIMNFFKTEITLANGEIRKRPLIETNGETGEIVWDKGRDFATVRKVLSMPQVNIVKKTEVQTGGFSKESILPKRNSDKLIARKKDWDPKKYGGFDSPTVAYSVLVVAKVEKGKSKKLKSVKELLGITIMERSSFEKNPIDFLEAKGYKEVKKDLIIKLPKYSLFELENGRKRMLASAGELQKGNELALPSKYVNFLYLASHYEKLKGSPEDNEQKQLFVEQHKHYLDEIIEQISEFSKRVILADANLDKVLSAYNKHRDKPIREQAENIIHLFTLTNLGAPAAFKYFDTTIDRKRYTSTKEVLDATLIHQSITGLYETRIDLSQLGGDGGGGGGSGGTLNIEDEYRLHETSKEPDVSLGSTWLSDFPQAWAETGGMGLAVRQAPLIIPLKATSTPVSIKQYPMSQEARLGIKPHIQRLLDQGILVPCQSPWNTPLLPVKKPGTNDYRPVQDLREVNKRVEDIHPTVPNPYNLLSGLPPSHQWYTVLDLKDAFFCLRLHPTSQPLFAFEWRDPEMGISGQLTWTRLPQGFKNSPTLFDEALHRDLAGFRIQHPDLILLQYVDDLLLAATSELDCQQGTRALLQTLGDLGYRASAKKAQICQKQVKYLGYLLKEGQRWLTEARKETVMGQPIPKTPRQLREFLGTAGFCRLWIPGFAEMAAPLYPLTKTGTLFNWGPDQQKAFQEIKQALLTAPALGLPDLTKPFELFVDEKQGYAKGVLTQKLGPWRRPVAYLSKKLDPVAAGWPPCLRMVAAIAVLTKDAGKLTMGQPLVILAPHAVEALVKQPPDRWLSNARMTHYQALLLDTDRVQFGPVVALNPATLLPLPEEGLQHDCLDILAEAHGTRSDLMDQPLPDADHTWYTDGSSFLQEGQRKAGAAVTTETEVIWARALPAGTSAQRAELIALTQALKMAEGKKLNVYTDSRYAFATAHIHGEIYRRRGLLTSEGKEIKNKDEILALLKALFLPKRLSIIHCPGHQKGNSAEARGNRMADQAAREVATRETPETSTLLAGKRTADGSEFEKRTADGSEFESPKKKAKVE

SEQ ID NO: 6112 - protein, 2090 aa, synthetic construct
MPAAKRVKLDGGDKKYSIGLDIGTNSVGWAVITDEYKVPSKKFKVLGNTDRHSIKKNLIGALLFDSGETAEATRLKRTARRRYTRRKNRICYLQEIFSNEMAKVDDSFFHRLEESFLVEEDKKHERHPIFGNIVDEVAYHEKYPTIYHLRKKLVDSTDKADLRLIYLALAHMIKFRGHFLIEGDLNPDNSDVDKLFIQLVQTYNQLFEENPINASGVDAKAILSARLSKSRRLENLIAQLPGEKKNGLFGNLIALSLGLTPNFKSNFDLAEDAKLQLSKDTYDDDLDNLLAQIGDQYADLFLAAKNLSDAILLSDILRVNTEITKAPLSASMIKRYDEHHQDLTLLKALVRQQLPEKYKEIFFDQSKNGYAGYIDGGASQEEFYKFIKPILEKMDGTEELLVKLNREDLLRKQRTFDNGSIPHQIHLGELHAILRRQEDFYPFLKDNREKIEKILTFRIPYYVGPLARGNSRFAWMTRKSEETITPWNFEEVVDKGASAQSFIERMTNFDKNLPNEKVLPKHSLLYEYFTVYNELTKVKYVTEGMRKPAFLSGEQKKAIVDLLFKTNRKVTVKQLKEDYFKKIECFDSVEISGVEDRFNASLGTYHDLLKIIKDKDFLDNEENEDILEDIVLTLTLFEDREMIEERLKTYAHLFDDKVMKQLKRRRYTGWGRLSRKLINGIRDKQSGKTILDFLKSDGFANRNFMQLIHDDSLTFKEDIQKAQVSGQGDSLHEHIANLAGSPAIKKGILQTVKVVDELVKVMGRHKPENIVIEMARENQTTQKGQKNSRERMKRIEEGIKELGSQILKEHPVENTQLQNEKLYLYYLQNGRDMYVDQELDINRLSDYDVDHIVPQSFLKDDSIDNKVLTRSDKARGKSDNVPSEEVVKKMKNYWRQLLNAKLITQRKFDNLTKAERGGLSELDKAGFIKRQLVETRQITKHVAQILDSRMNTKYDENDKLIREVKVITLKSKLVSDFRKDFQFYKVREINNYHHAHDAYLNAVVGTALIKKYPKLESEFVYGDYKVYDVRKMIAKSEQEIGKATAKYFFYSNIMNFFKTEITLANGEIRKRPLIETNGETGEIVWDKGRDFATVRKVLSMPQVNIVKKTEVQTGGFSKESILPKRNSDKLIARKKDWDPKKYGGFDSPTVAYSVLVVAKVEKGKSKKLKSVKELLGITIMERSSFEKNPIDFLEAKGYKEVKKDLIIKLPKYSLFELENGRKRMLASAGELQKGNELALPSKYVNFLYLASHYEKLKGSPEDNEQKQLFVEQHKHYLDEIIEQISEFSKRVILADANLDKVLSAYNKHRDKPIREQAENIIHLFTLTNLGAPAAFKYFDTTIDRKRYTSTKEVLDATLIHQSITGLYETRIDLSQLGGDGGGGGGSGGTLNIEDEYRLHETSKEPDVSLGSTWLSDFPQAWAETGGMGLAVRQAPLIIPLKATSTPVSIKQYPMSQEARLGIKPHIQRLLDQGILVPCQSPWNTPLLPVKKPGTNDYRPVQDLREVNKRVEDIHPTVPNPYNLLSGLPPSHQWYTVLDLKDAFFCLRLHPTSQPLFAFEWRDPEMGISGQLTWTRLPQGFKNSPTLFNEALHRDLAGFRIQHPDLILLQYVDDLLLAATSELDCQQGTRALLQTLGDLGYRASAKKAQICQKQVKYLGYLLKEGQRWLTEARKETVMGQPIPKTPRQLREFLGTAGFCRLWIPGFAEMAAPLYPLTKPGTLFNWGPDQQKAFQEIKQALLTAPALGLPDLTKPFELFVDEKQGYAKGVLTQKLGPWRRPVAYLSKKLDPVAAGWPPCLRMVAAIAVLTKDAGKLTMGQPLVILAPHAVEALVKQPPDRWLSNARMTHYQALLLDTDRVQFGPVVALNPATLLPLPEEGLQHDCLDILAEAHGTRSDLMDQPLPDADHTWYTDGSSFLQEGQRKAGAAVTTETEVIWARALPAGTSAQRAELIALTQALKMAEGKKLNVYTDSRYAFATAHIHGEIYRRRGWLTSEGKEIKNKDEILALLKALFLPKRLSIIHCPGHQKGNSAEARGNRMADQAAREVATRETPETSTLLAGKRTADGSEFEKRTADGSEFESPKKKAKVE

SEQ ID NO: 6113 - protein, 2110 aa, synthetic construct
MPAAKRVKLDGGDKKYSIGLDIGTNSVGWAVITDEYKVPSKKFKVLGNTDRHSIKKNLIGALLFDSGETAEATRLKRTARRRYTRRKNRICYLQEIFSNEMAKVDDSFFHRLEESFLVEEDKKHERHPIFGNIVDEVAYHEKYPTIYHLRKKLVDSTDKADLRLIYLALAHMIKFRGHFLIEGDLNPDNSDVDKLFIQLVQTYNQLFEENPINASGVDAKAILSARLSKSRRLENLIAQLPGEKKNGLFGNLIALSLGLTPNFKSNFDLAEDAKLQLSKDTYDDDLDNLLAQIGDQYADLFLAAKNLSDAILLSDILRVNTEITKAPLSASMIKRYDEHHQDLTLLKALVRQQLPEKYKEIFFDQSKNGYAGYIDGGASQEEFYKFIKPILEKMDGTEELLVKLNREDLLRKQRTFDNGSIPHQIHLGELHAILRRQEDFYPFLKDNREKIEKILTFRIPYYVGPLARGNSRFAWMTRKSEETITPWNFEEVVDKGASAQSFIERMTNFDKNLPNEKVLPKHSLLYEYFTVYNELTKVKYVTEGMRKPAFLSGEQKKAIVDLLFKTNRKVTVKQLKEDYFKKIECFDSVEISGVEDRFNASLGTYHDLLKIIKDKDFLDNEENEDILEDIVLTLTLFEDREMIEERLKTYAHLFDDKVMKQLKRRRYTGWGRLSRKLINGIRDKQSGKTILDFLKSDGFANRNFMQLIHDDSLTFKEDIQKAQVSGQGDSLHEHIANLAGSPAIKKGILQTVKVVDELVKVMGRHKPENIVIEMARENQTTQKGQKNSRERMKRIEEGIKELGSQILKEHPVENTQLQNEKLYLYYLQNGRDMYVDQELDINRLSDYDVDHIVPQSFLKDDSIDNKVLTRSDKARGKSDNVPSEEVVKKMKNYWRQLLNAKLITQRKFDNLTKAERGGLSELDKAGFIKRQLVETRQITKHVAQILDSRMNTKYDENDKLIREVKVITLKSKLVSDFRKDFQFYKVREINNYHHAHDAYLNAVVGTALIKKYPKLESEFVYGDYKVYDVRKMIAKSEQEIGKATAKYFFYSNIMNFFKTEITLANGEIRKRPLIETNGETGEIVWDKGRDFATVRKVLSMPQVNIVKKTEVQTGGFSKESILPKRNSDKLIARKKDWDPKKYGGFDSPTVAYSVLVVAKVEKGKSKKLKSVKELLGITIMERSSFEKNPIDFLEAKGYKEVKKDLIIKLPKYSLFELENGRKRMLASAGELQKGNELALPSKYVNFLYLASHYEKLKGSPEDNEQKQLFVEQHKHYLDEIIEQISEFSKRVILADANLDKVLSAYNKHRDKPIREQAENIIHLFTLTNLGAPAAFKYFDTTIDRKRYTSTKEVLDATLIHQSITGLYETRIDLSQLGGDGGGGGGSGGVQEISDSRPMLHIYLNGRRFLGLLDTGADKTCIAGRDWPANWPIHQTESSLQGLGMACGVARSSQPLRWQHEDKSGIIHPFVIPTLPFTLWGRDIMKDIKVRLMTDSPDDSQDLMIGAIESNLFADQISWKSDQPVWLNQWPLKQEKLQALQQLVTEQLQLGHLEESNSPWNTPVFVIKKKSGKWRLLQDLRAVNATMHDMGALQPGLPSPVAVPKGWEIIIIDLQDCFFNIKLHPEDCKRFAFSVPSPNFKRPYQRFQWKVLPQGMKNSPTLCQKFVDKAILTVRDKYQDSYIVHYMDDILLAHPSRSIVDEILTSMIQALNKHGLVVSTEKIQKYDNLKYLGTHIQGDSVSYQKLQIRTDKLRTLNDFQKLLGNINWIRPFLKLTTGELKPLFEILNGDSNPISTRKLTPEACKALQLMNERLSTARVKRLDLSQPWSLCILKTEYTPTACLWQDGVVEWIHLPHISPKVITPYDIFCTQLIIKGRHRSKELFSKDPDYIVVPYTKVQFDLLLQEKEDWPISLLGFLGEVHFHLPKDPLLTFTLQTAIIFPHMTSTTPLEKGIVIFTDGSANGRSVTYIQGREPIIKENTQNTAQQAEIVAVITAFEEVSQPFNLYTDSKYVTGLFPEIETATLSPRTKIYTELKHLQRLIHKRQEKFYIGHIRGHTGLPGPLAQGNAYADSLTRILTAAGKRTADGSEFEKRTADGSEFESPKKKAKVE

SEQ ID NO: 6114 - protein, 2170 aa, synthetic construct
MPAAKRVKLDGGDKKYSIGLDIGTNSVGWAVITDEYKVPSKKFKVLGNTDRHSIKKNLIGALLFDSGETAEATRLKRTARRRYTRRKNRICYLQEIFSNEMAKVDDSFFHRLEESFLVEEDKKHERHPIFGNIVDEVAYHEKYPTIYHLRKKLVDSTDKADLRLIYLALAHMIKFRGHFLIEGDLNPDNSDVDKLFIQLVQTYNQLFEENPINASGVDAKAILSARLSKSRRLENLIAQLPGEKKNGLFGNLIALSLGLTPNFKSNFDLAEDAKLQLSKDTYDDDLDNLLAQIGDQYADLFLAAKNLSDAILLSDILRVNTEITKAPLSASMIKRYDEHHQDLTLLKALVRQQLPEKYKEIFFDQSKNGYAGYIDGGASQEEFYKFIKPILEKMDGTEELLVKLNREDLLRKQRTFDNGSIPHQIHLGELHAILRRQEDFYPFLKDNREKIEKILTFRIPYYVGPLARGNSRFAWMTRKSEETITPWNFEEVVDKGASAQSFIERMTNFDKNLPNEKVLPKHSLLYEYFTVYNELTKVKYVTEGMRKPAFLSGEQKKAIVDLLFKTNRKVTVKQLKEDYFKKIECFDSVEISGVEDRFNASLGTYHDLLKIIKDKDFLDNEENEDILEDIVLTLTLFEDREMIEERLKTYAHLFDDKVMKQLKRRRYTGWGRLSRKLINGIRDKQSGKTILDFLKSDGFANRNFMQLIHDDSLTFKEDIQKAQVSGQGDSLHEHIANLAGSPAIKKGILQTVKVVDELVKVMGRHKPENIVIEMARENQTTQKGQKNSRERMKRIEEGIKELGSQILKEHPVENTQLQNEKLYLYYLQNGRDMYVDQELDINRLSDYDVDHIVPQSFLKDDSIDNKVLTRSDKARGKSDNVPSEEVVKKMKNYWRQLLNAKLITQRKFDNLTKAERGGLSELDKAGFIKRQLVETRQITKHVAQILDSRMNTKYDENDKLIREVKVITLKSKLVSDFRKDFQFYKVREINNYHHAHDAYLNAVVGTALIKKYPKLESEFVYGDYKVYDVRKMIAKSEQEIGKATAKYFFYSNIMNFFKTEITLANGEIRKRPLIETNGETGEIVWDKGRDFATVRKVLSMPQVNIVKKTEVQTGGFSKESILPKRNSDKLIARKKDWDPKKYGGFDSPTVAYSVLVVAKVEKGKSKKLKSVKELLGITIMERSSFEKNPIDFLEAKGYKEVKKDLIIKLPKYSLFELENGRKRMLASAGELQKGNELALPSKYVNFLYLASHYEKLKGSPEDNEQKQLFVEQHKHYLDEIIEQISEFSKRVILADANLDKVLSAYNKHRDKPIREQAENIIHLFTLTNLGAPAAFKYFDTTIDRKRYTSTKEVLDATLIHQSITGLYETRIDLSQLGGDGGGGGGSGGMDPLQLLQPLEAEIKGTKLKAHWNSGATITCVPEAFLEDERPIQTMLIKTIHGEKQQDVYYLTFKVQGRKVEAEVLASPYDYILLNPSDVPWLMKKPLQLTVLVPLHEYQERLLQQTALPKEQKELLQKLFLKYDALWQHWENQVGHRRIKPHNIATGTLAPRPQKQYPINPKAKPSIQIVIDDLLKQGVLIQQNSTMNTPVYPVPKPDGKWRMVLDYREVNKTIPLIAAQNQHSAGILSSIYRGKYKTTLDLTNGFWAHPITPESYWLTAFTWQGKQYCWTRLPQGFLNSPALFNADVVDLLKEIPNVQAYVDDIYISHDDPQEHLEQLEKIFSILLNAGYVVSLKKSEIAQREVEFLGFNITKEGRGLTDTFKQKLLNITPPKDLKQLQSILGKLNFARNFIPNYSELVKPLYTIVAPANGKFISWTEDNSNQLQHIISVLNQADNLEERNPETRLIIKVNSSPSAGYIRYYNEGSKRPIMYVNYIFSKAEAKFTQTEKLLTTMHKGLIKAMDLAMGQEILVYSPIVSMTKIQRTPLPERKALPVRWITWMTYLEDPRIQFHYDKSLPELQQIPNVTEDVIAKTKHPSEFAMVFYTDGSAIKHPDVNKSHSAGMGIAQVQFIPEYKIVHQWSIPLGDHTAQLAEIAAVEFACKKALKISGPVLIVTDSFYVAESANKELPYWKSNGFLNNKKKPLRHVSKWKSIAECLQLKPDIIIMHEKGHQQPMTTLHTEGNNLADKLATQGSYVVHAGKRTADGSEFEKRTADGSEFESPKKKAKVE

SEQ ID NO: 6115 - protein, 2088 aa, synthetic construct
MPAAKRVKLDGGDKKYSIGLDIGTNSVGWAVITDEYKVPSKKFKVLGNTDRHSIKKNLIGALLFDSGETAEATRLKRTARRRYTRRKNRICYLQEIFSNEMAKVDDSFFHRLEESFLVEEDKKHERHPIFGNIVDEVAYHEKYPTIYHLRKKLVDSTDKADLRLIYLALAHMIKFRGHFLIEGDLNPDNSDVDKLFIQLVQTYNQLFEENPINASGVDAKAILSARLSKSRRLENLIAQLPGEKKNGLFGNLIALSLGLTPNFKSNFDLAEDAKLQLSKDTYDDDLDNLLAQIGDQYADLFLAAKNLSDAILLSDILRVNTEITKAPLSASMIKRYDEHHQDLTLLKALVRQQLPEKYKEIFFDQSKNGYAGYIDGGASQEEFYKFIKPILEKMDGTEELLVKLNREDLLRKQRTFDNGSIPHQIHLGELHAILRRQEDFYPFLKDNREKIEKILTFRIPYYVGPLARGNSRFAWMTRKSEETITPWNFEEVVDKGASAQSFIERMTNFDKNLPNEKVLPKHSLLYEYFTVYNELTKVKYVTEGMRKPAFLSGEQKKAIVDLLFKTNRKVTVKQLKEDYFKKIECFDSVEISGVEDRFNASLGTYHDLLKIIKDKDFLDNEENEDILEDIVLTLTLFEDREMIEERLKTYAHLFDDKVMKQLKRRRYTGWGRLSRKLINGIRDKQSGKTILDFLKSDGFANRNFMQLIHDDSLTFKEDIQKAQVSGQGDSLHEHIANLAGSPAIKKGILQTVKVVDELVKVMGRHKPENIVIEMARENQTTQKGQKNSRERMKRIEEGIKELGSQILKEHPVENTQLQNEKLYLYYLQNGRDMYVDQELDINRLSDYDVDHIVPQSFLKDDSIDNKVLTRSDKARGKSDNVPSEEVVKKMKNYWRQLLNAKLITQRKFDNLTKAERGGLSELDKAGFIKRQLVETRQITKHVAQILDSRMNTKYDENDKLIREVKVITLKSKLVSDFRKDFQFYKVREINNYHHAHDAYLNAVVGTALIKKYPKLESEFVYGDYKVYDVRKMIAKSEQEIGKATAKYFFYSNIMNFFKTEITLANGEIRKRPLIETNGETGEIVWDKGRDFATVRKVLSMPQVNIVKKTEVQTGGFSKESILPKRNSDKLIARKKDWDPKKYGGFDSPTVAYSVLVVAKVEKGKSKKLKSVKELLGITIMERSSFEKNPIDFLEAKGYKEVKKDLIIKLPKYSLFELENGRKRMLASAGELQKGNELALPSKYVNFLYLASHYEKLKGSPEDNEQKQLFVEQHKHYLDEIIEQISEFSKRVILADANLDKVLSAYNKHRDKPIREQAENIIHLFTLTNLGAPAAFKYFDTTIDRKRYTSTKEVLDATLIHQSITGLYETRIDLSQLGGDGGGGGGSGGVLNLEEEYRLHEKPVPSSIDPSWLQLFPTVWAERAGMGLANQVPPVVVELRSGASPVAVRQYPMSKEAREGIRPHIQRFLDLGVLVPCQSPWNTPLLPVKKPGTNDYRPVQDLREINKRVQDIHPTVPNPYNLLSSLPPSHTWYSVLDLKDAFFCLKLHPNSQPLFAFEWRDPEKGNTGQLTWTRLPQGFKNSPTLFNEALHRDLAPFRALNPQVVLLQYVDDLLVAAPTYRDCKEGTQKLLQELSKLGYRVSAKKAQLCQKEVTYLGYLLKEGKRWLTPARKATVMKIPPPTTPRQVREFLGTAGFCRLWIPGFASLAAPLYPLTKPSIPFIWTEEHQKAFDRIKEALLSAPALALPDLTKPFTLYVDERAGVARGVLTQTLGPWRRPVAYLSKKLDPVASGWPTCLKAVAAVALLLKDADKLTLGQNVTVIASHSLESIVRQPPDRWMTNARMTHYQSLLLNERVSFAPPAVLNPATLLPVESEATPVHRCSEILAEETGTRRDLKDQPLPGVPAWYTDGSSFIAEGKRRAGAAIVDGKRTVWASSLPEGTSAQKAELVALTQALRLAEGKDINIYTDSRYAFATAHIHGAIYKQRGWLTSAGKDIKNKEEILALLEAIHLPKRVAIIHCPGHQKGNDPVATGNRRADEAAKQAALSTRVLAETTKPAGKRTADGSEFEKRTADGSEFESPKKKAKVE

SEQ ID NO: 6116 - protein, 2088 aa, synthetic construct
MPAAKRVKLDGGDKKYSIGLDIGTNSVGWAVITDEYKVPSKKFKVLGNTDRHSIKKNLIGALLFDSGETAEATRLKRTARRRYTRRKNRICYLQEIFSNEMAKVDDSFFHRLEESFLVEEDKKHERHPIFGNIVDEVAYHEKYPTIYHLRKKLVDSTDKADLRLIYLALAHMIKFRGHFLIEGDLNPDNSDVDKLFIQLVQTYNQLFEENPINASGVDAKAILSARLSKSRRLENLIAQLPGEKKNGLFGNLIALSLGLTPNFKSNFDLAEDAKLQLSKDTYDDDLDNLLAQIGDQYADLFLAAKNLSDAILLSDILRVNTEITKAPLSASMIKRYDEHHQDLTLLKALVRQQLPEKYKEIFFDQSKNGYAGYIDGGASQEEFYKFIKPILEKMDGTEELLVKLNREDLLRKQRTFDNGSIPHQIHLGELHAILRRQEDFYPFLKDNREKIEKILTFRIPYYVGPLARGNSRFAWMTRKSEETITPWNFEEVVDKGASAQSFIERMTNFDKNLPNEKVLPKHSLLYEYFTVYNELTKVKYVTEGMRKPAFLSGEQKKAIVDLLFKTNRKVTVKQLKEDYFKKIECFDSVEISGVEDRFNASLGTYHDLLKIIKDKDFLDNEENEDILEDIVLTLTLFEDREMIEERLKTYAHLFDDKVMKQLKRRRYTGWGRLSRKLINGIRDKQSGKTILDFLKSDGFANRNFMQLIHDDSLTFKEDIQKAQVSGQGDSLHEHIANLAGSPAIKKGILQTVKVVDELVKVMGRHKPENIVIEMARENQTTQKGQKNSRERMKRIEEGIKELGSQILKEHPVENTQLQNEKLYLYYLQNGRDMYVDQELDINRLSDYDVDHIVPQSFLKDDSIDNKVLTRSDKARGKSDNVPSEEVVKKMKNYWRQLLNAKLITQRKFDNLTKAERGGLSELDKAGFIKRQLVETRQITKHVAQILDSRMNTKYDENDKLIREVKVITLKSKLVSDFRKDFQFYKVREINNYHHAHDAYLNAVVGTALIKKYPKLESEFVYGDYKVYDVRKMIAKSEQEIGKATAKYFFYSNIMNFFKTEITLANGEIRKRPLIETNGETGEIVWDKGRDFATVRKVLSMPQVNIVKKTEVQTGGFSKESILPKRNSDKLIARKKDWDPKKYGGFDSPTVAYSVLVVAKVEKGKSKKLKSVKELLGITIMERSSFEKNPIDFLEAKGYKEVKKDLIIKLPKYSLFELENGRKRMLASAGELQKGNELALPSKYVNFLYLASHYEKLKGSPEDNEQKQLFVEQHKHYLDEIIEQISEFSKRVILADANLDKVLSAYNKHRDKPIREQAENIIHLFTLTNLGAPAAFKYFDTTIDRKRYTSTKEVLDATLIHQSITGLYETRIDLSQLGGDGGGGGGSGGVLNLEEEYRLHEKPVPSSIDPSWLQLFPTVWAERAGMGLANQVPPVVVELRSGASPVAVRQYPMSKEAREGIRPHIQRFLDLGVLVPCQSPWNTPLLPVKKPGTNDYRPVQDLREINKRVQDIHPTVPNPYNLLSSLPPSHTWYSVLDLKDAFFCLKLHPNSQPLFAFEWRDPEKGNTGQLTWTRLPQGFKNSPTLFNEALHRDLAPFRALNPQVVLLQYVDDLLVAAPTYRDCKEGTQKLLQELSKLGYRVSAKKAQLCQKEVTYLGYLLKEGKRWLTPARKATVMKIPPPTTPRQVREFLGKAGFCRLFIPGFASLAAPLYPLTKPSIPFIWTEEHQKAFDRIKEALLSAPALALPDLTKPFTLYVDERAGVARGVLTQTLGPWRRPVAYLSKKLDPVASGWPTCLKAVAAVALLLKDADKLTLGQNVTVIASHSLESIVRQPPDRWMTNARMTHYQSLLLNERVSFAPPAVLNPATLLPVESEATPVHRCSEILAEETGTRRDLKDQPLPGVPAWYTDGSSFIAEGKRRAGAAIVDGKRTVWASSLPEGTSAQKAELVALTQALRLAEGKDINIYTDSRYAFATAHIHGAIYKQRGWLTSAGKDIKNKEEILALLEAIHLPKRVAIIHCPGHQKGNDPVATGNRRADEAAKQAALSTRVLAETTKPAGKRTADGSEFEKRTADGSEFESPKKKAKVE

SEQ ID NO: 6117 - protein, 2090 aa, synthetic construct
MPAAKRVKLDGGDKKYSIGLDIGTNSVGWAVITDEYKVPSKKFKVLGNTDRHSIKKNLIGALLFDSGETAEATRLKRTARRRYTRRKNRICYLQEIFSNEMAKVDDSFFHRLEESFLVEEDKKHERHPIFGNIVDEVAYHEKYPTIYHLRKKLVDSTDKADLRLIYLALAHMIKFRGHFLIEGDLNPDNSDVDKLFIQLVQTYNQLFEENPINASGVDAKAILSARLSKSRRLENLIAQLPGEKKNGLFGNLIALSLGLTPNFKSNFDLAEDAKLQLSKDTYDDDLDNLLAQIGDQYADLFLAAKNLSDAILLSDILRVNTEITKAPLSASMIKRYDEHHQDLTLLKALVRQQLPEKYKEIFFDQSKNGYAGYIDGGASQEEFYKFIKPILEKMDGTEELLVKLNREDLLRKQRTFDNGSIPHQIHLGELHAILRRQEDFYPFLKDNREKIEKILTFRIPYYVGPLARGNSRFAWMTRKSEETITPWNFEEVVDKGASAQSFIERMTNFDKNLPNEKVLPKHSLLYEYFTVYNELTKVKYVTEGMRKPAFLSGEQKKAIVDLLFKTNRKVTVKQLKEDYFKKIECFDSVEISGVEDRFNASLGTYHDLLKIIKDKDFLDNEENEDILEDIVLTLTLFEDREMIEERLKTYAHLFDDKVMKQLKRRRYTGWGRLSRKLINGIRDKQSGKTILDFLKSDGFANRNFMQLIHDDSLTFKEDIQKAQVSGQGDSLHEHIANLAGSPAIKKGILQTVKVVDELVKVMGRHKPENIVIEMARENQTTQKGQKNSRERMKRIEEGIKELGSQILKEHPVENTQLQNEKLYLYYLQNGRDMYVDQELDINRLSDYDVDHIVPQSFLKDDSIDNKVLTRSDKARGKSDNVPSEEVVKKMKNYWRQLLNAKLITQRKFDNLTKAERGGLSELDKAGFIKRQLVETRQITKHVAQILDSRMNTKYDENDKLIREVKVITLKSKLVSDFRKDFQFYKVREINNYHHAHDAYLNAVVGTALIKKYPKLESEFVYGDYKVYDVRKMIAKSEQEIGKATAKYFFYSNIMNFFKTEITLANGEIRKRPLIETNGETGEIVWDKGRDFATVRKVLSMPQVNIVKKTEVQTGGFSKESILPKRNSDKLIARKKDWDPKKYGGFDSPTVAYSVLVVAKVEKGKSKKLKSVKELLGITIMERSSFEKNPIDFLEAKGYKEVKKDLIIKLPKYSLFELENGRKRMLASAGELQKGNELALPSKYVNFLYLASHYEKLKGSPEDNEQKQLFVEQHKHYLDEIIEQISEFSKRVILADANLDKVLSAYNKHRDKPIREQAENIIHLFTLTNLGAPAAFKYFDTTIDRKRYTSTKEVLDATLIHQSITGLYETRIDLSQLGGDGGGGGGSGGTLNIEDEYRLHETSKEPDVPLGSTWLSDFPQAWAETGGMGLAVRQAPLIIPLKATSTPVSIKQYPMSQEARLGIKPHIQRLLDQGILVPCQSPWNTPLLPVKKPGTNDYRPVQDLREVNKRVEDIHPTVPNPYNLLSGLPPSHQWYTVLDLKDAFFCLRLHPTSQPLFAFEWRDPEMGISGQLTWTRLPQGFKNSPTLFNEALHRDLADFRIQHPDLILLQYVDDLLLAATSEQDCQRGTRALLQTLGNLGYRASAKKAQICQKQVKYLGYLLKEGQRWLTEARKETVMGQPTPKTPRQLREFLGKAGFCRLFIPGFAEMAAPLYPLTKPGTLFNWGPDQQKAYQEIKQALLTAPALGLPDLTKPFELFVDEKQGYAKGVLTQKLGPWRRPVAYLSKKLDPVAAGWPPCLRMVAAIAVLTKDAGKLTMGQPLVILAPHAVEALVKQPPDRWLSNARMTHYQAMLLDTDRVQFGPVVALNPATLLPLPEKEAPHDCLEILAETHGTRPDLTDQPIPDADYTWYTDGSSFLQEGQRRAGAAVTTETEVIWARALPAGTSAQRAELIALTQALKMAEGKKLNVYTDSRYAFATAHVHGEIYRRRGWLTSEGREIKNKNEILALLKALFLPKRLSIIHCPGHQKGNSAEARGNRMADQAAREAAMKAVLETSTLLAGKRTADGSEFEKRTADGSEFESPKKKAKVE

SEQ ID NO: 6118 - protein, 2101 aa, synthetic construct
MPAAKRVKLDGGDKKYSIGLDIGTNSVGWAVITDEYKVPSKKFKVLGNTDRHSIKKNLIGALLFDSGETAEATRLKRTARRRYTRRKNRICYLQEIFSNEMAKVDDSFFHRLEESFLVEEDKKHERHPIFGNIVDEVAYHEKYPTIYHLRKKLVDSTDKADLRLIYLALAHMIKFRGHFLIEGDLNPDNSDVDKLFIQLVQTYNQLFEENPINASGVDAKAILSARLSKSRRLENLIAQLPGEKKNGLFGNLIALSLGLTPNFKSNFDLAEDAKLQLSKDTYDDDLDNLLAQIGDQYADLFLAAKNLSDAILLSDILRVNTEITKAPLSASMIKRYDEHHQDLTLLKALVRQQLPEKYKEIFFDQSKNGYAGYIDGGASQEEFYKFIKPILEKMDGTEELLVKLNREDLLRKQRTFDNGSIPHQIHLGELHAILRRQEDFYPFLKDNREKIEKILTFRIPYYVGPLARGNSRFAWMTRKSEETITPWNFEEVVDKGASAQSFIERMTNFDKNLPNEKVLPKHSLLYEYFTVYNELTKVKYVTEGMRKPAFLSGEQKKAIVDLLFKTNRKVTVKQLKEDYFKKIECFDSVEISGVEDRFNASLGTYHDLLKIIKDKDFLDNEENEDILEDIVLTLTLFEDREMIEERLKTYAHLFDDKVMKQLKRRRYTGWGRLSRKLINGIRDKQSGKTILDFLKSDGFANRNFMQLIHDDSLTFKEDIQKAQVSGQGDSLHEHIANLAGSPAIKKGILQTVKVVDELVKVMGRHKPENIVIEMARENQTTQKGQKNSRERMKRIEEGIKELGSQILKEHPVENTQLQNEKLYLYYLQNGRDMYVDQELDINRLSDYDVDHIVPQSFLKDDSIDNKVLTRSDKARGKSDNVPSEEVVKKMKNYWRQLLNAKLITQRKFDNLTKAERGGLSELDKAGFIKRQLVETRQITKHVAQILDSRMNTKYDENDKLIREVKVITLKSKLVSDFRKDFQFYKVREINNYHHAHDAYLNAVVGTALIKKYPKLESEFVYGDYKVYDVRKMIAKSEQEIGKATAKYFFYSNIMNFFKTEITLANGEIRKRPLIETNGETGEIVWDKGRDFATVRKVLSMPQVNIVKKTEVQTGGFSKESILPKRNSDKLIARKKDWDPKKYGGFDSPTVAYSVLVVAKVEKGKSKKLKSVKELLGITIMERSSFEKNPIDFLEAKGYKEVKKDLIIKLPKYSLFELENGRKRMLASAGELQKGNELALPSKYVNFLYLASHYEKLKGSPEDNEQKQLFVEQHKHYLDEIIEQISEFSKRVILADANLDKVLSAYNKHRDKPIREQAENIIHLFTLTNLGAPAAFKYFDTTIDRKRYTSTKEVLDATLIHQSITGLYETRIDLSQLGGDGGGGGGSGGGGSGGTVSLQDEHRLFDIPVTTSLPDVWLQDFPQAWAETGGLGRAKCQAPIIIDLKPTAVPVSIKQYPMSLEAHMGIRQHIIKFLELGVLRPCRSPWNTPLLPVKKPGTQDYRPVQDLREINKRTVDIHPTVPNPYNLLSTLKPDYSWYTVLDLKDAFFCLPLAPQSQELFAFEWKDPERGISGQLTWTRLPQGFKNSPTLFNEALHRDLTDFRTQHPEVTLLQYVDDLLLAAPTKKACTQGTRHLLQELGEKGYRASAKKAQICQTKVTYLGYILSEGKRWLTPGRIETVARIPPPRNPREVREFLGKAGFCRLFIPGFAELAAPLYALTKPSTPFTWQTEHQLAFEALKKALLSAPALGLPDTSKPFTLFLDERQGIAKGVLTQKLGPWKRPVAYLSKKLDPVAAGWPPCLRIMAATAMLVKDSAKLTLGQPLTVITPHTLEAIVRQPPDRWITNARLTHYQALLLDTDRVQFGPPVTLNPATLLPVPENQPSPHDCRQVLAETHGTREDLKDQELPDADHTWYTDGSSYLDSGTRRAGAAVVDGHNTIWAQSLPPGTSAQKAELIALTKALELSKGKKANIYTDSRYAFATAHTHGSIYERRGWLTSEGKEIKNKAEIIALLKALFLPQEVAIIHCPGHQKGQDPVAVGNRQADRVARQAAMAEVLTLATEPDNTSHITAGKRTADGSEFEKRTADGSEFESPKKKAKVE

SEQ ID NO: 6119 - protein, 2175 aa, synthetic construct
MPAAKRVKLDGGDKKYSIGLDIGTNSVGWAVITDEYKVPSKKFKVLGNTDRHSIKKNLIGALLFDSGETAEATRLKRTARRRYTRRKNRICYLQEIFSNEMAKVDDSFFHRLEESFLVEEDKKHERHPIFGNIVDEVAYHEKYPTIYHLRKKLVDSTDKADLRLIYLALAHMIKFRGHFLIEGDLNPDNSDVDKLFIQLVQTYNQLFEENPINASGVDAKAILSARLSKSRRLENLIAQLPGEKKNGLFGNLIALSLGLTPNFKSNFDLAEDAKLQLSKDTYDDDLDNLLAQIGDQYADLFLAAKNLSDAILLSDILRVNTEITKAPLSASMIKRYDEHHQDLTLLKALVRQQLPEKYKEIFFDQSKNGYAGYIDGGASQEEFYKFIKPILEKMDGTEELLVKLNREDLLRKQRTFDNGSIPHQIHLGELHAILRRQEDFYPFLKDNREKIEKILTFRIPYYVGPLARGNSRFAWMTRKSEETITPWNFEEVVDKGASAQSFIERMTNFDKNLPNEKVLPKHSLLYEYFTVYNELTKVKYVTEGMRKPAFLSGEQKKAIVDLLFKTNRKVTVKQLKEDYFKKIECFDSVEISGVEDRFNASLGTYHDLLKIIKDKDFLDNEENEDILEDIVLTLTLFEDREMIEERLKTYAHLFDDKVMKQLKRRRYTGWGRLSRKLINGIRDKQSGKTILDFLKSDGFANRNFMQLIHDDSLTFKEDIQKAQVSGQGDSLHEHIANLAGSPAIKKGILQTVKVVDELVKVMGRHKPENIVIEMARENQTTQKGQKNSRERMKRIEEGIKELGSQILKEHPVENTQLQNEKLYLYYLQNGRDMYVDQELDINRLSDYDVDHIVPQSFLKDDSIDNKVLTRSDKARGKSDNVPSEEVVKKMKNYWRQLLNAKLITQRKFDNLTKAERGGLSELDKAGFIKRQLVETRQITKHVAQILDSRMNTKYDENDKLIREVKVITLKSKLVSDFRKDFQFYKVREINNYHHAHDAYLNAVVGTALIKKYPKLESEFVYGDYKVYDVRKMIAKSEQEIGKATAKYFFYSNIMNFFKTEITLANGEIRKRPLIETNGETGEIVWDKGRDFATVRKVLSMPQVNIVKKTEVQTGGFSKESILPKRNSDKLIARKKDWDPKKYGGFDSPTVAYSVLVVAKVEKGKSKKLKSVKELLGITIMERSSFEKNPIDFLEAKGYKEVKKDLIIKLPKYSLFELENGRKRMLASAGELQKGNELALPSKYVNFLYLASHYEKLKGSPEDNEQKQLFVEQHKHYLDEIIEQISEFSKRVILADANLDKVLSAYNKHRDKPIREQAENIIHLFTLTNLGAPAAFKYFDTTIDRKRYTSTKEVLDATLIHQSITGLYETRIDLSQLGGDGGGGGGSGGGGSGGMNPLQLLQPLPAEIKGTKLLAHWNSGATITCIPESFLEDEQPIKKTLIKTIHGEKQQNVYYVTFKVKGRKVEAEVIASPYEYILLSPTDVPWLTQQPLQLTILVPLQEYQEKILSKTALPEDQKQQLKTLFVKYDNLWQHWENQVGHRKIRPHNIATGDYPPRPQKQYPINPKAKPSIQIVIDDLLKQGVLTPQNSTMNTPVYPVPKPDGRWRMVLDYREVNKTIPLTAAQNQHSAGILATIVRQKYKTTLDLANGFWAHPITPESYWLTAFTWQGKQYCWTRLPQGFLNSPALFNADVVDLLKEIPNVQVYVDDIYLSHDDPKEHVQQLEKVFQILLQAGYVVSLKKSEIGQKTVEFLGFNITKEGRGLTDTFKTKLLNITPPKDLKQLQSILGKLNFARNFIPNFAELVQPLYNLIAPAKGKYIEWSEENTKQLNMVIEALNTASNLEERLPEQRLVIKVNTSPSAGYVRYYNETGKKPIMYLNYVFSKAELKFSMLEKLLTTMHKALIKAMDLAMGQEILVYSPIVSMTKIQKTPLPERKALPIRWITWMTYLEDPRIQFHYDKTLPELKHIPDVYTSSQSPVKHPSQYEGVFYTDGSAIKSPDPTKSNNAGMGIVHATYKPEYQVLNQWSIPLGNHTAQMAEIAAVEFACKKALKIPGPVLVITDSFYVAESANKELPYWKSNGFVNNKKKPLKHISKWKSIAECLSMKPDITIQHEKGISLQIPVFILKGNALADKLATQGSYVVNAGKRTADGSEFEKRTADGSEFESPKKKAKVE

SEQ ID NO: 6120 - protein, 2217 aa, synthetic construct
MPAAKRVKLDGGDKKYSIGLDIGTNSVGWAVITDEYKVPSKKFKVLGNTDRHSIKKNLIGALLFDSGETAEATRLKRTARRRYTRRKNRICYLQEIFSNEMAKVDDSFFHRLEESFLVEEDKKHERHPIFGNIVDEVAYHEKYPTIYHLRKKLVDSTDKADLRLIYLALAHMIKFRGHFLIEGDLNPDNSDVDKLFIQLVQTYNQLFEENPINASGVDAKAILSARLSKSRRLENLIAQLPGEKKNGLFGNLIALSLGLTPNFKSNFDLAEDAKLQLSKDTYDDDLDNLLAQIGDQYADLFLAAKNLSDAILLSDILRVNTEITKAPLSASMIKRYDEHHQDLTLLKALVRQQLPEKYKEIFFDQSKNGYAGYIDGGASQEEFYKFIKPILEKMDGTEELLVKLNREDLLRKQRTFDNGSIPHQIHLGELHAILRRQEDFYPFLKDNREKIEKILTFRIPYYVGPLARGNSRFAWMTRKSEETITPWNFEEVVDKGASAQSFIERMTNFDKNLPNEKVLPKHSLLYEYFTVYNELTKVKYVTEGMRKPAFLSGEQKKAIVDLLFKTNRKVTVKQLKEDYFKKIECFDSVEISGVEDRFNASLGTYHDLLKIIKDKDFLDNEENEDILEDIVLTLTLFEDREMIEERLKTYAHLFDDKVMKQLKRRRYTGWGRLSRKLINGIRDKQSGKTILDFLKSDGFANRNFMQLIHDDSLTFKEDIQKAQVSGQGDSLHEHIANLAGSPAIKKGILQTVKVVDELVKVMGRHKPENIVIEMARENQTTQKGQKNSRERMKRIEEGIKELGSQILKEHPVENTQLQNEKLYLYYLQNGRDMYVDQELDINRLSDYDVDHIVPQSFLKDDSIDNKVLTRSDKARGKSDNVPSEEVVKKMKNYWRQLLNAKLITQRKFDNLTKAERGGLSELDKAGFIKRQLVETRQITKHVAQILDSRMNTKYDENDKLIREVKVITLKSKLVSDFRKDFQFYKVREINNYHHAHDAYLNAVVGTALIKKYPKLESEFVYGDYKVYDVRKMIAKSEQEIGKATAKYFFYSNIMNFFKTEITLANGEIRKRPLIETNGETGEIVWDKGRDFATVRKVLSMPQVNIVKKTEVQTGGFSKESILPKRNSDKLIARKKDWDPKKYGGFDSPTVAYSVLVVAKVEKGKSKKLKSVKELLGITIMERSSFEKNPIDFLEAKGYKEVKKDLIIKLPKYSLFELENGRKRMLASAGELQKGNELALPSKYVNFLYLASHYEKLKGSPEDNEQKQLFVEQHKHYLDEIIEQISEFSKRVILADANLDKVLSAYNKHRDKPIREQAENIIHLFTLTNLGAPAAFKYFDTTIDRKRYTSTKEVLDATLIHQSITGLYETRIDLSQLGGDGGGGGGSGGGGSGGTLGDQGSRGSDPLPEPRVTLTVEGIPTEFLVNTGAEHSVLTKPMGKMGSKRTVVAGATGSKVYPWTTKRLLKIGQKQVTHSFLVIPECPAPLLGRDLLTKLKAQIQFSTEGPQVTWEDRPAMCLVLNLEEEYRLHEKPVPPSIDPSWLQLFPMVWAEKAGMGLANQVPPVVVELKSDASPVAVRQYPMSKEAREGIRPHIQRFLDLGILVPCQSPWNTPLLPVKKPGTNDYRPVQDLREVNKRVQDIHPTVPNPYNLLSSLPPSHTWYSVLDLKDAFFCLKLHPNSQPLFAFEWRDPEKGNTGQLTWTRLPQGFKNSPTLFDEALHRDLASFRALNPQVVMLQYVDDLLVAAPTYRDCKEGTRRLLQELSKLGYRVSAKKAQLCREEVTYLGYLLKGGKRWLTPARKATVMKIPTPTTPRQVREFLGTAGFCRLWIPGFASLAAPLYPLTREKVPFTWTEAHQEAFGRIKEALLSAPALALPDLTKPFALYVDEKEGVARGVLTQTLGPWRRPVAYLSKKLDPVASGWPTCLKAIAAVALLLKDADKLTLGQNVLVIAPHNLESIVRQPPDRWMTNARMTHYQSLLLNERVSFAPPAILNPATLLPVESDDTPIHICSEILAEETGTRPDLRDQPLPGVPAWYTDGSSFIMDGRRQAGAAIVDNKRTVWASNLPEGTSAQKAELIALTQALRLAEGKSINIYTDSRYAFATAHVHGAIYKQRGLLTSAGKDIKNKEEILALLEAIHLPKRVAIIHCPGHQRGTDPVATGNRKADEAAKQAAQSTRILTETTKNAGKRTADGSEFEKRTADGSEFESPKKKAKVE

SEQ ID NO: 6121 - protein, 2126 aa, synthetic construct
MPAAKRVKLDGGDKKYSIGLDIGTNSVGWAVITDEYKVPSKKFKVLGNTDRHSIKKNLIGALLFDSGETAEATRLKRTARRRYTRRKNRICYLQEIFSNEMAKVDDSFFHRLEESFLVEEDKKHERHPIFGNIVDEVAYHEKYPTIYHLRKKLVDSTDKADLRLIYLALAHMIKFRGHFLIEGDLNPDNSDVDKLFIQLVQTYNQLFEENPINASGVDAKAILSARLSKSRRLENLIAQLPGEKKNGLFGNLIALSLGLTPNFKSNFDLAEDAKLQLSKDTYDDDLDNLLAQIGDQYADLFLAAKNLSDAILLSDILRVNTEITKAPLSASMIKRYDEHHQDLTLLKALVRQQLPEKYKEIFFDQSKNGYAGYIDGGASQEEFYKFIKPILEKMDGTEELLVKLNREDLLRKQRTFDNGSIPHQIHLGELHAILRRQEDFYPFLKDNREKIEKILTFRIPYYVGPLARGNSRFAWMTRKSEETITPWNFEEVVDKGASAQSFIERMTNFDKNLPNEKVLPKHSLLYEYFTVYNELTKVKYVTEGMRKPAFLSGEQKKAIVDLLFKTNRKVTVKQLKEDYFKKIECFDSVEISGVEDRFNASLGTYHDLLKIIKDKDFLDNEENEDILEDIVLTLTLFEDREMIEERLKTYAHLFDDKVMKQLKRRRYTGWGRLSRKLINGIRDKQSGKTILDFLKSDGFANRNFMQLIHDDSLTFKEDIQKAQVSGQGDSLHEHIANLAGSPAIKKGILQTVKVVDELVKVMGRHKPENIVIEMARENQTTQKGQKNSRERMKRIEEGIKELGSQILKEHPVENTQLQNEKLYLYYLQNGRDMYVDQELDINRLSDYDVDHIVPQSFLKDDSIDNKVLTRSDKARGKSDNVPSEEVVKKMKNYWRQLLNAKLITQRKFDNLTKAERGGLSELDKAGFIKRQLVETRQITKHVAQILDSRMNTKYDENDKLIREVKVITLKSKLVSDFRKDFQFYKVREINNYHHAHDAYLNAVVGTALIKKYPKLESEFVYGDYKVYDVRKMIAKSEQEIGKATAKYFFYSNIMNFFKTEITLANGEIRKRPLIETNGETGEIVWDKGRDFATVRKVLSMPQVNIVKKTEVQTGGFSKESILPKRNSDKLIARKKDWDPKKYGGFDSPTVAYSVLVVAKVEKGKSKKLKSVKELLGITIMERSSFEKNPIDFLEAKGYKEVKKDLIIKLPKYSLFELENGRKRMLASAGELQKGNELALPSKYVNFLYLASHYEKLKGSPEDNEQKQLFVEQHKHYLDEIIEQISEFSKRVILADANLDKVLSAYNKHRDKPIREQAENIIHLFTLTNLGAPAAFKYFDTTIDRKRYTSTKEVLDATLIHQSITGLYETRIDLSQLGGDGGGGGGSGGGGSGGLLGRDLLTKLKAQIQFSTEGPQVTWEDRPAMCLVLNLEEEYRLHEKPVPPSIDPSWLQLFPMVWAEKAGMGLANQVPPVVVELKSDASPVAVRQYPMSKEAREGIRPHIQRFLDLGILVPCQSPWNTPLLPVKKPGTNDYRPVQDLREVNKRVQDIHPTVPNPYNLLSSLPPSHTWYSVLDLKDAFFCLKLHPNSQPLFAFEWRDPEKGNTGQLTWTRLPQGFKNSPTLFNEALHRDLASFRALNPQVVMLQYVDDLLVAAPTYRDCKEGTRRLLQELSKLGYRVSAKKAQLCREEVTYLGYLLKGGKRWLTPARKATVMKIPTPTTPRQVREFLGTAGFCRLWIPGFASLAAPLYPLTRPKVPFTWTEAHQEAFGRIKEALLSAPALALPDLTKPFALYVDEKEGVARGVLTQTLGPWRRPVAYLSKKLDPVASGWPTCLKAIAAVALLLKDADKLTLGQNVLVIAPHNLESIVRQPPDRWMTNARMTHYQSLLLNERVSFAPPAILNPATLLPVESDDTPIHICSEILAEETGTRPDLRDQPLPGVPAWYTDGSSFIMDGRRQAGAAIVDNKRTVWASNLPEGTSAQKAELIALTQALRLAEGKSINIYTDSRYAFATAHVHGAIYKQRGWLTSAGKDIKNKEEILALLEAIHLPKRVAIIHCPGHQRGTDPVATGNRKADEAAKQAAQSTRILTETTKNAGKRTADGSEFEKRTADGSEFESPKKKAKVE

SEQ ID NO: 6122 - protein, 2217 aa, synthetic construct
MPAAKRVKLDGGDKKYSIGLDIGTNSVGWAVITDEYKVPSKKFKVLGNTDRHSIKKNLIGALLFDSGETAEATRLKRTARRRYTRRKNRICYLQEIFSNEMAKVDDSFFHRLEESFLVEEDKKHERHPIFGNIVDEVAYHEKYPTIYHLRKKLVDSTDKADLRLIYLALAHMIKFRGHFLIEGDLNPDNSDVDKLFIQLVQTYNQLFEENPINASGVDAKAILSARLSKSRRLENLIAQLPGEKKNGLFGNLIALSLGLTPNFKSNFDLAEDAKLQLSKDTYDDDLDNLLAQIGDQYADLFLAAKNLSDAILLSDILRVNTEITKAPLSASMIKRYDEHHQDLTLLKALVRQQLPEKYKEIFFDQSKNGYAGYIDGGASQEEFYKFIKPILEKMDGTEELLVKLNREDLLRKQRTFDNGSIPHQIHLGELHAILRRQEDFYPFLKDNREKIEKILTFRIPYYVGPLARGNSRFAWMTRKSEETITPWNFEEVVDKGASAQSFIERMTNFDKNLPNEKVLPKHSLLYEYFTVYNELTKVKYVTEGMRKPAFLSGEQKKAIVDLLFKTNRKVTVKQLKEDYFKKIECFDSVEISGVEDRFNASLGTYHDLLKIIKDKDFLDNEENEDILEDIVLTLTLFEDREMIEERLKTYAHLFDDKVMKQLKRRRYTGWGRLSRKLINGIRDKQSGKTILDFLKSDGFANRNFMQLIHDDSLTFKEDIQKAQVSGQGDSLHEHIANLAGSPAIKKGILQTVKVVDELVKVMGRHKPENIVIEMARENQTTQKGQKNSRERMKRIEEGIKELGSQILKEHPVENTQLQNEKLYLYYLQNGRDMYVDQELDINRLSDYDVDHIVPQSFLKDDSIDNKVLTRSDKARGKSDNVPSEEVVKKMKNYWRQLLNAKLITQRKFDNLTKAERGGLSELDKAGFIKRQLVETRQITKHVAQILDSRMNTKYDENDKLIREVKVITLKSKLVSDFRKDFQFYKVREINNYHHAHDAYLNAVVGTALIKKYPKLESEFVYGDYKVYDVRKMIAKSEQEIGKATAKYFFYSNIMNFFKTEITLANGEIRKRPLIETNGETGEIVWDKGRDFATVRKVLSMPQVNIVKKTEVQTGGFSKESILPKRNSDKLIARKKDWDPKKYGGFDSPTVAYSVLVVAKVEKGKSKKLKSVKELLGITIMERSSFEKNPIDFLEAKGYKEVKKDLIIKLPKYSLFELENGRKRMLASAGELQKGNELALPSKYVNFLYLASHYEKLKGSPEDNEQKQLFVEQHKHYLDEIIEQISEFSKRVILADANLDKVLSAYNKHRDKPIREQAENIIHLFTLTNLGAPAAFKYFDTTIDRKRYTSTKEVLDATLIHQSITGLYETRIDLSQLGGDGGGGGGSGGGGSGGTLGDQGSRGSDPLPEPRVTLTVEGIPTEFLVNTGAEHSVLTKPMGKMGSKRTVVAGATGSKVYPWTTKRLLKIGQKQVTHSFLVIPECPAPLLGRDLLTKLKAQIQFSTEGPQVTWEDRPAMCLVLNLEEEYRLHEKPVPPSIDPSWLQLFPMVWAEKAGMGLANQVPPVVVELKSDASPVAVRQYPMSKEAREGIRPHIQRFLDLGILVPCQSPWNTPLLPVKKPGTNDYRPVQDLREVNKRVQDIHPTVPNPYNLLSSLPPSHTWYSVLDLKDAFFCLKLHPNSQPLFAFEWRDPEKGNTGQLTWTRLPQGFKNSPTLFNEALHRDLASFRALNPQVVMLQYVDDLLVAAPTYRDCKEGTRRLLQELSKLGYRVSAKKAQLCREEVTYLGYLLKGGKRWLTPARKATVMKIPTPTTPRQVREFLGTAGFCRLWIPGFASLAAPLYPLTRPKVPFTWTEAHQEAFGRIKEALLSAPALALPDLTKPFALYVDEKEGVARGVLTQTLGPWRRPVAYLSKKLDPVASGWPTCLKAIAAVALLLKDADKLTLGQNVLVIAPHNLESIVRQPPDRWMTNARMTHYQSLLLNERVSFAPPAILNPATLLPVESDDTPIHICSEILAEETGTRPDLRDQPLPGVPAWYTDGSSFIMDGRRQAGAAIVDNKRTVWASNLPEGTSAQKAELIALTQALRLAEGKSINIYTDSRYAFATAHVHGAIYKQRGWLTSAGKDIKNKEEILALLEAIHLPKRVAIIHCPGHQRGTDPVATGNRKADEAAKQAAQSTRILTETTKNAGKRTADGSEFEKRTADGSEFESPKKKAKVE

SEQ ID NO: 6123 - protein, 2217 aa, synthetic construct
MPAAKRVKLDGGDKKYSIGLDIGTNSVGWAVITDEYKVPSKKFKVLGNTDRHSIKKNLIGALLFDSGETAEATRLKRTARRRYTRRKNRICYLQEIFSNEMAKVDDSFFHRLEESFLVEEDKKHERHPIFGNIVDEVAYHEKYPTIYHLRKKLVDSTDKADLRLIYLALAHMIKFRGHFLIEGDLNPDNSDVDKLFIQLVQTYNQLFEENPINASGVDAKAILSARLSKSRRLENLIAQLPGEKKNGLFGNLIALSLGLTPNFKSNFDLAEDAKLQLSKDTYDDDLDNLLAQIGDQYADLFLAAKNLSDAILLSDILRVNTEITKAPLSASMIKRYDEHHQDLTLLKALVRQQLPEKYKEIFFDQSKNGYAGYIDGGASQEEFYKFIKPILEKMDGTEELLVKLNREDLLRKQRTFDNGSIPHQIHLGELHAILRRQEDFYPFLKDNREKIEKILTFRIPYYVGPLARGNSRFAWMTRKSEETITPWNFEEVVDKGASAQSFIERMTNFDKNLPNEKVLPKHSLLYEYFTVYNELTKVKYVTEGMRKPAFLSGEQKKAIVDLLFKTNRKVTVKQLKEDYFKKIECFDSVEISGVEDRFNASLGTYHDLLKIIKDKDFLDNEENEDILEDIVLTLTLFEDREMIEERLKTYAHLFDDKVMKQLKRRRYTGWGRLSRKLINGIRDKQSGKTILDFLKSDGFANRNFMQLIHDDSLTFKEDIQKAQVSGQGDSLHEHIANLAGSPAIKKGILQTVKVVDELVKVMGRHKPENIVIEMARENQTTQKGQKNSRERMKRIEEGIKELGSQILKEHPVENTQLQNEKLYLYYLQNGRDMYVDQELDINRLSDYDVDHIVPQSFLKDDSIDNKVLTRSDKARGKSDNVPSEEVVKKMKNYWRQLLNAKLITQRKFDNLTKAERGGLSELDKAGFIKRQLVETRQITKHVAQILDSRMNTKYDENDKLIREVKVITLKSKLVSDFRKDFQFYKVREINNYHHAHDAYLNAVVGTALIKKYPKLESEFVYGDYKVYDVRKMIAKSEQEIGKATAKYFFYSNIMNFFKTEITLANGEIRKRPLIETNGETGEIVWDKGRDFATVRKVLSMPQVNIVKKTEVQTGGFSKESILPKRNSDKLIARKKDWDPKKYGGFDSPTVAYSVLVVAKVEKGKSKKLKSVKELLGITIMERSSFEKNPIDFLEAKGYKEVKKDLIIKLPKYSLFELENGRKRMLASAGELQKGNELALPSKYVNFLYLASHYEKLKGSPEDNEQKQLFVEQHKHYLDEIIEQISEFSKRVILADANLDKVLSAYNKHRDKPIREQAENIIHLFTLTNLGAPAAFKYFDTTIDRKRYTSTKEVLDATLIHQSITGLYETRIDLSQLGGDGGGGGGSGGGGSGGTLGDQGSRGSDPLPEPRVTLTVEGIPTEFLVNTGAEHSVLTKPMGKMGSKRTVVAGATGSKVYPWTTKRLLKIGQKQVTHSFLVIPECPAPLLGRDLLTKLKAQIQFSTEGPQVTWEDRPAMCLVLNLEEEYRLHEKPVPPSIDPSWLQLFPMVWAEKAGMGLANQVPPVVVELKSDASPVAVRQYPMSKEAREGIRPHIQRFLDLGILVPCQSPWNTPLLPVKKPGTNDYRPVQDLREVNKRVQDIHPTVPNPYNLLSSLPPSHTWYSVLDLKDAFFCLKLHPNSQPLFAFEWRDPEKGNTGQLTWTRLPQGFKNSPTLFNEALHRDLASFRALNPQVVMLQYVDDLLVAAPTYRDCKEGTRRLLQELSKLGYRVSAKKAQLCREEVTYLGYLLKGGKRWLTPARKATVMKIPTPTTPRQVREFLGKAGFCRLFIPGFASLAAPLYPLTRPKVPFTWTEAHQEAFGRIKEALLSAPALALPDLTKPFALYVDEKEGVARGVLTQTLGPWRRPVAYLSKKLDPVASGWPTCLKAIAAVALLLKDADKLTLGQNVLVIAPHNLESIVRQPPDRWMTNARMTHYQSLLLNERVSFAPPAILNPATLLPVESDDTPIHICSEILAEETGTRPDLRDQPLPGVPAWYTDGSSFIMDGRRQAGAAIVDNKRTVWASNLPEGTSAQKAELIALTQALRLAEGKSINIYTDSRYAFATAHVHGAIYKQRGWLTSAGKDIKNKEEILALLEAIHLPKRVAIIHCPGHQRGTDPVATGNRKADEAAKQAAQSTRILTETTKNAGKRTADGSEFEKRTADGSEFESPKKKAKVE

SEQ ID NO: 6124 - protein, 2095 aa, synthetic construct
MPAAKRVKLDGGDKKYSIGLDIGTNSVGWAVITDEYKVPSKKFKVLGNTDRHSIKKNLIGALLFDSGETAEATRLKRTARRRYTRRKNRICYLQEIFSNEMAKVDDSFFHRLEESFLVEEDKKHERHPIFGNIVDEVAYHEKYPTIYHLRKKLVDSTDKADLRLIYLALAHMIKFRGHFLIEGDLNPDNSDVDKLFIQLVQTYNQLFEENPINASGVDAKAILSARLSKSRRLENLIAQLPGEKKNGLFGNLIALSLGLTPNFKSNFDLAEDAKLQLSKDTYDDDLDNLLAQIGDQYADLFLAAKNLSDAILLSDILRVNTEITKAPLSASMIKRYDEHHQDLTLLKALVRQQLPEKYKEIFFDQSKNGYAGYIDGGASQEEFYKFIKPILEKMDGTEELLVKLNREDLLRKQRTFDNGSIPHQIHLGELHAILRRQEDFYPFLKDNREKIEKILTFRIPYYVGPLARGNSRFAWMTRKSEETITPWNFEEVVDKGASAQSFIERMTNFDKNLPNEKVLPKHSLLYEYFTVYNELTKVKYVTEGMRKPAFLSGEQKKAIVDLLFKTNRKVTVKQLKEDYFKKIECFDSVEISGVEDRFNASLGTYHDLLKIIKDKDFLDNEENEDILEDIVLTLTLFEDREMIEERLKTYAHLFDDKVMKQLKRRRYTGWGRLSRKLINGIRDKQSGKTILDFLKSDGFANRNFMQLIHDDSLTFKEDIQKAQVSGQGDSLHEHIANLAGSPAIKKGILQTVKVVDELVKVMGRHKPENIVIEMARENQTTQKGQKNSRERMKRIEEGIKELGSQILKEHPVENTQLQNEKLYLYYLQNGRDMYVDQELDINRLSDYDVDHIVPQSFLKDDSIDNKVLTRSDKARGKSDNVPSEEVVKKMKNYWRQLLNAKLITQRKFDNLTKAERGGLSELDKAGFIKRQLVETRQITKHVAQILDSRMNTKYDENDKLIREVKVITLKSKLVSDFRKDFQFYKVREINNYHHAHDAYLNAVVGTALIKKYPKLESEFVYGDYKVYDVRKMIAKSEQEIGKATAKYFFYSNIMNFFKTEITLANGEIRKRPLIETNGETGEIVWDKGRDFATVRKVLSMPQVNIVKKTEVQTGGFSKESILPKRNSDKLIARKKDWDPKKYGGFDSPTVAYSVLVVAKVEKGKSKKLKSVKELLGITIMERSSFEKNPIDFLEAKGYKEVKKDLIIKLPKYSLFELENGRKRMLASAGELQKGNELALPSKYVNFLYLASHYEKLKGSPEDNEQKQLFVEQHKHYLDEIIEQISEFSKRVILADANLDKVLSAYNKHRDKPIREQAENIIHLFTLTNLGAPAAFKYFDTTIDRKRYTSTKEVLDATLIHQSITGLYETRIDLSQLGGDGGGGGGSGGGGSGGTLNLEDEYRLYETSAEPEVSPGSTWLSDFPQAWAETGGMGLAVRQAPLIIPLKATSTPVSIKQYPMSQEAKLGIKPHIQRLLDQGILVPCQSPWNTPLLPVKKPGTNDYRPVQDLREVNKRVEDIHPTVPNPYNLLSGLPPSHRWYTVLDLKDAFFCLRLHPTSQPLFAFEWRDPGMGISGQLTWTRLPQGFKNSPTLFNEALHRDLADFRIQHPDLILLQYVDDILLAATSELDCQQGTRALLLTLGNLGYRASAKKAQLCQKQVKYLGYLLKEGQRWLTEARKETVMGQPTPKTPRQLREFLGTAGFCRLWIPGFAEMAAPLYPLTKPGTLFNWGPDQQKAYQEIKQALLTAPALGLPDLTKPFELFVDEKQGYAKGVLTQKLGPWRRPVAYLSKKLDPVAAGWPPCLRMVAAIAVLRKDAGKLTMGQPLVILAPHAVEALVKQPPDRWLSNARMTHYQAMLLDTDRVQFGPVVALNPATLLPLPEEGAPHDCLEILAETHGTRPDLTDQPIPDADHTWYTDGSSFLQEGQRKAGAAVTTETEVIWARALPAGTSAQRAELIALTQALKMAEGKRLNVYTDSRYAFATAHIHGEIYRRRGWLTSEGREIKNKSEILALLKALFLPKRLSIIHCLGHQKGDSAEARGNRLADQAAREAAIKTPPDTSTLLAGKRTADGSEFEKRTADGSEFESPKKKAKVE

SEQ ID NO: 6125 - protein, 2095 aa, synthetic construct
MPAAKRVKLDGGDKKYSIGLDIGTNSVGWAVITDEYKVPSKKFKVLGNTDRHSIKKNLIGALLFDSGETAEATRLKRTARRRYTRRKNRICYLQEIFSNEMAKVDDSFFHRLEESFLVEEDKKHERHPIFGNIVDEVAYHEKYPTIYHLRKKLVDSTDKADLRLIYLALAHMIKFRGHFLIEGDLNPDNSDVDKLFIQLVQTYNQLFEENPINASGVDAKAILSARLSKSRRLENLIAQLPGEKKNGLFGNLIALSLGLTPNFKSNFDLAEDAKLQLSKDTYDDDLDNLLAQIGDQYADLFLAAKNLSDAILLSDILRVNTEITKAPLSASMIKRYDEHHQDLTLLKALVRQQLPEKYKEIFFDQSKNGYAGYIDGGASQEEFYKFIKPILEKMDGTEELLVKLNREDLLRKQRTFDNGSIPHQIHLGELHAILRRQEDFYPFLKDNREKIEKILTFRIPYYVGPLARGNSRFAWMTRKSEETITPWNFEEVVDKGASAQSFIERMTNFDKNLPNEKVLPKHSLLYEYFTVYNELTKVKYVTEGMRKPAFLSGEQKKAIVDLLFKTNRKVTVKQLKEDYFKKIECFDSVEISGVEDRFNASLGTYHDLLKIIKDKDFLDNEENEDILEDIVLTLTLFEDREMIEERLKTYAHLFDDKVMKQLKRRRYTGWGRLSRKLINGIRDKQSGKTILDFLKSDGFANRNFMQLIHDDSLTFKEDIQKAQVSGQGDSLHEHIANLAGSPAIKKGILQTVKVVDELVKVMGRHKPENIVIEMARENQTTQKGQKNSRERMKRIEEGIKELGSQILKEHPVENTQLQNEKLYLYYLQNGRDMYVDQELDINRLSDYDVDHIVPQSFLKDDSIDNKVLTRSDKARGKSDNVPSEEVVKKMKNYWRQLLNAKLITQRKFDNLTKAERGGLSELDKAGFIKRQLVETRQITKHVAQILDSRMNTKYDENDKLIREVKVITLKSKLVSDFRKDFQFYKVREINNYHHAHDAYLNAVVGTALIKKYPKLESEFVYGDYKVYDVRKMIAKSEQEIGKATAKYFFYSNIMNFFKTEITLANGEIRKRPLIETNGETGEIVWDKGRDFATVRKVLSMPQVNIVKKTEVQTGGFSKESILPKRNSDKLIARKKDWDPKKYGGFDSPTVAYSVLVVAKVEKGKSKKLKSVKELLGITIMERSSFEKNPIDFLEAKGYKEVKKDLIIKLPKYSLFELENGRKRMLASAGELQKGNELALPSKYVNFLYLASHYEKLKGSPEDNEQKQLFVEQHKHYLDEIIEQISEFSKRVILADANLDKVLSAYNKHRDKPIREQAENIIHLFTLTNLGAPAAFKYFDTTIDRKRYTSTKEVLDATLIHQSITGLYETRIDLSQLGGDGGGGGGSGGGGSGGTLNLEDEYRLYETSAEPEVSPGSTWLSDFPQAWAETGGMGLAVRQAPLIIPLKATSTPVSIKQYPMSQEAKLGIKPHIQRLLDQGILVPCQSPWNTPLLPVKKPGTNDYRPVQDLREVNKRVEDIHPTVPNPYNLLSGLPPSHRWYTVLDLKDAFFCLRLHPTSQPLFAFEWRDPGMGISGQLTWTRLPQGFKNSPTLFNEALHRDLADFRIQHPDLILLQYVDDILLAATSELDCQQGTRALLLTLGNLGYRASAKKAQLCQKQVKYLGYLLKEGQRWLTEARKETVMGQPTPKTPRQLREFLGKAGFCRLFIPGFAEMAAPLYPLTKPGTLFNWGPDQQKAYQEIKQALLTAPALGLPDLTKPFELFVDEKQGYAKGVLTQKLGPWRRPVAYLSKKLDPVAAGWPPCLRMVAAIAVLRKDAGKLTMGQPLVILAPHAVEALVKQPPDRWLSNARMTHYQAMLLDTDRVQFGPVVALNPATLLPLPEEGAPHDCLEILAETHGTRPDLTDQPIPDADHTWYTDGSSFLQEGQRKAGAAVTTETEVIWARALPAGTSAQRAELIALTQALKMAEGKRLNVYTDSRYAFATAHIHGEIYRRRGWLTSEGREIKNKSEILALLKALFLPKRLSIIHCLGHQKGDSAEARGNRLADQAAREAAIKTPPDTSTLLAGKRTADGSEFEKRTADGSEFESPKKKAKVE

SEQ ID NO: 6126 - protein, 2095 aa, synthetic construct
MPAAKRVKLDGGDKKYSIGLDIGTNSVGWAVITDEYKVPSKKFKVLGNTDRHSIKKNLIGALLFDSGETAEATRLKRTARRRYTRRKNRICYLQEIFSNEMAKVDDSFFHRLEESFLVEEDKKHERHPIFGNIVDEVAYHEKYPTIYHLRKKLVDSTDKADLRLIYLALAHMIKFRGHFLIEGDLNPDNSDVDKLFIQLVQTYNQLFEENPINASGVDAKAILSARLSKSRRLENLIAQLPGEKKNGLFGNLIALSLGLTPNFKSNFDLAEDAKLQLSKDTYDDDLDNLLAQIGDQYADLFLAAKNLSDAILLSDILRVNTEITKAPLSASMIKRYDEHHQDLTLLKALVRQQLPEKYKEIFFDQSKNGYAGYIDGGASQEEFYKFIKPILEKMDGTEELLVKLNREDLLRKQRTFDNGSIPHQIHLGELHAILRRQEDFYPFLKDNREKIEKILTFRIPYYVGPLARGNSRFAWMTRKSEETITPWNFEEVVDKGASAQSFIERMTNFDKNLPNEKVLPKHSLLYEYFTVYNELTKVKYVTEGMRKPAFLSGEQKKAIVDLLFKTNRKVTVKQLKEDYFKKIECFDSVEISGVEDRFNASLGTYHDLLKIIKDKDFLDNEENEDILEDIVLTLTLFEDREMIEERLKTYAHLFDDKVMKQLKRRRYTGWGRLSRKLINGIRDKQSGKTILDFLKSDGFANRNFMQLIHDDSLTFKEDIQKAQVSGQGDSLHEHIANLAGSPAIKKGILQTVKVVDELVKVMGRHKPENIVIEMARENQTTQKGQKNSRERMKRIEEGIKELGSQILKEHPVENTQLQNEKLYLYYLQNGRDMYVDQELDINRLSDYDVDHIVPQSFLKDDSIDNKVLTRSDKARGKSDNVPSEEVVKKMKNYWRQLLNAKLITQRKFDNLTKAERGGLSELDKAGFIKRQLVETRQITKHVAQILDSRMNTKYDENDKLIREVKVITLKSKLVSDFRKDFQFYKVREINNYHHAHDAYLNAVVGTALIKKYPKLESEFVYGDYKVYDVRKMIAKSEQEIGKATAKYFFYSNIMNFFKTEITLANGEIRKRPLIETNGETGEIVWDKGRDFATVRKVLSMPQVNIVKKTEVQTGGFSKESILPKRNSDKLIARKKDWDPKKYGGFDSPTVAYSVLVVAKVEKGKSKKLKSVKELLGITIMERSSFEKNPIDFLEAKGYKEVKKDLIIKLPKYSLFELENGRKRMLASAGELQKGNELALPSKYVNFLYLASHYEKLKGSPEDNEQKQLFVEQHKHYLDEIIEQISEFSKRVILADANLDKVLSAYNKHRDKPIREQAENIIHLFTLTNLGAPAAFKYFDTTIDRKRYTSTKEVLDATLIHQSITGLYETRIDLSQLGGDGGGGGGSGGGGSGGTLGIEDEYRLHETSTEPDVSLGSTWLSDFPQAWAETGGMGLAVRQAPLIIPLKATSTPVSIQQYPMSHEARLGIKPHIQRLLDQGILVPCQSPWNTPLLPVKKPGTNDYRPVQDLREVNKRVEDIHPTVPNPYNLLSGLPPSHQWYTVLDLKDAFFCLRLHPTSQPLFAFEWRDPGMGISGQLTWTRLPQGFKNSPTLFNEALHRDLADFRIQHPDLILLQYVDDILLAATSELDCQQGTRALLQTLGDLGYRASAKKAQICQKQVKYLGYLLREGQRWLTEARKETVMGQPVPKTPRQLREFLGTAGFCRLWIPGFAEMAAPLYPLTKPGTLFSWGPDQQKAYQEIKQALLTAPALGLPDLTKPFELFVDEKQGYAKGVLTQKLGPWRRPVAYLSKKLDPVAAGWPPCLRMVAAIAVLTKDAGKLTMGQPLVILAPHAVEALVKQPPDRWLSNARMTHYQAMLLDTDRVQFGPVVALNPATLLPLPEEGAPHDCLEILAETHGTRPDLTDQPIPDADHTWYTDGSSFLQEGQRKAGAAVTTETEVIWAGALPAGTSAQRAELIALTQALKMAEGKRLNVYTDSRYAFATAHIHGEIYRRRGWLTSEGREIKNKSEILALLKALFLPKRLSIIHCLGHQKGDSAEARGNRLADQAAREAAIKTPPDTSTLLAGKRTADGSEFEKRTADGSEFESPKKKAKVE

SEQ ID NO: 6127 - protein, 2095 aa, synthetic construct
MPAAKRVKLDGGDKKYSIGLDIGTNSVGWAVITDEYKVPSKKFKVLGNTDRHSIKKNLIGALLFDSGETAEATRLKRTARRRYTRRKNRICYLQEIFSNEMAKVDDSFFHRLEESFLVEEDKKHERHPIFGNIVDEVAYHEKYPTIYHLRKKLVDSTDKADLRLIYLALAHMIKFRGHFLIEGDLNPDNSDVDKLFIQLVQTYNQLFEENPINASGVDAKAILSARLSKSRRLENLIAQLPGEKKNGLFGNLIALSLGLTPNFKSNFDLAEDAKLQLSKDTYDDDLDNLLAQIGDQYADLFLAAKNLSDAILLSDILRVNTEITKAPLSASMIKRYDEHHQDLTLLKALVRQQLPEKYKEIFFDQSKNGYAGYIDGGASQEEFYKFIKPILEKMDGTEELLVKLNREDLLRKQRTFDNGSIPHQIHLGELHAILRRQEDFYPFLKDNREKIEKILTFRIPYYVGPLARGNSRFAWMTRKSEETITPWNFEEVVDKGASAQSFIERMTNFDKNLPNEKVLPKHSLLYEYFTVYNELTKVKYVTEGMRKPAFLSGEQKKAIVDLLFKTNRKVTVKQLKEDYFKKIECFDSVEISGVEDRFNASLGTYHDLLKIIKDKDFLDNEENEDILEDIVLTLTLFEDREMIEERLKTYAHLFDDKVMKQLKRRRYTGWGRLSRKLINGIRDKQSGKTILDFLKSDGFANRNFMQLIHDDSLTFKEDIQKAQVSGQGDSLHEHIANLAGSPAIKKGILQTVKVVDELVKVMGRHKPENIVIEMARENQTTQKGQKNSRERMKRIEEGIKELGSQILKEHPVENTQLQNEKLYLYYLQNGRDMYVDQELDINRLSDYDVDHIVPQSFLKDDSIDNKVLTRSDKARGKSDNVPSEEVVKKMKNYWRQLLNAKLITQRKFDNLTKAERGGLSELDKAGFIKRQLVETRQITKHVAQILDSRMNTKYDENDKLIREVKVITLKSKLVSDFRKDFQFYKVREINNYHHAHDAYLNAVVGTALIKKYPKLESEFVYGDYKVYDVRKMIAKSEQEIGKATAKYFFYSNIMNFFKTEITLANGEIRKRPLIETNGETGEIVWDKGRDFATVRKVLSMPQVNIVKKTEVQTGGFSKESILPKRNSDKLIARKKDWDPKKYGGFDSPTVAYSVLVVAKVEKGKSKKLKSVKELLGITIMERSSFEKNPIDFLEAKGYKEVKKDLIIKLPKYSLFELENGRKRMLASAGELQKGNELALPSKYVNFLYLASHYEKLKGSPEDNEQKQLFVEQHKHYLDEIIEQISEFSKRVILADANLDKVLSAYNKHRDKPIREQAENIIHLFTLTNLGAPAAFKYFDTTIDRKRYTSTKEVLDATLIHQSITGLYETRIDLSQLGGDGGGGGGSGGGGSGGTLNIEDEYRLHETSKGPDVPLGSTWLSDFPQAWAETGGMGLAFRQAPLIISLKATSTPVSIKQYPMSQEARLGIKPHIQRLLDQGILVPCQSPWNTPLLPVKKPGTNDYRPVQDLREVNKRVEDIHPTVPNPYNLLSGLPPSHQWYTVLDLKDAFFCLRLHPTSQSLFAFEWKDPEMGISGQLTWTRLPQGFKNSPTLFNEALHRDLADFRIQHPDLILLQYVDDLLLAATSELDCQQGTRALLQTLGDLGYRASAKKAQICQKQVKYLGYLLKEGQRWLTEARKETVMGQPTPKTPRQLREFLGTAGLCRLWIPGFAEMAAPLYPLTKPGTLFKWGPDQQKAYQEIKQALLTAPALGLPDLTKPFELFVDEKQGYAKGVLTQKLGPWRRPVAYLSKKLDPVAAGWPPCLRMVAAIAVLTKDVGKLTMGQPLVILAPHAVEALVKQPPDRWLSNARMTHYQALLLDTDRVQFGPIVALNPATLLPLPEEGLQHDCLDILAEAHGTRPDLTDQPLPDADHTWYTDGSSFLQEGQRRAGAAVTTETEVIWAKALPAGTSAQRAELIALTQALKMAAGKKLNVYTDSRYAFATAHIHGEIYRRRGWLTSEGKEIKNKDEILALLKALFLPKRLSIIHCPGHQKGNHAEARGNRMADQAAREVATRETPETSTLLAGKRTADGSEFEKRTADGSEFESPKKKAKVE

SEQ ID NO: 6128 - protein, 2086 aa, synthetic construct
MPAAKRVKLDGGDKKYSIGLDIGTNSVGWAVITDEYKVPSKKFKVLGNTDRHSIKKNLIGALLFDSGETAEATRLKRTARRRYTRRKNRICYLQEIFSNEMAKVDDSFFHRLEESFLVEEDKKHERHPIFGNIVDEVAYHEKYPTIYHLRKKLVDSTDKADLRLIYLALAHMIKFRGHFLIEGDLNPDNSDVDKLFIQLVQTYNQLFEENPINASGVDAKAILSARLSKSRRLENLIAQLPGEKKNGLFGNLIALSLGLTPNFKSNFDLAEDAKLQLSKDTYDDDLDNLLAQIGDQYADLFLAAKNLSDAILLSDILRVNTEITKAPLSASMIKRYDEHHQDLTLLKALVRQQLPEKYKEIFFDQSKNGYAGYIDGGASQEEFYKFIKPILEKMDGTEELLVKLNREDLLRKQRTFDNGSIPHQIHLGELHAILRRQEDFYPFLKDNREKIEKILTFRIPYYVGPLARGNSRFAWMTRKSEETITPWNFEEVVDKGASAQSFIERMTNFDKNLPNEKVLPKHSLLYEYFTVYNELTKVKYVTEGMRKPAFLSGEQKKAIVDLLFKTNRKVTVKQLKEDYFKKIECFDSVEISGVEDRFNASLGTYHDLLKIIKDKDFLDNEENEDILEDIVLTLTLFEDREMIEERLKTYAHLFDDKVMKQLKRRRYTGWGRLSRKLINGIRDKQSGKTILDFLKSDGFANRNFMQLIHDDSLTFKEDIQKAQVSGQGDSLHEHIANLAGSPAIKKGILQTVKVVDELVKVMGRHKPENIVIEMARENQTTQKGQKNSRERMKRIEEGIKELGSQILKEHPVENTQLQNEKLYLYYLQNGRDMYVDQELDINRLSDYDVDHIVPQSFLKDDSIDNKVLTRSDKARGKSDNVPSEEVVKKMKNYWRQLLNAKLITQRKFDNLTKAERGGLSELDKAGFIKRQLVETRQITKHVAQILDSRMNTKYDENDKLIREVKVITLKSKLVSDFRKDFQFYKVREINNYHHAHDAYLNAVVGTALIKKYPKLESEFVYGDYKVYDVRKMIAKSEQEIGKATAKYFFYSNIMNFFKTEITLANGEIRKRPLIETNGETGEIVWDKGRDFATVRKVLSMPQVNIVKKTEVQTGGFSKESILPKRNSDKLIARKKDWDPKKYGGFDSPTVAYSVLVVAKVEKGKSKKLKSVKELLGITIMERSSFEKNPIDFLEAKGYKEVKKDLIIKLPKYSLFELENGRKRMLASAGELQKGNELALPSKYVNFLYLASHYEKLKGSPEDNEQKQLFVEQHKHYLDEIIEQISEFSKRVILADANLDKVLSAYNKHRDKPIREQAENIIHLFTLTNLGAPAAFKYFDTTIDRKRYTSTKEVLDATLIHQSITGLYETRIDLSQLGGDGGGGGGSGGGGSGGVPWLMKKPLQLTVLVPLHEYQERLLQQTALPKEQKELLQKLFLKYDALWQHWENQVGHRRIKPHNIATGTLAPRPQKQYPINPKAKPSIQIVIDDLLKQGVLIQQNSTMNTPVYPVPKPDGKWRMVLDYREVNKTIPLIAAQNQHSAGILSSIYRGKYKTTLDLTNGFWAHPITPESYWLTAFTWQGKQYCWTRLPQGFLNSPALFTADVVDLLKEIPNVQAYVDDIYISHDDPQEHLEQLEKIFSILLNAGYVVSLKKSEIAQREVEFLGFNITKEGRGLTDTFKQKLLNITPPKDLKQLQSILGLLNFARNFIPNYSELVKPLYTIVANANGKFISWTEDNSNQLQHIISVLNQADNLEERNPETRLIIKVNSSPSAGYIRYYNEGSKRPIMYVNYIFSKAEAKFTQTEKLLTTMHKGLIKAMDLAMGQEILVYSPIVSMTKIQRTPLPERKALPVRWITWMTYLEDPRIQFHYDKSLPELQQIPNVTEDVIAKTKHPSEFAMVFYTDGSAIKHPDVNKSHSAGMGIAQVQFIPEYKIVHQWSIPLGDHTAQLAEIAAVEFACKKALKISGPVLIVTDSFYVAESANKELPYWKSNGFLNNKKKPLRHVSKWKSIAECLQLKPDIIIMHEKGHQQPMTTLHTEGNNLADKLATQGSYVVHAGKRTADGSEFEKRTADGSEFESPKKKAKVE

SEQ ID NO: 6129 - protein, 2102 aa, synthetic construct
MPAAKRVKLDGGDKKYSIGLDIGTNSVGWAVITDEYKVPSKKFKVLGNTDRHSIKKNLIGALLFDSGETAEATRLKRTARRRYTRRKNRICYLQEIFSNEMAKVDDSFFHRLEESFLVEEDKKHERHPIFGNIVDEVAYHEKYPTIYHLRKKLVDSTDKADLRLIYLALAHMIKFRGHFLIEGDLNPDNSDVDKLFIQLVQTYNQLFEENPINASGVDAKAILSARLSKSRRLENLIAQLPGEKKNGLFGNLIALSLGLTPNFKSNFDLAEDAKLQLSKDTYDDDLDNLLAQIGDQYADLFLAAKNLSDAILLSDILRVNTEITKAPLSASMIKRYDEHHQDLTLLKALVRQQLPEKYKEIFFDQSKNGYAGYIDGGASQEEFYKFIKPILEKMDGTEELLVKLNREDLLRKQRTFDNGSIPHQIHLGELHAILRRQEDFYPFLKDNREKIEKILTFRIPYYVGPLARGNSRFAWMTRKSEETITPWNFEEVVDKGASAQSFIERMTNFDKNLPNEKVLPKHSLLYEYFTVYNELTKVKYVTEGMRKPAFLSGEQKKAIVDLLFKTNRKVTVKQLKEDYFKKIECFDSVEISGVEDRFNASLGTYHDLLKIIKDKDFLDNEENEDILEDIVLTLTLFEDREMIEERLKTYAHLFDDKVMKQLKRRRYTGWGRLSRKLINGIRDKQSGKTILDFLKSDGFANRNFMQLIHDDSLTFKEDIQKAQVSGQGDSLHEHIANLAGSPAIKKGILQTVKVVDELVKVMGRHKPENIVIEMARENQTTQKGQKNSRERMKRIEEGIKELGSQILKEHPVENTQLQNEKLYLYYLQNGRDMYVDQELDINRLSDYDVDHIVPQSFLKDDSIDNKVLTRSDKARGKSDNVPSEEVVKKMKNYWRQLLNAKLITQRKFDNLTKAERGGLSELDKAGFIKRQLVETRQITKHVAQILDSRMNTKYDENDKLIREVKVITLKSKLVSDFRKDFQFYKVREINNYHHAHDAYLNAVVGTALIKKYPKLESEFVYGDYKVYDVRKMIAKSEQEIGKATAKYFFYSNIMNFFKTEITLANGEIRKRPLIETNGETGEIVWDKGRDFATVRKVLSMPQVNIVKKTEVQTGGFSKESILPKRNSDKLIARKKDWDPKKYGGFDSPTVAYSVLVVAKVEKGKSKKLKSVKELLGITIMERSSFEKNPIDFLEAKGYKEVKKDLIIKLPKYSLFELENGRKRMLASAGELQKGNELALPSKYVNFLYLASHYEKLKGSPEDNEQKQLFVEQHKHYLDEIIEQISEFSKRVILADANLDKVLSAYNKHRDKPIREQAENIIHLFTLTNLGAPAAFKYFDTTIDRKRYTSTKEVLDATLIHQSITGLYETRIDLSQLGGDGGGGGGSGGGGSGGGGSGGTAPLEEEYRLFLEAPIQNVTLLEQWKREIPKVWAEINPPGLASTQAPIHVQLLSTALPVRVRQYPITLEAKRSLRETIRKFRAAGILRPVHSPWNTPLLPVRKSGTSEYRMVQDLREVNKRVETIHPTVPNPYTLLSLLPPDRIWYSVLDLKDAFFCIPLAPESQLIFAFEWADAEEGESGQLTWTRLPQGFKNSPTLFNEALNRDLQGFRLDHPSVSLLQYVDDLLIAADTQAACLSATRDLLMTLAELGYRVSGKKAQLCQEEVTYLGFKIHKGSRSLSNSRTQAILQIPVPKTKRQVREFLGTIGYCRLWIPGFAELAQPLYAATRPGNDPLVWGEKEEEAFQSLKLALTQPPALALPSLDKPFQLFVEETSGAAKGVLTQALGPWKRPVAYLSKRLDPVAAGWPRCLRAIAAAALLTREASKLTFGQDIEITSSHNLESLLRSPPDKWLTNARITQYQVLLLDPPRVRFKQTAALNPATLLPETDDTLPIHHCLDTLDSLTSTRPDLTDQPLAQAEATLFTDGSSYIRDGKRYAGAAVVTLDSVIWAEPLPIGTSAQKAELIALTKALEWSKDKSVNIYTDSRYAFATLHVHGMIYRERGWLTAGGKAIKNAPEILALLTAVWLPKRVAVMHCKGHQKDDAPTSTGNRRADEVAREVAIRPLSTQATISAGKRTADGSEFEKRTADGSEFESPKKKAKVE

SEQ ID NO: 6130 - protein, 2102 aa, synthetic construct
MPAAKRVKLDGGDKKYSIGLDIGTNSVGWAVITDEYKVPSKKFKVLGNTDRHSIKKNLIGALLFDSGETAEATRLKRTARRRYTRRKNRICYLQEIFSNEMAKVDDSFFHRLEESFLVEEDKKHERHPIFGNIVDEVAYHEKYPTIYHLRKKLVDSTDKADLRLIYLALAHMIKFRGHFLIEGDLNPDNSDVDKLFIQLVQTYNQLFEENPINASGVDAKAILSARLSKSRRLENLIAQLPGEKKNGLFGNLIALSLGLTPNFKSNFDLAEDAKLQLSKDTYDDDLDNLLAQIGDQYADLFLAAKNLSDAILLSDILRVNTEITKAPLSASMIKRYDEHHQDLTLLKALVRQQLPEKYKEIFFDQSKNGYAGYIDGGASQEEFYKFIKPILEKMDGTEELLVKLNREDLLRKQRTFDNGSIPHQIHLGELHAILRRQEDFYPFLKDNREKIEKILTFRIPYYVGPLARGNSRFAWMTRKSEETITPWNFEEVVDKGASAQSFIERMTNFDKNLPNEKVLPKHSLLYEYFTVYNELTKVKYVTEGMRKPAFLSGEQKKAIVDLLFKTNRKVTVKQLKEDYFKKIECFDSVEISGVEDRFNASLGTYHDLLKIIKDKDFLDNEENEDILEDIVLTLTLFEDREMIEERLKTYAHLFDDKVMKQLKRRRYTGWGRLSRKLINGIRDKQSGKTILDFLKSDGFANRNFMQLIHDDSLTFKEDIQKAQVSGQGDSLHEHIANLAGSPAIKKGILQTVKVVDELVKVMGRHKPENIVIEMARENQTTQKGQKNSRERMKRIEEGIKELGSQILKEHPVENTQLQNEKLYLYYLQNGRDMYVDQELDINRLSDYDVDHIVPQSFLKDDSIDNKVLTRSDKARGKSDNVPSEEVVKKMKNYWRQLLNAKLITQRKFDNLTKAERGGLSELDKAGFIKRQLVETRQITKHVAQILDSRMNTKYDENDKLIREVKVITLKSKLVSDFRKDFQFYKVREINNYHHAHDAYLNAVVGTALIKKYPKLESEFVYGDYKVYDVRKMIAKSEQEIGKATAKYFFYSNIMNFFKTEITLANGEIRKRPLIETNGETGEIVWDKGRDFATVRKVLSMPQVNIVKKTEVQTGGFSKESILPKRNSDKLIARKKDWDPKKYGGFDSPTVAYSVLVVAKVEKGKSKKLKSVKELLGITIMERSSFEKNPIDFLEAKGYKEVKKDLIIKLPKYSLFELENGRKRMLASAGELQKGNELALPSKYVNFLYLASHYEKLKGSPEDNEQKQLFVEQHKHYLDEIIEQISEFSKRVILADANLDKVLSAYNKHRDKPIREQAENIIHLFTLTNLGAPAAFKYFDTTIDRKRYTSTKEVLDATLIHQSITGLYETRIDLSQLGGDGGGGGGSGGGGSGGGGSGGTAPLEEEYRLFLEAPIQNVTLLEQWKREIPKVWAEINPPGLASTQAPIHVQLLSTALPVRVRQYPITLEAKRSLRETIRKFRAAGILRPVHSPWNTPLLPVRKSGTSEYRMVQDLREVNKRVETIHPTVPNPYTLLSLLPPDRIWYSVLDLKDAFFCIPLAPESQLIFAFEWADAEEGESGQLTWTRLPQGFKNSPTLFNEALNRDLQGFRLDHPSVSLLQYVDDLLIAADTQAACLSATRDLLMTLAELGYRVSGKKAQLCQEEVTYLGFKIHKGSRSLSNSRTQAILQIPVPKTKRQVREFLGKIGYCRLFIPGFAELAQPLYAATRPGNDPLVWGEKEEEAFQSLKLALTQPPALALPSLDKPFQLFVEETSGAAKGVLTQALGPWKRPVAYLSKRLDPVAAGWPRCLRAIAAAALLTREASKLTFGQDIEITSSHNLESLLRSPPDKWLTNARITQYQVLLLDPPRVRFKQTAALNPATLLPETDDTLPIHHCLDTLDSLTSTRPDLTDQPLAQAEATLFTDGSSYIRDGKRYAGAAVVTLDSVIWAEPLPIGTSAQKAELIALTKALEWSKDKSVNIYTDSRYAFATLHVHGMIYRERGWLTAGGKAIKNAPEILALLTAVWLPKRVAVMHCKGHQKDDAPTSTGNRRADEVAREVAIRPLSTQATISAGKRTADGSEFEKRTADGSEFESPKKKAKVE

SEQ ID NO: 6131 - protein, 2106 aa, synthetic construct
MPAAKRVKLDGGDKKYSIGLDIGTNSVGWAVITDEYKVPSKKFKVLGNTDRHSIKKNLIGALLFDSGETAEATRLKRTARRRYTRRKNRICYLQEIFSNEMAKVDDSFFHRLEESFLVEEDKKHERHPIFGNIVDEVAYHEKYPTIYHLRKKLVDSTDKADLRLIYLALAHMIKFRGHFLIEGDLNPDNSDVDKLFIQLVQTYNQLFEENPINASGVDAKAILSARLSKSRRLENLIAQLPGEKKNGLFGNLIALSLGLTPNFKSNFDLAEDAKLQLSKDTYDDDLDNLLAQIGDQYADLFLAAKNLSDAILLSDILRVNTEITKAPLSASMIKRYDEHHQDLTLLKALVRQQLPEKYKEIFFDQSKNGYAGYIDGGASQEEFYKFIKPILEKMDGTEELLVKLNREDLLRKQRTFDNGSIPHQIHLGELHAILRRQEDFYPFLKDNREKIEKILTFRIPYYVGPLARGNSRFAWMTRKSEETITPWNFEEVVDKGASAQSFIERMTNFDKNLPNEKVLPKHSLLYEYFTVYNELTKVKYVTEGMRKPAFLSGEQKKAIVDLLFKTNRKVTVKQLKEDYFKKIECFDSVEISGVEDRFNASLGTYHDLLKIIKDKDFLDNEENEDILEDIVLTLTLFEDREMIEERLKTYAHLFDDKVMKQLKRRRYTGWGRLSRKLINGIRDKQSGKTILDFLKSDGFANRNFMQLIHDDSLTFKEDIQKAQVSGQGDSLHEHIANLAGSPAIKKGILQTVKVVDELVKVMGRHKPENIVIEMARENQTTQKGQKNSRERMKRIEEGIKELGSQILKEHPVENTQLQNEKLYLYYLQNGRDMYVDQELDINRLSDYDVDHIVPQSFLKDDSIDNKVLTRSDKARGKSDNVPSEEVVKKMKNYWRQLLNAKLITQRKFDNLTKAERGGLSELDKAGFIKRQLVETRQITKHVAQILDSRMNTKYDENDKLIREVKVITLKSKLVSDFRKDFQFYKVREINNYHHAHDAYLNAVVGTALIKKYPKLESEFVYGDYKVYDVRKMIAKSEQEIGKATAKYFFYSNIMNFFKTEITLANGEIRKRPLIETNGETGEIVWDKGRDFATVRKVLSMPQVNIVKKTEVQTGGFSKESILPKRNSDKLIARKKDWDPKKYGGFDSPTVAYSVLVVAKVEKGKSKKLKSVKELLGITIMERSSFEKNPIDFLEAKGYKEVKKDLIIKLPKYSLFELENGRKRMLASAGELQKGNELALPSKYVNFLYLASHYEKLKGSPEDNEQKQLFVEQHKHYLDEIIEQISEFSKRVILADANLDKVLSAYNKHRDKPIREQAENIIHLFTLTNLGAPAAFKYFDTTIDRKRYTSTKEVLDATLIHQSITGLYETRIDLSQLGGDGGGGGGSGGGGSGGGGSGGTVSLQDEHRLFDIPVTTSLPDVWLQDFPQAWAETGGLGRAKCQAPIIIDLKPTAVPVSIKQYPMSLEAHMGIRQHIIKFLELGVLRPCRSPWNTPLLPVKKPGTQDYRPVQDLREINKRTVDIHPTVPNPYNLLSTLKPDYSWYTVLDLKDAFFCLPLAPQSQELFAFEWKDPERGISGQLTWTRLPQGFKNSPTLFNEALHRDLTDFRTQHPEVTLLQYVDDLLLAAPTKKACTQGTRHLLQELGEKGYRASAKKAQICQTKVTYLGYILSEGKRWLTPGRIETVARIPPPRNPREVREFLGTAGFCRLWIPGFAELAAPLYALTKPSTPFTWQTEHQLAFEALKKALLSAPALGLPDTSKPFTLFLDERQGIAKGVLTQKLGPWKRPVAYLSKKLDPVAAGWPPCLRIMAATAMLVKDSAKLTLGQPLTVITPHTLEAIVRQPPDRWITNARLTHYQALLLDTDRVQFGPPVTLNPATLLPVPENQPSPHDCRQVLAETHGTREDLKDQELPDADHTWYTDGSSYLDSGTRRAGAAVVDGHNTIWAQSLPPGTSAQKAELIALTKALELSKGKKANIYTDSRYAFATAHTHGSIYERRGWLTSEGKEIKNKAEIIALLKALFLPQEVAIIHCPGHQKGQDPVAVGNRQADRVARQAAMAEVLTLATEPDNTSHITAGKRTADGSEFEKRTADGSEFESPKKKAKVE

SEQ ID NO: 6132 - protein, 2091 aa, synthetic construct
MPAAKRVKLDGGDKKYSIGLDIGTNSVGWAVITDEYKVPSKKFKVLGNTDRHSIKKNLIGALLFDSGETAEATRLKRTARRRYTRRKNRICYLQEIFSNEMAKVDDSFFHRLEESFLVEEDKKHERHPIFGNIVDEVAYHEKYPTIYHLRKKLVDSTDKADLRLIYLALAHMIKFRGHFLIEGDLNPDNSDVDKLFIQLVQTYNQLFEENPINASGVDAKAILSARLSKSRRLENLIAQLPGEKKNGLFGNLIALSLGLTPNFKSNFDLAEDAKLQLSKDTYDDDLDNLLAQIGDQYADLFLAAKNLSDAILLSDILRVNTEITKAPLSASMIKRYDEHHQDLTLLKALVRQQLPEKYKEIFFDQSKNGYAGYIDGGASQEEFYKFIKPILEKMDGTEELLVKLNREDLLRKQRTFDNGSIPHQIHLGELHAILRRQEDFYPFLKDNREKIEKILTFRIPYYVGPLARGNSRFAWMTRKSEETITPWNFEEVVDKGASAQSFIERMTNFDKNLPNEKVLPKHSLLYEYFTVYNELTKVKYVTEGMRKPAFLSGEQKKAIVDLLFKTNRKVTVKQLKEDYFKKIECFDSVEISGVEDRFNASLGTYHDLLKIIKDKDFLDNEENEDILEDIVLTLTLFEDREMIEERLKTYAHLFDDKVMKQLKRRRYTGWGRLSRKLINGIRDKQSGKTILDFLKSDGFANRNFMQLIHDDSLTFKEDIQKAQVSGQGDSLHEHIANLAGSPAIKKGILQTVKVVDELVKVMGRHKPENIVIEMARENQTTQKGQKNSRERMKRIEEGIKELGSQILKEHPVENTQLQNEKLYLYYLQNGRDMYVDQELDINRLSDYDVDHIVPQSFLKDDSIDNKVLTRSDKARGKSDNVPSEEVVKKMKNYWRQLLNAKLITQRKFDNLTKAERGGLSELDKAGFIKRQLVETRQITKHVAQILDSRMNTKYDENDKLIREVKVITLKSKLVSDFRKDFQFYKVREINNYHHAHDAYLNAVVGTALIKKYPKLESEFVYGDYKVYDVRKMIAKSEQEIGKATAKYFFYSNIMNFFKTEITLANGEIRKRPLIETNGETGEIVWDKGRDFATVRKVLSMPQVNIVKKTEVQTGGFSKESILPKRNSDKLIARKKDWDPKKYGGFDSPTVAYSVLVVAKVEKGKSKKLKSVKELLGITIMERSSFEKNPIDFLEAKGYKEVKKDLIIKLPKYSLFELENGRKRMLASAGELQKGNELALPSKYVNFLYLASHYEKLKGSPEDNEQKQLFVEQHKHYLDEIIEQISEFSKRVILADANLDKVLSAYNKHRDKPIREQAENIIHLFTLTNLGAPAAFKYFDTTIDRKRYTSTKEVLDATLIHQSITGLYETRIDLSQLGGDGGGGGGSGGGGSGGGGSGGVPWLTQQPLQLTILVPLQEYQEKILSKTALPEDQKQQLKTLFVKYDNLWQHWENQVGHRKIRPHNIATGDYPPRPQKQYPINPKAKPSIQIVIDDLLKQGVLTPQNSTMNTPVYPVPKPDGRWRMVLDYREVNKTIPLTAAQNQHSAGILATIVRQKYKTTLDLANGFWAHPITPESYWLTAFTWQGKQYCWTRLPQGFLNSPALFNADVVDLLKEIPNVQVYVDDIYLSHDDPKEHVQQLEKVFQILLQAGYVVSLKKSEIGQKTVEFLGFNITKEGRGLTDTFKTKLLNITPPKDLKQLQSILGLLNFARNFIPNFAELVQPLYNLIAPAKGKYIEWSEENTKQLNMVIEALNTASNLEERLPEQRLVIKVNTSPSAGYVRYYNETGKKPIMYLNYVFSKAELKFSMLEKLLTTMHKALIKAMDLAMGQEILVYSPIVSMTKIQKTPLPERKALPIRWITWMTYLEDPRIQFHYDKTLPELKHIPDVYTSSQSPVKHPSQYEGVFYTDGSAIKSPDPTKSNNAGMGIVHATYKPEYQVLNQWSIPLGNHTAQMAEIAAVEFACKKALKIPGPVLVITDSFYVAESANKELPYWKSNGFVNNKKKPLKHISKWKSIAECLSMKPDITIQHEKGISLQIPVFILKGNALADKLATQGSYVVNAGKRTADGSEFEKRTADGSEFESPKKKAKVE

SEQ ID NO: 6133 - protein, 2222 aa, synthetic construct
MPAAKRVKLDGGDKKYSIGLDIGTNSVGWAVITDEYKVPSKKFKVLGNTDRHSIKKNLIGALLFDSGETAEATRLKRTARRRYTRRKNRICYLQEIFSNEMAKVDDSFFHRLEESFLVEEDKKHERHPIFGNIVDEVAYHEKYPTIYHLRKKLVDSTDKADLRLIYLALAHMIKFRGHFLIEGDLNPDNSDVDKLFIQLVQTYNQLFEENPINASGVDAKAILSARLSKSRRLENLIAQLPGEKKNGLFGNLIALSLGLTPNFKSNFDLAEDAKLQLSKDTYDDDLDNLLAQIGDQYADLFLAAKNLSDAILLSDILRVNTEITKAPLSASMIKRYDEHHQDLTLLKALVRQQLPEKYKEIFFDQSKNGYAGYIDGGASQEEFYKFIKPILEKMDGTEELLVKLNREDLLRKQRTFDNGSIPHQIHLGELHAILRRQEDFYPFLKDNREKIEKILTFRIPYYVGPLARGNSRFAWMTRKSEETITPWNFEEVVDKGASAQSFIERMTNFDKNLPNEKVLPKHSLLYEYFTVYNELTKVKYVTEGMRKPAFLSGEQKKAIVDLLFKTNRKVTVKQLKEDYFKKIECFDSVEISGVEDRFNASLGTYHDLLKIIKDKDFLDNEENEDILEDIVLTLTLFEDREMIEERLKTYAHLFDDKVMKQLKRRRYTGWGRLSRKLINGIRDKQSGKTILDFLKSDGFANRNFMQLIHDDSLTFKEDIQKAQVSGQGDSLHEHIANLAGSPAIKKGILQTVKVVDELVKVMGRHKPENIVIEMARENQTTQKGQKNSRERMKRIEEGIKELGSQILKEHPVENTQLQNEKLYLYYLQNGRDMYVDQELDINRLSDYDVDHIVPQSFLKDDSIDNKVLTRSDKARGKSDNVPSEEVVKKMKNYWRQLLNAKLITQRKFDNLTKAERGGLSELDKAGFIKRQLVETRQITKHVAQILDSRMNTKYDENDKLIREVKVITLKSKLVSDFRKDFQFYKVREINNYHHAHDAYLNAVVGTALIKKYPKLESEFVYGDYKVYDVRKMIAKSEQEIGKATAKYFFYSNIMNFFKTEITLANGEIRKRPLIETNGETGEIVWDKGRDFATVRKVLSMPQVNIVKKTEVQTGGFSKESILPKRNSDKLIARKKDWDPKKYGGFDSPTVAYSVLVVAKVEKGKSKKLKSVKELLGITIMERSSFEKNPIDFLEAKGYKEVKKDLIIKLPKYSLFELENGRKRMLASAGELQKGNELALPSKYVNFLYLASHYEKLKGSPEDNEQKQLFVEQHKHYLDEIIEQISEFSKRVILADANLDKVLSAYNKHRDKPIREQAENIIHLFTLTNLGAPAAFKYFDTTIDRKRYTSTKEVLDATLIHQSITGLYETRIDLSQLGGDGGGGGGSGGGGSGGGGSGGTLGDQGSRGSDPLPEPRVTLTVEGIPTEFLVNTGAEHSVLTKPMGKMGSKRTVVAGATGSKVYPWTTKRLLKIGQKQVTHSFLVIPECPAPLLGRDLLTKLKAQIQFSTEGPQVTWEDRPAMCLVLNLEEEYRLHEKPVPPSIDPSWLQLFPMVWAEKAGMGLANQVPPVVVELKSDASPVAVRQYPMSKEAREGIRPHIQRFLDLGILVPCQSPWNTPLLPVKKPGTNDYRPVQDLREVNKRVQDIHPTVPNPYNLLSSLPPSHTWYSVLDLKDAFFCLKLHPNSQPLFAFEWRDPEKGNTGQLTWTRLPQGFKNSPTLFNEALHRDLASFRALNPQVVMLQYVDDLLVAAPTYRDCKEGTRRLLQELSKLGYRVSAKKAQLCREEVTYLGYLLKGGKRWLTPARKATVMKIPTPTTPRQVREFLGKAGFCRLFIPGFASLAAPLYPLTRPKVPFTWTEAHQEAFGRIKEALLSAPALALPDLTKPFALYVDEKEGVARGVLTQTLGPWRRPVAYLSKKLDPVASGWPTCLKAIAAVALLLKDADKLTLGQNVLVIAPHNLESIVRQPPDRWMTNARMTHYQSLLLNERVSFAPPAILNPATLLPVESDDTPIHICSEILAEETGTRPDLRDQPLPGVPAWYTDGSSFIMDGRRQAGAAIVDNKRTVWASNLPEGTSAQKAELIALTQALRLAEGKSINIYTDSRYAFATAHVHGAIYKQRGWLTSAGKDIKNKEEILALLEAIHLPKRVAIIHCPGHQRGTDPVATGNRKADEAAKQAAQSTRILTETTKNAGKRTADGSEFEKRTADGSEFESPKKKAKVE

SEQ ID NO: 6134 - protein, 2100 aa, synthetic construct
MPAAKRVKLDGGDKKYSIGLDIGTNSVGWAVITDEYKVPSKKFKVLGNTDRHSIKKNLIGALLFDSGETAEATRLKRTARRRYTRRKNRICYLQEIFSNEMAKVDDSFFHRLEESFLVEEDKKHERHPIFGNIVDEVAYHEKYPTIYHLRKKLVDSTDKADLRLIYLALAHMIKFRGHFLIEGDLNPDNSDVDKLFIQLVQTYNQLFEENPINASGVDAKAILSARLSKSRRLENLIAQLPGEKKNGLFGNLIALSLGLTPNFKSNFDLAEDAKLQLSKDTYDDDLDNLLAQIGDQYADLFLAAKNLSDAILLSDILRVNTEITKAPLSASMIKRYDEHHQDLTLLKALVRQQLPEKYKEIFFDQSKNGYAGYIDGGASQEEFYKFIKPILEKMDGTEELLVKLNREDLLRKQRTFDNGSIPHQIHLGELHAILRRQEDFYPFLKDNREKIEKILTFRIPYYVGPLARGNSRFAWMTRKSEETITPWNFEEVVDKGASAQSFIERMTNFDKNLPNEKVLPKHSLLYEYFTVYNELTKVKYVTEGMRKPAFLSGEQKKAIVDLLFKTNRKVTVKQLKEDYFKKIECFDSVEISGVEDRFNASLGTYHDLLKIIKDKDFLDNEENEDILEDIVLTLTLFEDREMIEERLKTYAHLFDDKVMKQLKRRRYTGWGRLSRKLINGIRDKQSGKTILDFLKSDGFANRNFMQLIHDDSLTFKEDIQKAQVSGQGDSLHEHIANLAGSPAIKKGILQTVKVVDELVKVMGRHKPENIVIEMARENQTTQKGQKNSRERMKRIEEGIKELGSQILKEHPVENTQLQNEKLYLYYLQNGRDMYVDQELDINRLSDYDVDHIVPQSFLKDDSIDNKVLTRSDKARGKSDNVPSEEVVKKMKNYWRQLLNAKLITQRKFDNLTKAERGGLSELDKAGFIKRQLVETRQITKHVAQILDSRMNTKYDENDKLIREVKVITLKSKLVSDFRKDFQFYKVREINNYHHAHDAYLNAVVGTALIKKYPKLESEFVYGDYKVYDVRKMIAKSEQEIGKATAKYFFYSNIMNFFKTEITLANGEIRKRPLIETNGETGEIVWDKGRDFATVRKVLSMPQVNIVKKTEVQTGGFSKESILPKRNSDKLIARKKDWDPKKYGGFDSPTVAYSVLVVAKVEKGKSKKLKSVKELLGITIMERSSFEKNPIDFLEAKGYKEVKKDLIIKLPKYSLFELENGRKRMLASAGELQKGNELALPSKYVNFLYLASHYEKLKGSPEDNEQKQLFVEQHKHYLDEIIEQISEFSKRVILADANLDKVLSAYNKHRDKPIREQAENIIHLFTLTNLGAPAAFKYFDTTIDRKRYTSTKEVLDATLIHQSITGLYETRIDLSQLGGDGGGGGGSGGGGSGGGGSGGTLNLEDEYRLYETSAEPEVSPGSTWLSDFPQAWAETGGMGLAVRQAPLIIPLKATSTPVSIKQYPMSQEAKLGIKPHIQRLLDQGILVPCQSPWNTPLLPVKKPGTNDYRPVQDLREVNKRVEDIHPTVPNPYNLLSGLPPSHRWYTVLDLKDAFFCLRLHPTSQPLFAFEWRDPGMGISGQLTWTRLPQGFKNSPTLFNEALHRDLADFRIQHPDLILLQYVDDILLAATSELDCQQGTRALLLTLGNLGYRASAKKAQLCQKQVKYLGYLLKEGQRWLTEARKETVMGQPTPKTPRQLREFLGTAGFCRLWIPGFAEMAAPLYPLTKPGTLFNWGPDQQKAYQEIKQALLTAPALGLPDLTKPFELFVDEKQGYAKGVLTQKLGPWRRPVAYLSKKLDPVAAGWPPCLRMVAAIAVLRKDAGKLTMGQPLVILAPHAVEALVKQPPDRWLSNARMTHYQAMLLDTDRVQFGPVVALNPATLLPLPEEGAPHDCLEILAETHGTRPDLTDQPIPDADHTWYTDGSSFLQEGQRKAGAAVTTETEVIWARALPAGTSAQRAELIALTQALKMAEGKRLNVYTDSRYAFATAHIHGEIYRRRGWLTSEGREIKNKSEILALLKALFLPKRLSIIHCLGHQKGDSAEARGNRLADQAAREAAIKTPPDTSTLLAGKRTADGSEFEKRTADGSEFESPKKKAKVE

SEQ ID NO: 6135 - protein, 2100 aa, synthetic construct
MPAAKRVKLDGGDKKYSIGLDIGTNSVGWAVITDEYKVPSKKFKVLGNTDRHSIKKNLIGALLFDSGETAEATRLKRTARRRYTRRKNRICYLQEIFSNEMAKVDDSFFHRLEESFLVEEDKKHERHPIFGNIVDEVAYHEKYPTIYHLRKKLVDSTDKADLRLIYLALAHMIKFRGHFLIEGDLNPDNSDVDKLFIQLVQTYNQLFEENPINASGVDAKAILSARLSKSRRLENLIAQLPGEKKNGLFGNLIALSLGLTPNFKSNFDLAEDAKLQLSKDTYDDDLDNLLAQIGDQYADLFLAAKNLSDAILLSDILRVNTEITKAPLSASMIKRYDEHHQDLTLLKALVRQQLPEKYKEIFFDQSKNGYAGYIDGGASQEEFYKFIKPILEKMDGTEELLVKLNREDLLRKQRTFDNGSIPHQIHLGELHAILRRQEDFYPFLKDNREKIEKILTFRIPYYVGPLARGNSRFAWMTRKSEETITPWNFEEVVDKGASAQSFIERMTNFDKNLPNEKVLPKHSLLYEYFTVYNELTKVKYVTEGMRKPAFLSGEQKKAIVDLLFKTNRKVTVKQLKEDYFKKIECFDSVEISGVEDRFNASLGTYHDLLKIIKDKDFLDNEENEDILEDIVLTLTLFEDREMIEERLKTYAHLFDDKVMKQLKRRRYTGWGRLSRKLINGIRDKQSGKTILDFLKSDGFANRNFMQLIHDDSLTFKEDIQKAQVSGQGDSLHEHIANLAGSPAIKKGILQTVKVVDELVKVMGRHKPENIVIEMARENQTTQKGQKNSRERMKRIEEGIKELGSQILKEHPVENTQLQNEKLYLYYLQNGRDMYVDQELDINRLSDYDVDHIVPQSFLKDDSIDNKVLTRSDKARGKSDNVPSEEVVKKMKNYWRQLLNAKLITQRKFDNLTKAERGGLSELDKAGFIKRQLVETRQITKHVAQILDSRMNTKYDENDKLIREVKVITLKSKLVSDFRKDFQFYKVREINNYHHAHDAYLNAVVGTALIKKYPKLESEFVYGDYKVYDVRKMIAKSEQEIGKATAKYFFYSNIMNFFKTEITLANGEIRKRPLIETNGETGEIVWDKGRDFATVRKVLSMPQVNIVKKTEVQTGGFSKESILPKRNSDKLIARKKDWDPKKYGGFDSPTVAYSVLVVAKVEKGKSKKLKSVKELLGITIMERSSFEKNPIDFLEAKGYKEVKKDLIIKLPKYSLFELENGRKRMLASAGELQKGNELALPSKYVNFLYLASHYEKLKGSPEDNEQKQLFVEQHKHYLDEIIEQISEFSKRVILADANLDKVLSAYNKHRDKPIREQAENIIHLFTLTNLGAPAAFKYFDTTIDRKRYTSTKEVLDATLIHQSITGLYETRIDLSQLGGDGGGGGGSGGGGSGGGGSGGTLNIEDEYRLHETSKEPDVSLGSTWLSDFPQAWAETGGMGLAVRQAPLIIPLKATSTPVSIKQYPMSQEARLGIKPHIQRLLDQGILVPCQSPWNTPLLPVKKPGTNDYRPVQDLREVNKRVEDIHPTVPNPYNLLSGLPPSHQWYTVLDLKDAFFCLRLHPTSQPLFAFEWRDPEMGISGQLTWTRLPQGFKNSPTLFDEALHRDLAGFRIQHPDLILLQYVDDLLLAATSELDCQQGTRALLQTLGDLGYRASAKKAQICQKQVKYLGYLLKEGQRWLTEARKETVMGQPIPKTPRQLREFLGTAGFCRLWIPGFAEMAAPLYPLTKTGTLFNWGPDQQKAFQEIKQALLTAPALGLPDLTKPFELFVDEKQGYAKGVLTQKLGPWRRPVAYLSKKLDPVAAGWPPCLRMVAAIAVLTKDAGKLTMGQPLVILAPHAVEALVKQPPDRWLSNARMTHYQALLLDTDRVQFGPVVALNPATLLPLPEEGLQHDCLDILAEAHGTRSDLMDQPLPDADHTWYTDGSSFLQEGQRKAGAAVTTETEVIWARALPAGTSAQRAELIALTQALKMAEGKKLNVYTDSRYAFATAHIHGEIYRRRGLLTSEGKEIKNKDEILALLKALFLPKRLSIIHCPGHQKGNSAEARGNRMADQAAREVATRETPETSTLLAGKRTADGSEFEKRTADGSEFESPKKKAKVE

SEQ ID NO: 6136 - protein, 2100 aa, synthetic construct
MPAAKRVKLDGGDKKYSIGLDIGTNSVGWAVITDEYKVPSKKFKVLGNTDRHSIKKNLIGALLFDSGETAEATRLKRTARRRYTRRKNRICYLQEIFSNEMAKVDDSFFHRLEESFLVEEDKKHERHPIFGNIVDEVAYHEKYPTIYHLRKKLVDSTDKADLRLIYLALAHMIKFRGHFLIEGDLNPDNSDVDKLFIQLVQTYNQLFEENPINASGVDAKAILSARLSKSRRLENLIAQLPGEKKNGLFGNLIALSLGLTPNFKSNFDLAEDAKLQLSKDTYDDDLDNLLAQIGDQYADLFLAAKNLSDAILLSDILRVNTEITKAPLSASMIKRYDEHHQDLTLLKALVRQQLPEKYKEIFFDQSKNGYAGYIDGGASQEEFYKFIKPILEKMDGTEELLVKLNREDLLRKQRTFDNGSIPHQIHLGELHAILRRQEDFYPFLKDNREKIEKILTFRIPYYVGPLARGNSRFAWMTRKSEETITPWNFEEVVDKGASAQSFIERMTNFDKNLPNEKVLPKHSLLYEYFTVYNELTKVKYVTEGMRKPAFLSGEQKKAIVDLLFKTNRKVTVKQLKEDYFKKIECFDSVEISGVEDRFNASLGTYHDLLKIIKDKDFLDNEENEDILEDIVLTLTLFEDREMIEERLKTYAHLFDDKVMKQLKRRRYTGWGRLSRKLINGIRDKQSGKTILDFLKSDGFANRNFMQLIHDDSLTFKEDIQKAQVSGQGDSLHEHIANLAGSPAIKKGILQTVKVVDELVKVMGRHKPENIVIEMARENQTTQKGQKNSRERMKRIEEGIKELGSQILKEHPVENTQLQNEKLYLYYLQNGRDMYVDQELDINRLSDYDVDHIVPQSFLKDDSIDNKVLTRSDKARGKSDNVPSEEVVKKMKNYWRQLLNAKLITQRKFDNLTKAERGGLSELDKAGFIKRQLVETRQITKHVAQILDSRMNTKYDENDKLIREVKVITLKSKLVSDFRKDFQFYKVREINNYHHAHDAYLNAVVGTALIKKYPKLESEFVYGDYKVYDVRKMIAKSEQEIGKATAKYFFYSNIMNFFKTEITLANGEIRKRPLIETNGETGEIVWDKGRDFATVRKVLSMPQVNIVKKTEVQTGGFSKESILPKRNSDKLIARKKDWDPKKYGGFDSPTVAYSVLVVAKVEKGKSKKLKSVKELLGITIMERSSFEKNPIDFLEAKGYKEVKKDLIIKLPKYSLFELENGRKRMLASAGELQKGNELALPSKYVNFLYLASHYEKLKGSPEDNEQKQLFVEQHKHYLDEIIEQISEFSKRVILADANLDKVLSAYNKHRDKPIREQAENIIHLFTLTNLGAPAAFKYFDTTIDRKRYTSTKEVLDATLIHQSITGLYETRIDLSQLGGDGGGGGGSGGGGSGGGGSGGTLNIEDEHRLHETSKEPDVSLGSTWLSDFPQAWAETGGMGLAVRQAPLIIPLKATSTPVSIKQYPMSQEARLGIKPHIQRLLDQGILVPCQSPWNTPLLPVKKPGTNDYRPVQDLREVNKRVEDIHPTVPNPYNLLSGLPPSHQWYTVLDLKDAFFCLRLHPTSQPLFAFEWRDPEMGISGQLTWTRLPQGFKNSPTLFDEALHRDLADFRIQHPDLILLQYVDDLLLAATSELDCQQGTRALLQTLGNLGYRASAKKAQICQKQVKYLGYLLKEGQRWLTEARKETVMGQPTPKTPRQLREFLGTAGFCRLWIPGFAEMAAPLYPLTKTGTLFNWGPDQQKAYQEIKQALLTAPALGLPDLTKPFELFVDEKQGYAKGVLTQKLGPWRRPVAYLSKKLDPVAAGWPPCLRMVAAIAVLTKDAGKLTMGQPLVILAPHAVEALVKQPPDRWLSNARMTHYQALLLDTDRVQFGPVVALNPATLLPLPEEGLQHNCLDILAEAHGTRPDLTDQPLPDADHTWYTDGSSLLQEGQRKAGAAVTTETEVIWAKALPAGTSAQRAELIALTQALKMAEGKKLNVYTDSRYAFATAHIHGEIYRRRGLLTSEGKEIKNKDEILALLKALFLPKRLSIIHCPGHQKGHSAEARGNRMADQAARKAAITETPDTSTLLAGKRTADGSEFEKRTADGSEFESPKKKAKVE

SEQ ID NO: 6137 - protein, 2180 aa, synthetic construct
MPAAKRVKLDGGDKKYSIGLDIGTNSVGWAVITDEYKVPSKKFKVLGNTDRHSIKKNLIGALLFDSGETAEATRLKRTARRRYTRRKNRICYLQEIFSNEMAKVDDSFFHRLEESFLVEEDKKHERHPIFGNIVDEVAYHEKYPTIYHLRKKLVDSTDKADLRLIYLALAHMIKFRGHFLIEGDLNPDNSDVDKLFIQLVQTYNQLFEENPINASGVDAKAILSARLSKSRRLENLIAQLPGEKKNGLFGNLIALSLGLTPNFKSNFDLAEDAKLQLSKDTYDDDLDNLLAQIGDQYADLFLAAKNLSDAILLSDILRVNTEITKAPLSASMIKRYDEHHQDLTLLKALVRQQLPEKYKEIFFDQSKNGYAGYIDGGASQEEFYKFIKPILEKMDGTEELLVKLNREDLLRKQRTFDNGSIPHQIHLGELHAILRRQEDFYPFLKDNREKIEKILTFRIPYYVGPLARGNSRFAWMTRKSEETITPWNFEEVVDKGASAQSFIERMTNFDKNLPNEKVLPKHSLLYEYFTVYNELTKVKYVTEGMRKPAFLSGEQKKAIVDLLFKTNRKVTVKQLKEDYFKKIECFDSVEISGVEDRFNASLGTYHDLLKIIKDKDFLDNEENEDILEDIVLTLTLFEDREMIEERLKTYAHLFDDKVMKQLKRRRYTGWGRLSRKLINGIRDKQSGKTILDFLKSDGFANRNFMQLIHDDSLTFKEDIQKAQVSGQGDSLHEHIANLAGSPAIKKGILQTVKVVDELVKVMGRHKPENIVIEMARENQTTQKGQKNSRERMKRIEEGIKELGSQILKEHPVENTQLQNEKLYLYYLQNGRDMYVDQELDINRLSDYDVDHIVPQSFLKDDSIDNKVLTRSDKARGKSDNVPSEEVVKKMKNYWRQLLNAKLITQRKFDNLTKAERGGLSELDKAGFIKRQLVETRQITKHVAQILDSRMNTKYDENDKLIREVKVITLKSKLVSDFRKDFQFYKVREINNYHHAHDAYLNAVVGTALIKKYPKLESEFVYGDYKVYDVRKMIAKSEQEIGKATAKYFFYSNIMNFFKTEITLANGEIRKRPLIETNGETGEIVWDKGRDFATVRKVLSMPQVNIVKKTEVQTGGFSKESILPKRNSDKLIARKKDWDPKKYGGFDSPTVAYSVLVVAKVEKGKSKKLKSVKELLGITIMERSSFEKNPIDFLEAKGYKEVKKDLIIKLPKYSLFELENGRKRMLASAGELQKGNELALPSKYVNFLYLASHYEKLKGSPEDNEQKQLFVEQHKHYLDEIIEQISEFSKRVILADANLDKVLSAYNKHRDKPIREQAENIIHLFTLTNLGAPAAFKYFDTTIDRKRYTSTKEVLDATLIHQSITGLYETRIDLSQLGGDGGGGGGSGGGGSGGGGSGGMDPLQLLQPLEAEIKGTKLKAHWNSGATITCVPEAFLEDERPIQTMLIKTIHGEKQQDVYYLTFKVQGRKVEAEVLASPYDYILLNPSDVPWLMKKPLQLTVLVPLHEYQERLLQQTALPKEQKELLQKLFLKYDALWQHWENQVGHRRIKPHNIATGTLAPRPQKQYPINPKAKPSIQIVIDDLLKQGVLIQQNSTMNTPVYPVPKPDGKWRMVLDYREVNKTIPLIAAQNQHSAGILSSIYRGKYKTTLDLTNGFWAHPITPESYWLTAFTWQGKQYCWTRLPQGFLNSPALFNADVVDLLKEIPNVQAYVDDIYISHDDPQEHLEQLEKIFSILLNAGYVVSLKKSEIAQREVEFLGFNITKEGRGLTDTFKQKLLNITPPKDLKQLQSILGLLNFARNFIPNYSELVKPLYTIVAPANGKFISWTEDNSNQLQHIISVLNQADNLEERNPETRLIIKVNSSPSAGYIRYYNEGSKRPIMYVNYIFSKAEAKFTQTEKLLTTMHKGLIKAMDLAMGQEILVYSPIVSMTKIQRTPLPERKALPVRWITWMTYLEDPRIQFHYDKSLPELQQIPNVTEDVIAKTKHPSEFAMVFYTDGSAIKHPDVNKSHSAGMGIAQVQFIPEYKIVHQWSIPLGDHTAQLAEIAAVEFACKKALKISGPVLIVTDSFYVAESANKELPYWKSNGFLNNKKKPLRHVSKWKSIAECLQLKPDIIIMHEKGHQQPMTTLHTEGNNLADKLATQGSYVVHAGKRTADGSEFEKRTADGSEFESPKKKAKVE

SEQ ID NO: 6138 - protein, 2091 aa, synthetic construct
MPAAKRVKLDGGDKKYSIGLDIGTNSVGWAVITDEYKVPSKKFKVLGNTDRHSIKKNLIGALLFDSGETAEATRLKRTARRRYTRRKNRICYLQEIFSNEMAKVDDSFFHRLEESFLVEEDKKHERHPIFGNIVDEVAYHEKYPTIYHLRKKLVDSTDKADLRLIYLALAHMIKFRGHFLIEGDLNPDNSDVDKLFIQLVQTYNQLFEENPINASGVDAKAILSARLSKSRRLENLIAQLPGEKKNGLFGNLIALSLGLTPNFKSNFDLAEDAKLQLSKDTYDDDLDNLLAQIGDQYADLFLAAKNLSDAILLSDILRVNTEITKAPLSASMIKRYDEHHQDLTLLKALVRQQLPEKYKEIFFDQSKNGYAGYIDGGASQEEFYKFIKPILEKMDGTEELLVKLNREDLLRKQRTFDNGSIPHQIHLGELHAILRRQEDFYPFLKDNREKIEKILTFRIPYYVGPLARGNSRFAWMTRKSEETITPWNFEEVVDKGASAQSFIERMTNFDKNLPNEKVLPKHSLLYEYFTVYNELTKVKYVTEGMRKPAFLSGEQKKAIVDLLFKTNRKVTVKQLKEDYFKKIECFDSVEISGVEDRFNASLGTYHDLLKIIKDKDFLDNEENEDILEDIVLTLTLFEDREMIEERLKTYAHLFDDKVMKQLKRRRYTGWGRLSRKLINGIRDKQSGKTILDFLKSDGFANRNFMQLIHDDSLTFKEDIQKAQVSGQGDSLHEHIANLAGSPAIKKGILQTVKVVDELVKVMGRHKPENIVIEMARENQTTQKGQKNSRERMKRIEEGIKELGSQILKEHPVENTQLQNEKLYLYYLQNGRDMYVDQELDINRLSDYDVDHIVPQSFLKDDSIDNKVLTRSDKARGKSDNVPSEEVVKKMKNYWRQLLNAKLITQRKFDNLTKAERGGLSELDKAGFIKRQLVETRQITKHVAQILDSRMNTKYDENDKLIREVKVITLKSKLVSDFRKDFQFYKVREINNYHHAHDAYLNAVVGTALIKKYPKLESEFVYGDYKVYDVRKMIAKSEQEIGKATAKYFFYSNIMNFFKTEITLANGEIRKRPLIETNGETGEIVWDKGRDFATVRKVLSMPQVNIVKKTEVQTGGFSKESILPKRNSDKLIARKKDWDPKKYGGFDSPTVAYSVLVVAKVEKGKSKKLKSVKELLGITIMERSSFEKNPIDFLEAKGYKEVKKDLIIKLPKYSLFELENGRKRMLASAGELQKGNELALPSKYVNFLYLASHYEKLKGSPEDNEQKQLFVEQHKHYLDEIIEQISEFSKRVILADANLDKVLSAYNKHRDKPIREQAENIIHLFTLTNLGAPAAFKYFDTTIDRKRYTSTKEVLDATLIHQSITGLYETRIDLSQLGGDGGGGGGSGGGGSGGGGSGGIPWLMKKPLQLTTLVPLQEYEERLLKQTMLTGSYKEKLQSLFLKYDALWQHWENQVGHRRIKPHHIATGTVNPRPQKQYPINPKAKASIQTVINDLLKQGVLIQQNSIMNTPVYPVPKPDGKWRMVLDYREVNKTIPLIAAQNQHSAGILSSIFRGKYKTTLDLSNGFWAHSITPESYWLTAFTWLGQQYCWTRLPQGFLNSPALFNADVVDLLKEVPNVQVYVDDIYISHDDPREHLEQLEKVFSLLLNAGYVVSLKKSEIAQHEVEFLGFNITKEGRGLTETFKQKLLNITPPRDLKQLQSILGLLNFARNFIPNFSELVKPLYNIIATAPGKYITWTTDNSQQLQNIISMLNSAENLEERNPEVRLIMKVNTSPSAGYIRFYNEFAKRPIMYLNYVYTKAEVKFTNTEKLLTTIHKGLIKALDLGMGQEILVYSPIVSMTKIQKTPLPERKALPIRWITWMSYLEDPRIQFHYDKTLPELQQVPTVTDDIIAKIKHPSEFSMVFYTDGSAIKHPNVNKSHNAGMGIAQVQFKPEFTVINTWSIPLGDHTAQLAEVAAVEFACKKALKIDGPVLIVTDSFYVAESVNKELPYWQSNGFFNNKKKPLKHVSKWKSIADCIQLKPDIIIIHEKGHQPTASTFHTEGNNLADKLATQGSYVVNAGKRTADGSEFEKRTADGSEFESPKKKAKVE

SEQ ID NO: 6139 - protein, 2091 aa, synthetic construct
MPAAKRVKLDGGDKKYSIGLDIGTNSVGWAVITDEYKVPSKKFKVLGNTDRHSIKKNLIGALLFDSGETAEATRLKRTARRRYTRRKNRICYLQEIFSNEMAKVDDSFFHRLEESFLVEEDKKHERHPIFGNIVDEVAYHEKYPTIYHLRKKLVDSTDKADLRLIYLALAHMIKFRGHFLIEGDLNPDNSDVDKLFIQLVQTYNQLFEENPINASGVDAKAILSARLSKSRRLENLIAQLPGEKKNGLFGNLIALSLGLTPNFKSNFDLAEDAKLQLSKDTYDDDLDNLLAQIGDQYADLFLAAKNLSDAILLSDILRVNTEITKAPLSASMIKRYDEHHQDLTLLKALVRQQLPEKYKEIFFDQSKNGYAGYIDGGASQEEFYKFIKPILEKMDGTEELLVKLNREDLLRKQRTFDNGSIPHQIHLGELHAILRRQEDFYPFLKDNREKIEKILTFRIPYYVGPLARGNSRFAWMTRKSEETITPWNFEEVVDKGASAQSFIERMTNFDKNLPNEKVLPKHSLLYEYFTVYNELTKVKYVTEGMRKPAFLSGEQKKAIVDLLFKTNRKVTVKQLKEDYFKKIECFDSVEISGVEDRFNASLGTYHDLLKIIKDKDFLDNEENEDILEDIVLTLTLFEDREMIEERLKTYAHLFDDKVMKQLKRRRYTGWGRLSRKLINGIRDKQSGKTILDFLKSDGFANRNFMQLIHDDSLTFKEDIQKAQVSGQGDSLHEHIANLAGSPAIKKGILQTVKVVDELVKVMGRHKPENIVIEMARENQTTQKGQKNSRERMKRIEEGIKELGSQILKEHPVENTQLQNEKLYLYYLQNGRDMYVDQELDINRLSDYDVDHIVPQSFLKDDSIDNKVLTRSDKARGKSDNVPSEEVVKKMKNYWRQLLNAKLITQRKFDNLTKAERGGLSELDKAGFIKRQLVETRQITKHVAQILDSRMNTKYDENDKLIREVKVITLKSKLVSDFRKDFQFYKVREINNYHHAHDAYLNAVVGTALIKKYPKLESEFVYGDYKVYDVRKMIAKSEQEIGKATAKYFFYSNIMNFFKTEITLANGEIRKRPLIETNGETGEIVWDKGRDFATVRKVLSMPQVNIVKKTEVQTGGFSKESILPKRNSDKLIARKKDWDPKKYGGFDSPTVAYSVLVVAKVEKGKSKKLKSVKELLGITIMERSSFEKNPIDFLEAKGYKEVKKDLIIKLPKYSLFELENGRKRMLASAGELQKGNELALPSKYVNFLYLASHYEKLKGSPEDNEQKQLFVEQHKHYLDEIIEQISEFSKRVILADANLDKVLSAYNKHRDKPIREQAENIIHLFTLTNLGAPAAFKYFDTTIDRKRYTSTKEVLDATLIHQSITGLYETRIDLSQLGGDGGGGGGSGGGGSGGGGSGGIPWLMKKPLQLTTLVPLQEYEERLLKQTMLTGSYKEKLQSLFLKYDALWQHWENQVGHRRIKPHHIATGTVNPRPQKQYPINPKAKASIQTVINDLLKQGVLIQQNSIMNTPVYPVPKPDGKWRMVLDYREVNKTIPLIAAQNQHSAGILSSIFRGKYKTTLDLSNGFWAHSITPESYWLTAFTWLGQQYCWTRLPQGFLNSPALFNADVVDLLKEVPNVQVYVDDIYISHDDPREHLEQLEKVFSLLLNAGYVVSLKKSEIAQHEVEFLGFNITKEGRGLTETFKQKLLNITPPRDLKQLQSILGKLNFARNFIPNFSELVKPLYNIIATAPGKYITWTTDNSQQLQNIISMLNSAENLEERNPEVRLIMKVNTSPSAGYIRFYNEFAKRPIMYLNYVYTKAEVKFTNTEKLLTTIHKGLIKALDLGMGQEILVYSPIVSMTKIQKTPLPERKALPIRWITWMSYLEDPRIQFHYDKTLPELQQVPTVTDDIIAKIKHPSEFSMVFYTDGSAIKHPNVNKSHNAGMGIAQVQFKPEFTVINTWSIPLGDHTAQLAEVAAVEFACKKALKIDGPVLIVTDSFYVAESVNKELPYWQSNGFFNNKKKPLKHVSKWKSIADCIQLKPDIIIIHEKGHQPTASTFHTEGNNLADKLATQGSYVVNAGKRTADGSEFEKRTADGSEFESPKKKAKVE

SEQ ID NO: 6140 - protein, 2098 aa, synthetic construct
MPAAKRVKLDGGDKKYSIGLDIGTNSVGWAVITDEYKVPSKKFKVLGNTDRHSIKKNLIGALLFDSGETAEATRLKRTARRRYTRRKNRICYLQEIFSNEMAKVDDSFFHRLEESFLVEEDKKHERHPIFGNIVDEVAYHEKYPTIYHLRKKLVDSTDKADLRLIYLALAHMIKFRGHFLIEGDLNPDNSDVDKLFIQLVQTYNQLFEENPINASGVDAKAILSARLSKSRRLENLIAQLPGEKKNGLFGNLIALSLGLTPNFKSNFDLAEDAKLQLSKDTYDDDLDNLLAQIGDQYADLFLAAKNLSDAILLSDILRVNTEITKAPLSASMIKRYDEHHQDLTLLKALVRQQLPEKYKEIFFDQSKNGYAGYIDGGASQEEFYKFIKPILEKMDGTEELLVKLNREDLLRKQRTFDNGSIPHQIHLGELHAILRRQEDFYPFLKDNREKIEKILTFRIPYYVGPLARGNSRFAWMTRKSEETITPWNFEEVVDKGASAQSFIERMTNFDKNLPNEKVLPKHSLLYEYFTVYNELTKVKYVTEGMRKPAFLSGEQKKAIVDLLFKTNRKVTVKQLKEDYFKKIECFDSVEISGVEDRFNASLGTYHDLLKIIKDKDFLDNEENEDILEDIVLTLTLFEDREMIEERLKTYAHLFDDKVMKQLKRRRYTGWGRLSRKLINGIRDKQSGKTILDFLKSDGFANRNFMQLIHDDSLTFKEDIQKAQVSGQGDSLHEHIANLAGSPAIKKGILQTVKVVDELVKVMGRHKPENIVIEMARENQTTQKGQKNSRERMKRIEEGIKELGSQILKEHPVENTQLQNEKLYLYYLQNGRDMYVDQELDINRLSDYDVDHIVPQSFLKDDSIDNKVLTRSDKARGKSDNVPSEEVVKKMKNYWRQLLNAKLITQRKFDNLTKAERGGLSELDKAGFIKRQLVETRQITKHVAQILDSRMNTKYDENDKLIREVKVITLKSKLVSDFRKDFQFYKVREINNYHHAHDAYLNAVVGTALIKKYPKLESEFVYGDYKVYDVRKMIAKSEQEIGKATAKYFFYSNIMNFFKTEITLANGEIRKRPLIETNGETGEIVWDKGRDFATVRKVLSMPQVNIVKKTEVQTGGFSKESILPKRNSDKLIARKKDWDPKKYGGFDSPTVAYSVLVVAKVEKGKSKKLKSVKELLGITIMERSSFEKNPIDFLEAKGYKEVKKDLIIKLPKYSLFELENGRKRMLASAGELQKGNELALPSKYVNFLYLASHYEKLKGSPEDNEQKQLFVEQHKHYLDEIIEQISEFSKRVILADANLDKVLSAYNKHRDKPIREQAENIIHLFTLTNLGAPAAFKYFDTTIDRKRYTSTKEVLDATLIHQSITGLYETRIDLSQLGGDGGGGGGSGGGGSGGGGSGGVLNLEEEYRLHEKPVPSSIDPSWLQLFPTVWAERAGMGLANQVPPVVVELRSGASPVAVRQYPMSKEAREGIRPHIQRFLDLGVLVPCQSPWNTPLLPVKKPGTNDYRPVQDLREINKRVQDIHPTVPNPYNLLSSLPPSHTWYSVLDLKDAFFCLKLHPNSQPLFAFEWRDPEKGNTGQLTWTRLPQGFKNSPTLFNEALHRDLAPFRALNPQVVLLQYVDDLLVAAPTYRDCKEGTQKLLQELSKLGYRVSAKKAQLCQKEVTYLGYLLKEGKRWLTPARKATVMKIPPPTTPRQVREFLGTAGFCRLWIPGFASLAAPLYPLTKPSIPFIWTEEHQKAFDRIKEALLSAPALALPDLTKPFTLYVDERAGVARGVLTQTLGPWRRPVAYLSKKLDPVASGWPTCLKAVAAVALLLKDADKLTLGQNVTVIASHSLESIVRQPPDRWMTNARMTHYQSLLLNERVSFAPPAVLNPATLLPVESEATPVHRCSEILAEETGTRRDLKDQPLPGVPAWYTDGSSFIAEGKRRAGAAIVDGKRTVWASSLPEGTSAQKAELVALTQALRLAEGKDINIYTDSRYAFATAHIHGAIYKQRGWLTSAGKDIKNKEEILALLEAIHLPKRVAIIHCPGHQKGNDPVATGNRRADEAAKQAALSTRVLAETTKPAGKRTADGSEFEKRTADGSEFESPKKKAKVE

SEQ ID NO: 6141 - protein, 2098 aa, synthetic construct
MPAAKRVKLDGGDKKYSIGLDIGTNSVGWAVITDEYKVPSKKFKVLGNTDRHSIKKNLIGALLFDSGETAEATRLKRTARRRYTRRKNRICYLQEIFSNEMAKVDDSFFHRLEESFLVEEDKKHERHPIFGNIVDEVAYHEKYPTIYHLRKKLVDSTDKADLRLIYLALAHMIKFRGHFLIEGDLNPDNSDVDKLFIQLVQTYNQLFEENPINASGVDAKAILSARLSKSRRLENLIAQLPGEKKNGLFGNLIALSLGLTPNFKSNFDLAEDAKLQLSKDTYDDDLDNLLAQIGDQYADLFLAAKNLSDAILLSDILRVNTEITKAPLSASMIKRYDEHHQDLTLLKALVRQQLPEKYKEIFFDQSKNGYAGYIDGGASQEEFYKFIKPILEKMDGTEELLVKLNREDLLRKQRTFDNGSIPHQIHLGELHAILRRQEDFYPFLKDNREKIEKILTFRIPYYVGPLARGNSRFAWMTRKSEETITPWNFEEVVDKGASAQSFIERMTNFDKNLPNEKVLPKHSLLYEYFTVYNELTKVKYVTEGMRKPAFLSGEQKKAIVDLLFKTNRKVTVKQLKEDYFKKIECFDSVEISGVEDRFNASLGTYHDLLKIIKDKDFLDNEENEDILEDIVLTLTLFEDREMIEERLKTYAHLFDDKVMKQLKRRRYTGWGRLSRKLINGIRDKQSGKTILDFLKSDGFANRNFMQLIHDDSLTFKEDIQKAQVSGQGDSLHEHIANLAGSPAIKKGILQTVKVVDELVKVMGRHKPENIVIEMARENQTTQKGQKNSRERMKRIEEGIKELGSQILKEHPVENTQLQNEKLYLYYLQNGRDMYVDQELDINRLSDYDVDHIVPQSFLKDDSIDNKVLTRSDKARGKSDNVPSEEVVKKMKNYWRQLLNAKLITQRKFDNLTKAERGGLSELDKAGFIKRQLVETRQITKHVAQILDSRMNTKYDENDKLIREVKVITLKSKLVSDFRKDFQFYKVREINNYHHAHDAYLNAVVGTALIKKYPKLESEFVYGDYKVYDVRKMIAKSEQEIGKATAKYFFYSNIMNFFKTEITLANGEIRKRPLIETNGETGEIVWDKGRDFATVRKVLSMPQVNIVKKTEVQTGGFSKESILPKRNSDKLIARKKDWDPKKYGGFDSPTVAYSVLVVAKVEKGKSKKLKSVKELLGITIMERSSFEKNPIDFLEAKGYKEVKKDLIIKLPKYSLFELENGRKRMLASAGELQKGNELALPSKYVNFLYLASHYEKLKGSPEDNEQKQLFVEQHKHYLDEIIEQISEFSKRVILADANLDKVLSAYNKHRDKPIREQAENIIHLFTLTNLGAPAAFKYFDTTIDRKRYTSTKEVLDATLIHQSITGLYETRIDLSQLGGDGGGGGGSGGGGSGGGGSGGVLNLEEEYRLHEKPVPSSIDPSWLQLFPTVWAERAGMGLANQVPPVVVELRSGASPVAVRQYPMSKEAREGIRPHIQRFLDLGVLVPCQSPWNTPLLPVKKPGTNDYRPVQDLREINKRVQDIHPTVPNPYNLLSSLPPSHTWYSVLDLKDAFFCLKLHPNSQPLFAFEWRDPEKGNTGQLTWTRLPQGFKNSPTLFNEALHRDLAPFRALNPQVVLLQYVDDLLVAAPTYRDCKEGTQKLLQELSKLGYRVSAKKAQLCQKEVTYLGYLLKEGKRWLTPARKATVMKIPPPTTPRQVREFLGKAGFCRLFIPGFASLAAPLYPLTKPSIPFIWTEEHQKAFDRIKEALLSAPALALPDLTKPFTLYVDERAGVARGVLTQTLGPWRRPVAYLSKKLDPVASGWPTCLKAVAAVALLLKDADKLTLGQNVTVIASHSLESIVRQPPDRWMTNARMTHYQSLLLNERVSFAPPAVLNPATLLPVESEATPVHRCSEILAEETGTRRDLKDQPLPGVPAWYTDGSSFIAEGKRRAGAAIVDGKRTVWASSLPEGTSAQKAELVALTQALRLAEGKDINIYTDSRYAFATAHIHGAIYKQRGWLTSAGKDIKNKEEILALLEAIHLPKRVAIIHCPGHQKGNDPVATGNRRADEAAKQAALSTRVLAETTKPAGKRTADGSEFEKRTADGSEFESPKKKAKVE

SEQ ID NO: 6142 - protein, 2100 aa, synthetic construct
MPAAKRVKLDGGDKKYSIGLDIGTNSVGWAVITDEYKVPSKKFKVLGNTDRHSIKKNLIGALLFDSGETAEATRLKRTARRRYTRRKNRICYLQEIFSNEMAKVDDSFFHRLEESFLVEEDKKHERHPIFGNIVDEVAYHEKYPTIYHLRKKLVDSTDKADLRLIYLALAHMIKFRGHFLIEGDLNPDNSDVDKLFIQLVQTYNQLFEENPINASGVDAKAILSARLSKSRRLENLIAQLPGEKKNGLFGNLIALSLGLTPNFKSNFDLAEDAKLQLSKDTYDDDLDNLLAQIGDQYADLFLAAKNLSDAILLSDILRVNTEITKAPLSASMIKRYDEHHQDLTLLKALVRQQLPEKYKEIFFDQSKNGYAGYIDGGASQEEFYKFIKPILEKMDGTEELLVKLNREDLLRKQRTFDNGSIPHQIHLGELHAILRRQEDFYPFLKDNREKIEKILTFRIPYYVGPLARGNSRFAWMTRKSEETITPWNFEEVVDKGASAQSFIERMTNFDKNLPNEKVLPKHSLLYEYFTVYNELTKVKYVTEGMRKPAFLSGEQKKAIVDLLFKTNRKVTVKQLKEDYFKKIECFDSVEISGVEDRFNASLGTYHDLLKIIKDKDFLDNEENEDILEDIVLTLTLFEDREMIEERLKTYAHLFDDKVMKQLKRRRYTGWGRLSRKLINGIRDKQSGKTILDFLKSDGFANRNFMQLIHDDSLTFKEDIQKAQVSGQGDSLHEHIANLAGSPAIKKGILQTVKVVDELVKVMGRHKPENIVIEMARENQTTQKGQKNSRERMKRIEEGIKELGSQILKEHPVENTQLQNEKLYLYYLQNGRDMYVDQELDINRLSDYDVDHIVPQSFLKDDSIDNKVLTRSDKARGKSDNVPSEEVVKKMKNYWRQLLNAKLITQRKFDNLTKAERGGLSELDKAGFIKRQLVETRQITKHVAQILDSRMNTKYDENDKLIREVKVITLKSKLVSDFRKDFQFYKVREINNYHHAHDAYLNAVVGTALIKKYPKLESEFVYGDYKVYDVRKMIAKSEQEIGKATAKYFFYSNIMNFFKTEITLANGEIRKRPLIETNGETGEIVWDKGRDFATVRKVLSMPQVNIVKKTEVQTGGFSKESILPKRNSDKLIARKKDWDPKKYGGFDSPTVAYSVLVVAKVEKGKSKKLKSVKELLGITIMERSSFEKNPIDFLEAKGYKEVKKDLIIKLPKYSLFELENGRKRMLASAGELQKGNELALPSKYVNFLYLASHYEKLKGSPEDNEQKQLFVEQHKHYLDEIIEQISEFSKRVILADANLDKVLSAYNKHRDKPIREQAENIIHLFTLTNLGAPAAFKYFDTTIDRKRYTSTKEVLDATLIHQSITGLYETRIDLSQLGGDGGGGGGSGGGGSGGGGSGGTLNIEDEYRLHETSKEPDVPLGSTWLSDFPQAWAETGGMGLAVRQAPLIIPLKATSTPVSIKQYPMSQEARLGIKPHIQRLLDQGILVPCQSPWNTPLLPVKKPGTNDYRPVQDLREVNKRVEDIHPTVPNPYNLLSGLPPSHQWYTVLDLKDAFFCLRLHPTSQPLFAFEWRDPEMGISGQLTWTRLPQGFKNSPTLFNEALHRDLADFRIQHPDLILLQYVDDLLLAATSEQDCQRGTRALLQTLGNLGYRASAKKAQICQKQVKYLGYLLKEGQRWLTEARKETVMGQPTPKTPRQLREFLGTAGFCRLWIPGFAEMAAPLYPLTKPGTLFNWGPDQQKAYQEIKQALLTAPALGLPDLTKPFELFVDEKQGYAKGVLTQKLGPWRRPVAYLSKKLDPVAAGWPPCLRMVAAIAVLTKDAGKLTMGQPLVILAPHAVEALVKQPPDRWLSNARMTHYQAMLLDTDRVQFGPVVALNPATLLPLPEKEAPHDCLEILAETHGTRPDLTDQPIPDADYTWYTDGSSFLQEGQRRAGAAVTTETEVIWARALPAGTSAQRAELIALTQALKMAEGKKLNVYTDSRYAFATAHVHGEIYRRRGWLTSEGREIKNKNEILALLKALFLPKRLSIIHCPGHQKGNSAEARGNRMADQAAREAAMKAVLETSTLLAGKRTADGSEFEKRTADGSEFESPKKKAKVE

SEQ ID NO: 6143 - protein, 2107 aa, synthetic construct
MPAAKRVKLDGGDKKYSIGLDIGTNSVGWAVITDEYKVPSKKFKVLGNTDRHSIKKNLIGALLFDSGETAEATRLKRTARRRYTRRKNRICYLQEIFSNEMAKVDDSFFHRLEESFLVEEDKKHERHPIFGNIVDEVAYHEKYPTIYHLRKKLVDSTDKADLRLIYLALAHMIKFRGHFLIEGDLNPDNSDVDKLFIQLVQTYNQLFEENPINASGVDAKAILSARLSKSRRLENLIAQLPGEKKNGLFGNLIALSLGLTPNFKSNFDLAEDAKLQLSKDTYDDDLDNLLAQIGDQYADLFLAAKNLSDAILLSDILRVNTEITKAPLSASMIKRYDEHHQDLTLLKALVRQQLPEKYKEIFFDQSKNGYAGYIDGGASQEEFYKFIKPILEKMDGTEELLVKLNREDLLRKQRTFDNGSIPHQIHLGELHAILRRQEDFYPFLKDNREKIEKILTFRIPYYVGPLARGNSRFAWMTRKSEETITPWNFEEVVDKGASAQSFIERMTNFDKNLPNEKVLPKHSLLYEYFTVYNELTKVKYVTEGMRKPAFLSGEQKKAIVDLLFKTNRKVTVKQLKEDYFKKIECFDSVEISGVEDRFNASLGTYHDLLKIIKDKDFLDNEENEDILEDIVLTLTLFEDREMIEERLKTYAHLFDDKVMKQLKRRRYTGWGRLSRKLINGIRDKQSGKTILDFLKSDGFANRNFMQLIHDDSLTFKEDIQKAQVSGQGDSLHEHIANLAGSPAIKKGILQTVKVVDELVKVMGRHKPENIVIEMARENQTTQKGQKNSRERMKRIEEGIKELGSQILKEHPVENTQLQNEKLYLYYLQNGRDMYVDQELDINRLSDYDVDHIVPQSFLKDDSIDNKVLTRSDKARGKSDNVPSEEVVKKMKNYWRQLLNAKLITQRKFDNLTKAERGGLSELDKAGFIKRQLVETRQITKHVAQILDSRMNTKYDENDKLIREVKVITLKSKLVSDFRKDFQFYKVREINNYHHAHDAYLNAVVGTALIKKYPKLESEFVYGDYKVYDVRKMIAKSEQEIGKATAKYFFYSNIMNFFKTEITLANGEIRKRPLIETNGETGEIVWDKGRDFATVRKVLSMPQVNIVKKTEVQTGGFSKESILPKRNSDKLIARKKDWDPKKYGGFDSPTVAYSVLVVAKVEKGKSKKLKSVKELLGITIMERSSFEKNPIDFLEAKGYKEVKKDLIIKLPKYSLFELENGRKRMLASAGELQKGNELALPSKYVNFLYLASHYEKLKGSPEDNEQKQLFVEQHKHYLDEIIEQISEFSKRVILADANLDKVLSAYNKHRDKPIREQAENIIHLFTLTNLGAPAAFKYFDTTIDRKRYTSTKEVLDATLIHQSITGLYETRIDLSQLGGDGGGGGGSGGGGSGGGGSGGGGSGGTAPLEEEYRLFLEAPIQNVTLLEQWKREIPKVWAEINPPGLASTQAPIHVQLLSTALPVRVRQYPITLEAKRSLRETIRKFRAAGILRPVHSPWNTPLLPVRKSGTSEYRMVQDLREVNKRVETIHPTVPNPYTLLSLLPPDRIWYSVLDLKDAFFCIPLAPESQLIFAFEWADAEEGESGQLTWTRLPQGFKNSPTLFDEALNRDLQGFRLDHPSVSLLQYVDDLLIAADTQAACLSATRDLLMTLAELGYRVSGKKAQLCQEEVTYLGFKIHKGSRSLSNSRTQAILQIPVPKTKRQVREFLGTIGYCRLWIPGFAELAQPLYAATRGGNDPLVWGEKEEEAFQSLKLALTQPPALALPSLDKPFQLFVEETSGAAKGVLTQALGPWKRPVAYLSKRLDPVAAGWPRCLRAIAAAALLTREASKLTFGQDIEITSSHNLESLLRSPPDKWLTNARITQYQVLLLDPPRVRFKQTAALNPATLLPETDDTLPIHHCLDTLDSLTSTRPDLTDQPLAQAEATLFTDGSSYIRDGKRYAGAAVVTLDSVIWAEPLPIGTSAQKAELIALTKALEWSKDKSVNIYTDSRYAFATLHVHGMIYRERGLLTAGGKAIKNAPEILALLTAVWLPKRVAVMHCKGHQKDDAPTSTGNRRADEVAREVAIRPLSTQATISAGKRTADGSEFEKRTADGSEFESPKKKAKVE

SEQ ID NO: 6144 - protein, 2107 aa, synthetic construct
MPAAKRVKLDGGDKKYSIGLDIGTNSVGWAVITDEYKVPSKKFKVLGNTDRHSIKKNLIGALLFDSGETAEATRLKRTARRRYTRRKNRICYLQEIFSNEMAKVDDSFFHRLEESFLVEEDKKHERHPIFGNIVDEVAYHEKYPTIYHLRKKLVDSTDKADLRLIYLALAHMIKFRGHFLIEGDLNPDNSDVDKLFIQLVQTYNQLFEENPINASGVDAKAILSARLSKSRRLENLIAQLPGEKKNGLFGNLIALSLGLTPNFKSNFDLAEDAKLQLSKDTYDDDLDNLLAQIGDQYADLFLAAKNLSDAILLSDILRVNTEITKAPLSASMIKRYDEHHQDLTLLKALVRQQLPEKYKEIFFDQSKNGYAGYIDGGASQEEFYKFIKPILEKMDGTEELLVKLNREDLLRKQRTFDNGSIPHQIHLGELHAILRRQEDFYPFLKDNREKIEKILTFRIPYYVGPLARGNSRFAWMTRKSEETITPWNFEEVVDKGASAQSFIERMTNFDKNLPNEKVLPKHSLLYEYFTVYNELTKVKYVTEGMRKPAFLSGEQKKAIVDLLFKTNRKVTVKQLKEDYFKKIECFDSVEISGVEDRFNASLGTYHDLLKIIKDKDFLDNEENEDILEDIVLTLTLFEDREMIEERLKTYAHLFDDKVMKQLKRRRYTGWGRLSRKLINGIRDKQSGKTILDFLKSDGFANRNFMQLIHDDSLTFKEDIQKAQVSGQGDSLHEHIANLAGSPAIKKGILQTVKVVDELVKVMGRHKPENIVIEMARENQTTQKGQKNSRERMKRIEEGIKELGSQILKEHPVENTQLQNEKLYLYYLQNGRDMYVDQELDINRLSDYDVDHIVPQSFLKDDSIDNKVLTRSDKARGKSDNVPSEEVVKKMKNYWRQLLNAKLITQRKFDNLTKAERGGLSELDKAGFIKRQLVETRQITKHVAQILDSRMNTKYDENDKLIREVKVITLKSKLVSDFRKDFQFYKVREINNYHHAHDAYLNAVVGTALIKKYPKLESEFVYGDYKVYDVRKMIAKSEQEIGKATAKYFFYSNIMNFFKTEITLANGEIRKRPLIETNGETGEIVWDKGRDFATVRKVLSMPQVNIVKKTEVQTGGFSKESILPKRNSDKLIARKKDWDPKKYGGFDSPTVAYSVLVVAKVEKGKSKKLKSVKELLGITIMERSSFEKNPIDFLEAKGYKEVKKDLIIKLPKYSLFELENGRKRMLASAGELQKGNELALPSKYVNFLYLASHYEKLKGSPEDNEQKQLFVEQHKHYLDEIIEQISEFSKRVILADANLDKVLSAYNKHRDKPIREQAENIIHLFTLTNLGAPAAFKYFDTTIDRKRYTSTKEVLDATLIHQSITGLYETRIDLSQLGGDGGGGGGSGGGGSGGGGSGGGGSGGTAPLEEEYRLFLEAPIQNVTLLEQWKREIPKVWAEINPPGLASTQAPIHVQLLSTALPVRVRQYPITLEAKRSLRETIRKFRAAGILRPVHSPWNTPLLPVRKSGTSEYRMVQDLREVNKRVETIHPTVPNPYTLLSLLPPDRIWYSVLDLKDAFFCIPLAPESQLIFAFEWADAEEGESGQLTWTRLPQGFKNSPTLFNEALNRDLQGFRLDHPSVSLLQYVDDLLIAADTQAACLSATRDLLMTLAELGYRVSGKKAQLCQEEVTYLGFKIHKGSRSLSNSRTQAILQIPVPKTKRQVREFLGTIGYCRLWIPGFAELAQPLYAATRPGNDPLVWGEKEEEAFQSLKLALTQPPALALPSLDKPFQLFVEETSGAAKGVLTQALGPWKRPVAYLSKRLDPVAAGWPRCLRAIAAAALLTREASKLTFGQDIEITSSHNLESLLRSPPDKWLTNARITQYQVLLLDPPRVRFKQTAALNPATLLPETDDTLPIHHCLDTLDSLTSTRPDLTDQPLAQAEATLFTDGSSYIRDGKRYAGAAVVTLDSVIWAEPLPIGTSAQKAELIALTKALEWSKDKSVNIYTDSRYAFATLHVHGMIYRERGWLTAGGKAIKNAPEILALLTAVWLPKRVAVMHCKGHQKDDAPTSTGNRRADEVAREVAIRPLSTQATISAGKRTADGSEFEKRTADGSEFESPKKKAKVE

SEQ ID NO: 6145 - protein, 2096 aa, synthetic construct
MPAAKRVKLDGGDKKYSIGLDIGTNSVGWAVITDEYKVPSKKFKVLGNTDRHSIKKNLIGALLFDSGETAEATRLKRTARRRYTRRKNRICYLQEIFSNEMAKVDDSFFHRLEESFLVEEDKKHERHPIFGNIVDEVAYHEKYPTIYHLRKKLVDSTDKADLRLIYLALAHMIKFRGHFLIEGDLNPDNSDVDKLFIQLVQTYNQLFEENPINASGVDAKAILSARLSKSRRLENLIAQLPGEKKNGLFGNLIALSLGLTPNFKSNFDLAEDAKLQLSKDTYDDDLDNLLAQIGDQYADLFLAAKNLSDAILLSDILRVNTEITKAPLSASMIKRYDEHHQDLTLLKALVRQQLPEKYKEIFFDQSKNGYAGYIDGGASQEEFYKFIKPILEKMDGTEELLVKLNREDLLRKQRTFDNGSIPHQIHLGELHAILRRQEDFYPFLKDNREKIEKILTFRIPYYVGPLARGNSRFAWMTRKSEETITPWNFEEVVDKGASAQSFIERMTNFDKNLPNEKVLPKHSLLYEYFTVYNELTKVKYVTEGMRKPAFLSGEQKKAIVDLLFKTNRKVTVKQLKEDYFKKIECFDSVEISGVEDRFNASLGTYHDLLKIIKDKDFLDNEENEDILEDIVLTLTLFEDREMIEERLKTYAHLFDDKVMKQLKRRRYTGWGRLSRKLINGIRDKQSGKTILDFLKSDGFANRNFMQLIHDDSLTFKEDIQKAQVSGQGDSLHEHIANLAGSPAIKKGILQTVKVVDELVKVMGRHKPENIVIEMARENQTTQKGQKNSRERMKRIEEGIKELGSQILKEHPVENTQLQNEKLYLYYLQNGRDMYVDQELDINRLSDYDVDHIVPQSFLKDDSIDNKVLTRSDKARGKSDNVPSEEVVKKMKNYWRQLLNAKLITQRKFDNLTKAERGGLSELDKAGFIKRQLVETRQITKHVAQILDSRMNTKYDENDKLIREVKVITLKSKLVSDFRKDFQFYKVREINNYHHAHDAYLNAVVGTALIKKYPKLESEFVYGDYKVYDVRKMIAKSEQEIGKATAKYFFYSNIMNFFKTEITLANGEIRKRPLIETNGETGEIVWDKGRDFATVRKVLSMPQVNIVKKTEVQTGGFSKESILPKRNSDKLIARKKDWDPKKYGGFDSPTVAYSVLVVAKVEKGKSKKLKSVKELLGITIMERSSFEKNPIDFLEAKGYKEVKKDLIIKLPKYSLFELENGRKRMLASAGELQKGNELALPSKYVNFLYLASHYEKLKGSPEDNEQKQLFVEQHKHYLDEIIEQISEFSKRVILADANLDKVLSAYNKHRDKPIREQAENIIHLFTLTNLGAPAAFKYFDTTIDRKRYTSTKEVLDATLIHQSITGLYETRIDLSQLGGDGGGGGGSGGGGSGGGGSGGGGSGGVPWILKKPLELTIKLDLEEQQGTLLNNSILSKKGKEELKQLFEKYSALWQSWENQVGHRRIRPHKIATGTVKPTPQKQYHINPKAKPDIQIVINDLLKQGVLIQKESTMNTPVYPVPKPNGRWRMVLDYRAVNKVTPLIAVQNQHSYGILGSLFKGRYKTTIDLSNGFWAHPIVPEDYWITAFTWQGKQYCWTVLPQGFLNSPGLFNGDVVDLLQGIPNVEVYVDDVYISHDSEKEHLEYLDILFNRLKEAGYIISLKKSNIANSIVDFLGFQITNEGRGLTDTFKEKLENITAPTTLKQLQSILGLLNFARNFIPDFTELIAPLYALIPKSPKNYVPWQIEHSTTLETLITKLNGAEYLQGRKGDKTLIMKVNASYTTGYIRYYNEGEKKPISYVSIVFSKTELKFTELEKLLTTVHKGLLKALDLSMGQNIHVYSPIVSMQNIQKTPQTAKKALASRWLSWLSYLEDPRIRFFYDPQMPALKDLPAVDTGKDNKKHPSNFQHIFYTDGSAITSPTKEGHLNAGMGIVYFINKDGNLQKQQEWSISLGNHTAQFAEIAAFEFALKKCLPLGGNILVVTDSNYVAKAYNEELDVWASNGFVNNRKKPLKHISKWKSVADLKRLRPDVVVTHEPGHQKLDSSPHAYGNNLADQLATQASFKVHAGKRTADGSEFEKRTADGSEFESPKKKAKVE

SEQ ID NO: 6146 - protein, 2104 aa, synthetic construct
MPAAKRVKLDGGDKKYSIGLDIGTNSVGWAVITDEYKVPSKKFKVLGNTDRHSIKKNLIGALLFDSGETAEATRLKRTARRRYTRRKNRICYLQEIFSNEMAKVDDSFFHRLEESFLVEEDKKHERHPIFGNIVDEVAYHEKYPTIYHLRKKLVDSTDKADLRLIYLALAHMIKFRGHFLIEGDLNPDNSDVDKLFIQLVQTYNQLFEENPINASGVDAKAILSARLSKSRRLENLIAQLPGEKKNGLFGNLIALSLGLTPNFKSNFDLAEDAKLQLSKDTYDDDLDNLLAQIGDQYADLFLAAKNLSDAILLSDILRVNTEITKAPLSASMIKRYDEHHQDLTLLKALVRQQLPEKYKEIFFDQSKNGYAGYIDGGASQEEFYKFIKPILEKMDGTEELLVKLNREDLLRKQRTFDNGSIPHQIHLGELHAILRRQEDFYPFLKDNREKIEKILTFRIPYYVGPLARGNSRFAWMTRKSEETITPWNFEEVVDKGASAQSFIERMTNFDKNLPNEKVLPKHSLLYEYFTVYNELTKVKYVTEGMRKPAFLSGEQKKAIVDLLFKTNRKVTVKQLKEDYFKKIECFDSVEISGVEDRFNASLGTYHDLLKIIKDKDFLDNEENEDILEDIVLTLTLFEDREMIEERLKTYAHLFDDKVMKQLKRRRYTGWGRLSRKLINGIRDKQSGKTILDFLKSDGFANRNFMQLIHDDSLTFKEDIQKAQVSGQGDSLHEHIANLAGSPAIKKGILQTVKVVDELVKVMGRHKPENIVIEMARENQTTQKGQKNSRERMKRIEEGIKELGSQILKEHPVENTQLQNEKLYLYYLQNGRDMYVDQELDINRLSDYDVDHIVPQSFLKDDSIDNKVLTRSDKARGKSDNVPSEEVVKKMKNYWRQLLNAKLITQRKFDNLTKAERGGLSELDKAGFIKRQLVETRQITKHVAQILDSRMNTKYDENDKLIREVKVITLKSKLVSDFRKDFQFYKVREINNYHHAHDAYLNAVVGTALIKKYPKLESEFVYGDYKVYDVRKMIAKSEQEIGKATAKYFFYSNIMNFFKTEITLANGEIRKRPLIETNGETGEIVWDKGRDFATVRKVLSMPQVNIVKKTEVQTGGFSKESILPKRNSDKLIARKKDWDPKKYGGFDSPTVAYSVLVVAKVEKGKSKKLKSVKELLGITIMERSSFEKNPIDFLEAKGYKEVKKDLIIKLPKYSLFELENGRKRMLASAGELQKGNELALPSKYVNFLYLASHYEKLKGSPEDNEQKQLFVEQHKHYLDEIIEQISEFSKRVILADANLDKVLSAYNKHRDKPIREQAENIIHLFTLTNLGAPAAFKYFDTTIDRKRYTSTKEVLDATLIHQSITGLYETRIDLSQLGGDGGGGGGSGGGGSGGGGSGGGGSGGTLQLEEEYRLFEPESTQKQEMDIWLKNFPQAWAETGGMGTAHCQAPVLIQLKATATPISIRQYPMPHEAYQGIKPHIRRMLDQGILKPCQSPWNTPLLPVKKPGTEDYRPVQDLREVNKRVEDIHPTVPNPYNLLSTLPPSHPWYTVLDLKDAFFCLRLHSESQLLFAFEWRDPEIGLSGQLTWTRLPQGFKNSPTLFDEALHSDLADFRVRYPALVLLQYVDDLLLAAATRTECLEGTKALLETLGNKGYRASAKKAQICLQEVTYLGYSLKDGQRWLTKARKEAILSIPVPKNSRQVREFLGTAGYCRLWIPGFAELAAPLYPLTRPGTLFQWGTEQQLAFEDIKKALLSSPALGLPDITKPFELFIDENSGFAKGVLVQKLGPWKRPVAYLSKKLDTVASGWPPCLRMVAAIAILVKDAGKLTLGQPLTILTSHPVEALVRQPPNKWLSNARMTHYQAMLLDAERVHFGPTVSLNPATLLPLPSGGNHHDCLQILAETHGTRPDLTDQPLPDADLTWYTDGSSFIRNGEREAGAAVTTESEVIWAAPLPPGTSAQRAELIALTQALKMAEGKKLTVYTDSRYAFATTHVHGEIYRRRGLLTSEGKEIKNKNEILALLEALFLPKRLSIIHCPGHQKGDSPQAKGNRLADDTAKKAATETHSSLTVLPAGKRTADGSEFEKRTADGSEFESPKKKAKVE

SEQ ID NO: 6147 - protein, 2104 aa, synthetic construct
MPAAKRVKLDGGDKKYSIGLDIGTNSVGWAVITDEYKVPSKKFKVLGNTDRHSIKKNLIGALLFDSGETAEATRLKRTARRRYTRRKNRICYLQEIFSNEMAKVDDSFFHRLEESFLVEEDKKHERHPIFGNIVDEVAYHEKYPTIYHLRKKLVDSTDKADLRLIYLALAHMIKFRGHFLIEGDLNPDNSDVDKLFIQLVQTYNQLFEENPINASGVDAKAILSARLSKSRRLENLIAQLPGEKKNGLFGNLIALSLGLTPNFKSNFDLAEDAKLQLSKDTYDDDLDNLLAQIGDQYADLFLAAKNLSDAILLSDILRVNTEITKAPLSASMIKRYDEHHQDLTLLKALVRQQLPEKYKEIFFDQSKNGYAGYIDGGASQEEFYKFIKPILEKMDGTEELLVKLNREDLLRKQRTFDNGSIPHQIHLGELHAILRRQEDFYPFLKDNREKIEKILTFRIPYYVGPLARGNSRFAWMTRKSEETITPWNFEEVVDKGASAQSFIERMTNFDKNLPNEKVLPKHSLLYEYFTVYNELTKVKYVTEGMRKPAFLSGEQKKAIVDLLFKTNRKVTVKQLKEDYFKKIECFDSVEISGVEDRFNASLGTYHDLLKIIKDKDFLDNEENEDILEDIVLTLTLFEDREMIEERLKTYAHLFDDKVMKQLKRRRYTGWGRLSRKLINGIRDKQSGKTILDFLKSDGFANRNFMQLIHDDSLTFKEDIQKAQVSGQGDSLHEHIANLAGSPAIKKGILQTVKVVDELVKVMGRHKPENIVIEMARENQTTQKGQKNSRERMKRIEEGIKELGSQILKEHPVENTQLQNEKLYLYYLQNGRDMYVDQELDINRLSDYDVDHIVPQSFLKDDSIDNKVLTRSDKARGKSDNVPSEEVVKKMKNYWRQLLNAKLITQRKFDNLTKAERGGLSELDKAGFIKRQLVETRQITKHVAQILDSRMNTKYDENDKLIREVKVITLKSKLVSDFRKDFQFYKVREINNYHHAHDAYLNAVVGTALIKKYPKLESEFVYGDYKVYDVRKMIAKSEQEIGKATAKYFFYSNIMNFFKTEITLANGEIRKRPLIETNGETGEIVWDKGRDFATVRKVLSMPQVNIVKKTEVQTGGFSKESILPKRNSDKLIARKKDWDPKKYGGFDSPTVAYSVLVVAKVEKGKSKKLKSVKELLGITIMERSSFEKNPIDFLEAKGYKEVKKDLIIKLPKYSLFELENGRKRMLASAGELQKGNELALPSKYVNFLYLASHYEKLKGSPEDNEQKQLFVEQHKHYLDEIIEQISEFSKRVILADANLDKVLSAYNKHRDKPIREQAENIIHLFTLTNLGAPAAFKYFDTTIDRKRYTSTKEVLDATLIHQSITGLYETRIDLSQLGGDGGGGGGSGGGGSGGGGSGGGGSGGTLQLEEEYRLFEPESTQKQEMDIWLKNFPQAWAETGGMGTAHCQAPVLIQLKATATPISIRQYPMPHEAYQGIKPHIRRMLDQGILKPCQSPWNTPLLPVKKPGTEDYRPVQDLREVNKRVEDIHPTVPNPYNLLSTLPPSHPWYTVLDLKDAFFCLRLHSESQLLFAFEWRDPEIGLSGQLTWTRLPQGFKNSPTLFNEALHSDLADFRVRYPALVLLQYVDDLLLAAATRTECLEGTKALLETLGNKGYRASAKKAQICLQEVTYLGYSLKDGQRWLTKARKEAILSIPVPKNSRQVREFLGTAGYCRLWIPGFAELAAPLYPLTRPGTLFQWGTEQQLAFEDIKKALLSSPALGLPDITKPFELFIDENSGFAKGVLVQKLGPWKRPVAYLSKKLDTVASGWPPCLRMVAAIAILVKDAGKLTLGQPLTILTSHPVEALVRQPPNKWLSNARMTHYQAMLLDAERVHFGPTVSLNPATLLPLPSGGNHHDCLQILAETHGTRPDLTDQPLPDADLTWYTDGSSFIRNGEREAGAAVTTESEVIWAAPLPPGTSAQRAELIALTQALKMAEGKKLTVYTDSRYAFATTHVHGEIYRRRGWLTSEGKEIKNKNEILALLEALFLPKRLSIIHCPGHQKGDSPQAKGNRLADDTAKKAATETHSSLTVLPAGKRTADGSEFEKRTADGSEFESPKKKAKVE

SEQ ID NO: 6148 - protein, 2104 aa, synthetic construct
MPAAKRVKLDGGDKKYSIGLDIGTNSVGWAVITDEYKVPSKKFKVLGNTDRHSIKKNLIGALLFDSGETAEATRLKRTARRRYTRRKNRICYLQEIFSNEMAKVDDSFFHRLEESFLVEEDKKHERHPIFGNIVDEVAYHEKYPTIYHLRKKLVDSTDKADLRLIYLALAHMIKFRGHFLIEGDLNPDNSDVDKLFIQLVQTYNQLFEENPINASGVDAKAILSARLSKSRRLENLIAQLPGEKKNGLFGNLIALSLGLTPNFKSNFDLAEDAKLQLSKDTYDDDLDNLLAQIGDQYADLFLAAKNLSDAILLSDILRVNTEITKAPLSASMIKRYDEHHQDLTLLKALVRQQLPEKYKEIFFDQSKNGYAGYIDGGASQEEFYKFIKPILEKMDGTEELLVKLNREDLLRKQRTFDNGSIPHQIHLGELHAILRRQEDFYPFLKDNREKIEKILTFRIPYYVGPLARGNSRFAWMTRKSEETITPWNFEEVVDKGASAQSFIERMTNFDKNLPNEKVLPKHSLLYEYFTVYNELTKVKYVTEGMRKPAFLSGEQKKAIVDLLFKTNRKVTVKQLKEDYFKKIECFDSVEISGVEDRFNASLGTYHDLLKIIKDKDFLDNEENEDILEDIVLTLTLFEDREMIEERLKTYAHLFDDKVMKQLKRRRYTGWGRLSRKLINGIRDKQSGKTILDFLKSDGFANRNFMQLIHDDSLTFKEDIQKAQVSGQGDSLHEHIANLAGSPAIKKGILQTVKVVDELVKVMGRHKPENIVIEMARENQTTQKGQKNSRERMKRIEEGIKELGSQILKEHPVENTQLQNEKLYLYYLQNGRDMYVDQELDINRLSDYDVDHIVPQSFLKDDSIDNKVLTRSDKARGKSDNVPSEEVVKKMKNYWRQLLNAKLITQRKFDNLTKAERGGLSELDKAGFIKRQLVETRQITKHVAQILDSRMNTKYDENDKLIREVKVITLKSKLVSDFRKDFQFYKVREINNYHHAHDAYLNAVVGTALIKKYPKLESEFVYGDYKVYDVRKMIAKSEQEIGKATAKYFFYSNIMNFFKTEITLANGEIRKRPLIETNGETGEIVWDKGRDFATVRKVLSMPQVNIVKKTEVQTGGFSKESILPKRNSDKLIARKKDWDPKKYGGFDSPTVAYSVLVVAKVEKGKSKKLKSVKELLGITIMERSSFEKNPIDFLEAKGYKEVKKDLIIKLPKYSLFELENGRKRMLASAGELQKGNELALPSKYVNFLYLASHYEKLKGSPEDNEQKQLFVEQHKHYLDEIIEQISEFSKRVILADANLDKVLSAYNKHRDKPIREQAENIIHLFTLTNLGAPAAFKYFDTTIDRKRYTSTKEVLDATLIHQSITGLYETRIDLSQLGGDGGGGGGSGGGGSGGGGSGGGGSGGTLQLEEEYRLFEPESTQKQEMDIWLKNFPQAWAETGGMGTAHCQAPVLIQLKATATPISIRQYPMPHEAYQGIKPHIRRMLDQGILKPCQSPWNTPLLPVKKPGTEDYRPVQDLREVNKRVEDIHPTVPNPYNLLSTLPPSHPWYTVLDLKDAFFCLRLHSESQLLFAFEWRDPEIGLSGQLTWTRLPQGFKNSPTLFNEALHSDLADFRVRYPALVLLQYVDDLLLAAATRTECLEGTKALLETLGNKGYRASAKKAQICLQEVTYLGYSLKDGQRWLTKARKEAILSIPVPKNSRQVREFLGKAGYCRLFIPGFAELAAPLYPLTRPGTLFQWGTEQQLAFEDIKKALLSSPALGLPDITKPFELFIDENSGFAKGVLVQKLGPWKRPVAYLSKKLDTVASGWPPCLRMVAAIAILVKDAGKLTLGQPLTILTSHPVEALVRQPPNKWLSNARMTHYQAMLLDAERVHFGPTVSLNPATLLPLPSGGNHHDCLQILAETHGTRPDLTDQPLPDADLTWYTDGSSFIRNGEREAGAAVTTESEVIWAAPLPPGTSAQRAELIALTQALKMAEGKKLTVYTDSRYAFATTHVHGEIYRRRGWLTSEGKEIKNKNEILALLEALFLPKRLSIIHCPGHQKGDSPQAKGNRLADDTAKKAATETHSSLTVLPAGKRTADGSEFEKRTADGSEFESPKKKAKVE

SEQ ID NO: 6149 - protein, 2185 aa, synthetic construct
MPAAKRVKLDGGDKKYSIGLDIGTNSVGWAVITDEYKVPSKKFKVLGNTDRHSIKKNLIGALLFDSGETAEATRLKRTARRRYTRRKNRICYLQEIFSNEMAKVDDSFFHRLEESFLVEEDKKHERHPIFGNIVDEVAYHEKYPTIYHLRKKLVDSTDKADLRLIYLALAHMIKFRGHFLIEGDLNPDNSDVDKLFIQLVQTYNQLFEENPINASGVDAKAILSARLSKSRRLENLIAQLPGEKKNGLFGNLIALSLGLTPNFKSNFDLAEDAKLQLSKDTYDDDLDNLLAQIGDQYADLFLAAKNLSDAILLSDILRVNTEITKAPLSASMIKRYDEHHQDLTLLKALVRQQLPEKYKEIFFDQSKNGYAGYIDGGASQEEFYKFIKPILEKMDGTEELLVKLNREDLLRKQRTFDNGSIPHQIHLGELHAILRRQEDFYPFLKDNREKIEKILTFRIPYYVGPLARGNSRFAWMTRKSEETITPWNFEEVVDKGASAQSFIERMTNFDKNLPNEKVLPKHSLLYEYFTVYNELTKVKYVTEGMRKPAFLSGEQKKAIVDLLFKTNRKVTVKQLKEDYFKKIECFDSVEISGVEDRFNASLGTYHDLLKIIKDKDFLDNEENEDILEDIVLTLTLFEDREMIEERLKTYAHLFDDKVMKQLKRRRYTGWGRLSRKLINGIRDKQSGKTILDFLKSDGFANRNFMQLIHDDSLTFKEDIQKAQVSGQGDSLHEHIANLAGSPAIKKGILQTVKVVDELVKVMGRHKPENIVIEMARENQTTQKGQKNSRERMKRIEEGIKELGSQILKEHPVENTQLQNEKLYLYYLQNGRDMYVDQELDINRLSDYDVDHIVPQSFLKDDSIDNKVLTRSDKARGKSDNVPSEEVVKKMKNYWRQLLNAKLITQRKFDNLTKAERGGLSELDKAGFIKRQLVETRQITKHVAQILDSRMNTKYDENDKLIREVKVITLKSKLVSDFRKDFQFYKVREINNYHHAHDAYLNAVVGTALIKKYPKLESEFVYGDYKVYDVRKMIAKSEQEIGKATAKYFFYSNIMNFFKTEITLANGEIRKRPLIETNGETGEIVWDKGRDFATVRKVLSMPQVNIVKKTEVQTGGFSKESILPKRNSDKLIARKKDWDPKKYGGFDSPTVAYSVLVVAKVEKGKSKKLKSVKELLGITIMERSSFEKNPIDFLEAKGYKEVKKDLIIKLPKYSLFELENGRKRMLASAGELQKGNELALPSKYVNFLYLASHYEKLKGSPEDNEQKQLFVEQHKHYLDEIIEQISEFSKRVILADANLDKVLSAYNKHRDKPIREQAENIIHLFTLTNLGAPAAFKYFDTTIDRKRYTSTKEVLDATLIHQSITGLYETRIDLSQLGGDGGGGGGSGGGGSGGGGSGGGGSGGMNPLQLLQPLPAEIKGTKLLAHWNSGATITCIPESFLEDEQPIKKTLIKTIHGEKQQNVYYVTFKVKGRKVEAEVIASPYEYILLSPTDVPWLTQQPLQLTILVPLQEYQEKILSKTALPEDQKQQLKTLFVKYDNLWQHWENQVGHRKIRPHNIATGDYPPRPQKQYPINPKAKPSIQIVIDDLLKQGVLTPQNSTMNTPVYPVPKPDGRWRMVLDYREVNKTIPLTAAQNQHSAGILATIVRQKYKTTLDLANGFWAHPITPESYWLTAFTWQGKQYCWTRLPQGFLNSPALFNADVVDLLKEIPNVQVYVDDIYLSHDDPKEHVQQLEKVFQILLQAGYVVSLKKSEIGQKTVEFLGFNITKEGRGLTDTFKTKLLNITPPKDLKQLQSILGLLNFARNFIPNFAELVQPLYNLIAPAKGKYIEWSEENTKQLNMVIEALNTASNLEERLPEQRLVIKVNTSPSAGYVRYYNETGKKPIMYLNYVFSKAELKFSMLEKLLTTMHKALIKAMDLAMGQEILVYSPIVSMTKIQKTPLPERKALPIRWITWMTYLEDPRIQFHYDKTLPELKHIPDVYTSSQSPVKHPSQYEGVFYTDGSAIKSPDPTKSNNAGMGIVHATYKPEYQVLNQWSIPLGNHTAQMAEIAAVEFACKKALKIPGPVLVITDSFYVAESANKELPYWKSNGFVNNKKKPLKHISKWKSIAECLSMKPDITIQHEKGISLQIPVFILKGNALADKLATQGSYVVNAGKRTADGSEFEKRTADGSEFESPKKKAKVE

SEQ ID NO: 6150 - protein, 2185 aa, synthetic construct
MPAAKRVKLDGGDKKYSIGLDIGTNSVGWAVITDEYKVPSKKFKVLGNTDRHSIKKNLIGALLFDSGETAEATRLKRTARRRYTRRKNRICYLQEIFSNEMAKVDDSFFHRLEESFLVEEDKKHERHPIFGNIVDEVAYHEKYPTIYHLRKKLVDSTDKADLRLIYLALAHMIKFRGHFLIEGDLNPDNSDVDKLFIQLVQTYNQLFEENPINASGVDAKAILSARLSKSRRLENLIAQLPGEKKNGLFGNLIALSLGLTPNFKSNFDLAEDAKLQLSKDTYDDDLDNLLAQIGDQYADLFLAAKNLSDAILLSDILRVNTEITKAPLSASMIKRYDEHHQDLTLLKALVRQQLPEKYKEIFFDQSKNGYAGYIDGGASQEEFYKFIKPILEKMDGTEELLVKLNREDLLRKQRTFDNGSIPHQIHLGELHAILRRQEDFYPFLKDNREKIEKILTFRIPYYVGPLARGNSRFAWMTRKSEETITPWNFEEVVDKGASAQSFIERMTNFDKNLPNEKVLPKHSLLYEYFTVYNELTKVKYVTEGMRKPAFLSGEQKKAIVDLLFKTNRKVTVKQLKEDYFKKIECFDSVEISGVEDRFNASLGTYHDLLKIIKDKDFLDNEENEDILEDIVLTLTLFEDREMIEERLKTYAHLFDDKVMKQLKRRRYTGWGRLSRKLINGIRDKQSGKTILDFLKSDGFANRNFMQLIHDDSLTFKEDIQKAQVSGQGDSLHEHIANLAGSPAIKKGILQTVKVVDELVKVMGRHKPENIVIEMARENQTTQKGQKNSRERMKRIEEGIKELGSQILKEHPVENTQLQNEKLYLYYLQNGRDMYVDQELDINRLSDYDVDHIVPQSFLKDDSIDNKVLTRSDKARGKSDNVPSEEVVKKMKNYWRQLLNAKLITQRKFDNLTKAERGGLSELDKAGFIKRQLVETRQITKHVAQILDSRMNTKYDENDKLIREVKVITLKSKLVSDFRKDFQFYKVREINNYHHAHDAYLNAVVGTALIKKYPKLESEFVYGDYKVYDVRKMIAKSEQEIGKATAKYFFYSNIMNFFKTEITLANGEIRKRPLIETNGETGEIVWDKGRDFATVRKVLSMPQVNIVKKTEVQTGGFSKESILPKRNSDKLIARKKDWDPKKYGGFDSPTVAYSVLVVAKVEKGKSKKLKSVKELLGITIMERSSFEKNPIDFLEAKGYKEVKKDLIIKLPKYSLFELENGRKRMLASAGELQKGNELALPSKYVNFLYLASHYEKLKGSPEDNEQKQLFVEQHKHYLDEIIEQISEFSKRVILADANLDKVLSAYNKHRDKPIREQAENIIHLFTLTNLGAPAAFKYFDTTIDRKRYTSTKEVLDATLIHQSITGLYETRIDLSQLGGDGGGGGGSGGGGSGGGGSGGGGSGGMNPLQLLQPLPAEIKGTKLLAHWNSGATITCIPESFLEDEQPIKKTLIKTIHGEKQQNVYYVTFKVKGRKVEAEVIASPYEYILLSPTDVPWLTQQPLQLTILVPLQEYQEKILSKTALPEDQKQQLKTLFVKYDNLWQHWENQVGHRKIRPHNIATGDYPPRPQKQYPINPKAKPSIQIVIDDLLKQGVLTPQNSTMNTPVYPVPKPDGRWRMVLDYREVNKTIPLTAAQNQHSAGILATIVRQKYKTTLDLANGFWAHPITPESYWLTAFTWQGKQYCWTRLPQGFLNSPALFNADVVDLLKEIPNVQVYVDDIYLSHDDPKEHVQQLEKVFQILLQAGYVVSLKKSEIGQKTVEFLGFNITKEGRGLTDTFKTKLLNITPPKDLKQLQSILGKLNFARNFIPNFAELVQPLYNLIAPAKGKYIEWSEENTKQLNMVIEALNTASNLEERLPEQRLVIKVNTSPSAGYVRYYNETGKKPIMYLNYVFSKAELKFSMLEKLLTTMHKALIKAMDLAMGQEILVYSPIVSMTKIQKTPLPERKALPIRWITWMTYLEDPRIQFHYDKTLPELKHIPDVYTSSQSPVKHPSQYEGVFYTDGSAIKSPDPTKSNNAGMGIVHATYKPEYQVLNQWSIPLGNHTAQMAEIAAVEFACKKALKIPGPVLVITDSFYVAESANKELPYWKSNGFVNNKKKPLKHISKWKSIAECLSMKPDITIQHEKGISLQIPVFILKGNALADKLATQGSYVVNAGKRTADGSEFEKRTADGSEFESPKKKAKVE

SEQ ID NO: 6151 - protein, 2136 aa, synthetic construct
MPAAKRVKLDGGDKKYSIGLDIGTNSVGWAVITDEYKVPSKKFKVLGNTDRHSIKKNLIGALLFDSGETAEATRLKRTARRRYTRRKNRICYLQEIFSNEMAKVDDSFFHRLEESFLVEEDKKHERHPIFGNIVDEVAYHEKYPTIYHLRKKLVDSTDKADLRLIYLALAHMIKFRGHFLIEGDLNPDNSDVDKLFIQLVQTYNQLFEENPINASGVDAKAILSARLSKSRRLENLIAQLPGEKKNGLFGNLIALSLGLTPNFKSNFDLAEDAKLQLSKDTYDDDLDNLLAQIGDQYADLFLAAKNLSDAILLSDILRVNTEITKAPLSASMIKRYDEHHQDLTLLKALVRQQLPEKYKEIFFDQSKNGYAGYIDGGASQEEFYKFIKPILEKMDGTEELLVKLNREDLLRKQRTFDNGSIPHQIHLGELHAILRRQEDFYPFLKDNREKIEKILTFRIPYYVGPLARGNSRFAWMTRKSEETITPWNFEEVVDKGASAQSFIERMTNFDKNLPNEKVLPKHSLLYEYFTVYNELTKVKYVTEGMRKPAFLSGEQKKAIVDLLFKTNRKVTVKQLKEDYFKKIECFDSVEISGVEDRFNASLGTYHDLLKIIKDKDFLDNEENEDILEDIVLTLTLFEDREMIEERLKTYAHLFDDKVMKQLKRRRYTGWGRLSRKLINGIRDKQSGKTILDFLKSDGFANRNFMQLIHDDSLTFKEDIQKAQVSGQGDSLHEHIANLAGSPAIKKGILQTVKVVDELVKVMGRHKPENIVIEMARENQTTQKGQKNSRERMKRIEEGIKELGSQILKEHPVENTQLQNEKLYLYYLQNGRDMYVDQELDINRLSDYDVDHIVPQSFLKDDSIDNKVLTRSDKARGKSDNVPSEEVVKKMKNYWRQLLNAKLITQRKFDNLTKAERGGLSELDKAGFIKRQLVETRQITKHVAQILDSRMNTKYDENDKLIREVKVITLKSKLVSDFRKDFQFYKVREINNYHHAHDAYLNAVVGTALIKKYPKLESEFVYGDYKVYDVRKMIAKSEQEIGKATAKYFFYSNIMNFFKTEITLANGEIRKRPLIETNGETGEIVWDKGRDFATVRKVLSMPQVNIVKKTEVQTGGFSKESILPKRNSDKLIARKKDWDPKKYGGFDSPTVAYSVLVVAKVEKGKSKKLKSVKELLGITIMERSSFEKNPIDFLEAKGYKEVKKDLIIKLPKYSLFELENGRKRMLASAGELQKGNELALPSKYVNFLYLASHYEKLKGSPEDNEQKQLFVEQHKHYLDEIIEQISEFSKRVILADANLDKVLSAYNKHRDKPIREQAENIIHLFTLTNLGAPAAFKYFDTTIDRKRYTSTKEVLDATLIHQSITGLYETRIDLSQLGGDGGGGGGSGGGGSGGGGSGGGGSGGLLGRDLLTKLKAQIQFSTEGPQVTWEDRPAMCLVLNLEEEYRLHEKPVPPSIDPSWLQLFPMVWAEKAGMGLANQVPPVVVELKSDASPVAVRQYPMSKEAREGIRPHIQRFLDLGILVPCQSPWNTPLLPVKKPGTNDYRPVQDLREVNKRVQDIHPTVPNPYNLLSSLPPSHTWYSVLDLKDAFFCLKLHPNSQPLFAFEWRDPEKGNTGQLTWTRLPQGFKNSPTLFNEALHRDLASFRALNPQVVMLQYVDDLLVAAPTYRDCKEGTRRLLQELSKLGYRVSAKKAQLCREEVTYLGYLLKGGKRWLTPARKATVMKIPTPTTPRQVREFLGTAGFCRLWIPGFASLAAPLYPLTRPKVPFTWTEAHQEAFGRIKEALLSAPALALPDLTKPFALYVDEKEGVARGVLTQTLGPWRRPVAYLSKKLDPVASGWPTCLKAIAAVALLLKDADKLTLGQNVLVIAPHNLESIVRQPPDRWMTNARMTHYQSLLLNERVSFAPPAILNPATLLPVESDDTPIHICSEILAEETGTRPDLRDQPLPGVPAWYTDGSSFIMDGRRQAGAAIVDNKRTVWASNLPEGTSAQKAELIALTQALRLAEGKSINIYTDSRYAFATAHVHGAIYKQRGWLTSAGKDIKNKEEILALLEAIHLPKRVAIIHCPGHQRGTDPVATGNRKADEAAKQAAQSTRILTETTKNAGKRTADGSEFEKRTADGSEFESPKKKAKVE

SEQ ID NO: 6152 - protein, 2136 aa, synthetic construct
MPAAKRVKLDGGDKKYSIGLDIGTNSVGWAVITDEYKVPSKKFKVLGNTDRHSIKKNLIGALLFDSGETAEATRLKRTARRRYTRRKNRICYLQEIFSNEMAKVDDSFFHRLEESFLVEEDKKHERHPIFGNIVDEVAYHEKYPTIYHLRKKLVDSTDKADLRLIYLALAHMIKFRGHFLIEGDLNPDNSDVDKLFIQLVQTYNQLFEENPINASGVDAKAILSARLSKSRRLENLIAQLPGEKKNGLFGNLIALSLGLTPNFKSNFDLAEDAKLQLSKDTYDDDLDNLLAQIGDQYADLFLAAKNLSDAILLSDILRVNTEITKAPLSASMIKRYDEHHQDLTLLKALVRQQLPEKYKEIFFDQSKNGYAGYIDGGASQEEFYKFIKPILEKMDGTEELLVKLNREDLLRKQRTFDNGSIPHQIHLGELHAILRRQEDFYPFLKDNREKIEKILTFRIPYYVGPLARGNSRFAWMTRKSEETITPWNFEEVVDKGASAQSFIERMTNFDKNLPNEKVLPKHSLLYEYFTVYNELTKVKYVTEGMRKPAFLSGEQKKAIVDLLFKTNRKVTVKQLKEDYFKKIECFDSVEISGVEDRFNASLGTYHDLLKIIKDKDFLDNEENEDILEDIVLTLTLFEDREMIEERLKTYAHLFDDKVMKQLKRRRYTGWGRLSRKLINGIRDKQSGKTILDFLKSDGFANRNFMQLIHDDSLTFKEDIQKAQVSGQGDSLHEHIANLAGSPAIKKGILQTVKVVDELVKVMGRHKPENIVIEMARENQTTQKGQKNSRERMKRIEEGIKELGSQILKEHPVENTQLQNEKLYLYYLQNGRDMYVDQELDINRLSDYDVDHIVPQSFLKDDSIDNKVLTRSDKARGKSDNVPSEEVVKKMKNYWRQLLNAKLITQRKFDNLTKAERGGLSELDKAGFIKRQLVETRQITKHVAQILDSRMNTKYDENDKLIREVKVITLKSKLVSDFRKDFQFYKVREINNYHHAHDAYLNAVVGTALIKKYPKLESEFVYGDYKVYDVRKMIAKSEQEIGKATAKYFFYSNIMNFFKTEITLANGEIRKRPLIETNGETGEIVWDKGRDFATVRKVLSMPQVNIVKKTEVQTGGFSKESILPKRNSDKLIARKKDWDPKKYGGFDSPTVAYSVLVVAKVEKGKSKKLKSVKELLGITIMERSSFEKNPIDFLEAKGYKEVKKDLIIKLPKYSLFELENGRKRMLASAGELQKGNELALPSKYVNFLYLASHYEKLKGSPEDNEQKQLFVEQHKHYLDEIIEQISEFSKRVILADANLDKVLSAYNKHRDKPIREQAENIIHLFTLTNLGAPAAFKYFDTTIDRKRYTSTKEVLDATLIHQSITGLYETRIDLSQLGGDGGGGGGSGGGGSGGGGSGGGGSGGLLGRDLLTKLKAQIQFSTEGPQVTWEDRPAMCLVLNLEEEYRLHEKPVPPSIDPSWLQLFPMVWAEKAGMGLANQVPPVVVELKSDASPVAVRQYPMSKEAREGIRPHIQRFLDLGILVPCQSPWNTPLLPVKKPGTNDYRPVQDLREVNKRVQDIHPTVPNPYNLLSSLPPSHTWYSVLDLKDAFFCLKLHPNSQPLFAFEWRDPEKGNTGQLTWTRLPQGFKNSPTLFNEALHRDLASFRALNPQVVMLQYVDDLLVAAPTYRDCKEGTRRLLQELSKLGYRVSAKKAQLCREEVTYLGYLLKGGKRWLTPARKATVMKIPTPTTPRQVREFLGKAGFCRLFIPGFASLAAPLYPLTRPKVPFTWTEAHQEAFGRIKEALLSAPALALPDLTKPFALYVDEKEGVARGVLTQTLGPWRRPVAYLSKKLDPVASGWPTCLKAIAAVALLLKDADKLTLGQNVLVIAPHNLESIVRQPPDRWMTNARMTHYQSLLLNERVSFAPPAILNPATLLPVESDDTPIHICSEILAEETGTRPDLRDQPLPGVPAWYTDGSSFIMDGRRQAGAAIVDNKRTVWASNLPEGTSAQKAELIALTQALRLAEGKSINIYTDSRYAFATAHVHGAIYKQRGWLTSAGKDIKNKEEILALLEAIHLPKRVAIIHCPGHQRGTDPVATGNRKADEAAKQAAQSTRILTETTKNAGKRTADGSEFEKRTADGSEFESPKKKAKVE

SEQ ID NO: 6153 - protein, 2227 aa, synthetic construct
MPAAKRVKLDGGDKKYSIGLDIGTNSVGWAVITDEYKVPSKKFKVLGNTDRHSIKKNLIGALLFDSGETAEATRLKRTARRRYTRRKNRICYLQEIFSNEMAKVDDSFFHRLEESFLVEEDKKHERHPIFGNIVDEVAYHEKYPTIYHLRKKLVDSTDKADLRLIYLALAHMIKFRGHFLIEGDLNPDNSDVDKLFIQLVQTYNQLFEENPINASGVDAKAILSARLSKSRRLENLIAQLPGEKKNGLFGNLIALSLGLTPNFKSNFDLAEDAKLQLSKDTYDDDLDNLLAQIGDQYADLFLAAKNLSDAILLSDILRVNTEITKAPLSASMIKRYDEHHQDLTLLKALVRQQLPEKYKEIFFDQSKNGYAGYIDGGASQEEFYKFIKPILEKMDGTEELLVKLNREDLLRKQRTFDNGSIPHQIHLGELHAILRRQEDFYPFLKDNREKIEKILTFRIPYYVGPLARGNSRFAWMTRKSEETITPWNFEEVVDKGASAQSFIERMTNFDKNLPNEKVLPKHSLLYEYFTVYNELTKVKYVTEGMRKPAFLSGEQKKAIVDLLFKTNRKVTVKQLKEDYFKKIECFDSVEISGVEDRFNASLGTYHDLLKIIKDKDFLDNEENEDILEDIVLTLTLFEDREMIEERLKTYAHLFDDKVMKQLKRRRYTGWGRLSRKLINGIRDKQSGKTILDFLKSDGFANRNFMQLIHDDSLTFKEDIQKAQVSGQGDSLHEHIANLAGSPAIKKGILQTVKVVDELVKVMGRHKPENIVIEMARENQTTQKGQKNSRERMKRIEEGIKELGSQILKEHPVENTQLQNEKLYLYYLQNGRDMYVDQELDINRLSDYDVDHIVPQSFLKDDSIDNKVLTRSDKARGKSDNVPSEEVVKKMKNYWRQLLNAKLITQRKFDNLTKAERGGLSELDKAGFIKRQLVETRQITKHVAQILDSRMNTKYDENDKLIREVKVITLKSKLVSDFRKDFQFYKVREINNYHHAHDAYLNAVVGTALIKKYPKLESEFVYGDYKVYDVRKMIAKSEQEIGKATAKYFFYSNIMNFFKTEITLANGEIRKRPLIETNGETGEIVWDKGRDFATVRKVLSMPQVNIVKKTEVQTGGFSKESILPKRNSDKLIARKKDWDPKKYGGFDSPTVAYSVLVVAKVEKGKSKKLKSVKELLGITIMERSSFEKNPIDFLEAKGYKEVKKDLIIKLPKYSLFELENGRKRMLASAGELQKGNELALPSKYVNFLYLASHYEKLKGSPEDNEQKQLFVEQHKHYLDEIIEQISEFSKRVILADANLDKVLSAYNKHRDKPIREQAENIIHLFTLTNLGAPAAFKYFDTTIDRKRYTSTKEVLDATLIHQSITGLYETRIDLSQLGGDGGGGGGSGGGGSGGGGSGGGGSGGTLGDQGSRGSDPLPEPRVTLTVEGIPTEFLVNTGAEHSVLTKPMGKMGSKRTVVAGATGSKVYPWTTKRLLKIGQKQVTHSFLVIPECPAPLLGRDLLTKLKAQIQFSTEGPQVTWEDRPAMCLVLNLEEEYRLHEKPVPPSIDPSWLQLFPMVWAEKAGMGLANQVPPVVVELKSDASPVAVRQYPMSKEAREGIRPHIQRFLDLGILVPCQSPWNTPLLPVKKPGTNDYRPVQDLREVNKRVQDIHPTVPNPYNLLSSLPPSHTWYSVLDLKDAFFCLKLHPNSQPLFAFEWRDPEKGNTGQLTWTRLPQGFKNSPTLFNEALHRDLASFRALNPQVVMLQYVDDLLVAAPTYRDCKEGTRRLLQELSKLGYRVSAKKAQLCREEVTYLGYLLKGGKRWLTPARKATVMKIPTPTTPRQVREFLGTAGFCRLWIPGFASLAAPLYPLTRPKVPFTWTEAHQEAFGRIKEALLSAPALALPDLTKPFALYVDEKEGVARGVLTQTLGPWRRPVAYLSKKLDPVASGWPTCLKAIAAVALLLKDADKLTLGQNVLVIAPHNLESIVRQPPDRWMTNARMTHYQSLLLNERVSFAPPAILNPATLLPVESDDTPIHICSEILAEETGTRPDLRDQPLPGVPAWYTDGSSFIMDGRRQAGAAIVDNKRTVWASNLPEGTSAQKAELIALTQALRLAEGKSINIYTDSRYAFATAHVHGAIYKQRGWLTSAGKDIKNKEEILALLEAIHLPKRVAIIHCPGHQRGTDPVATGNRKADEAAKQAAQSTRILTETTKNAGKRTADGSEFEKRTADGSEFESPKKKAKVE

SEQ ID NO: 6154 - protein, 2105 aa, synthetic construct
MPAAKRVKLDGGDKKYSIGLDIGTNSVGWAVITDEYKVPSKKFKVLGNTDRHSIKKNLIGALLFDSGETAEATRLKRTARRRYTRRKNRICYLQEIFSNEMAKVDDSFFHRLEESFLVEEDKKHERHPIFGNIVDEVAYHEKYPTIYHLRKKLVDSTDKADLRLIYLALAHMIKFRGHFLIEGDLNPDNSDVDKLFIQLVQTYNQLFEENPINASGVDAKAILSARLSKSRRLENLIAQLPGEKKNGLFGNLIALSLGLTPNFKSNFDLAEDAKLQLSKDTYDDDLDNLLAQIGDQYADLFLAAKNLSDAILLSDILRVNTEITKAPLSASMIKRYDEHHQDLTLLKALVRQQLPEKYKEIFFDQSKNGYAGYIDGGASQEEFYKFIKPILEKMDGTEELLVKLNREDLLRKQRTFDNGSIPHQIHLGELHAILRRQEDFYPFLKDNREKIEKILTFRIPYYVGPLARGNSRFAWMTRKSEETITPWNFEEVVDKGASAQSFIERMTNFDKNLPNEKVLPKHSLLYEYFTVYNELTKVKYVTEGMRKPAFLSGEQKKAIVDLLFKTNRKVTVKQLKEDYFKKIECFDSVEISGVEDRFNASLGTYHDLLKIIKDKDFLDNEENEDILEDIVLTLTLFEDREMIEERLKTYAHLFDDKVMKQLKRRRYTGWGRLSRKLINGIRDKQSGKTILDFLKSDGFANRNFMQLIHDDSLTFKEDIQKAQVSGQGDSLHEHIANLAGSPAIKKGILQTVKVVDELVKVMGRHKPENIVIEMARENQTTQKGQKNSRERMKRIEEGIKELGSQILKEHPVENTQLQNEKLYLYYLQNGRDMYVDQELDINRLSDYDVDHIVPQSFLKDDSIDNKVLTRSDKARGKSDNVPSEEVVKKMKNYWRQLLNAKLITQRKFDNLTKAERGGLSELDKAGFIKRQLVETRQITKHVAQILDSRMNTKYDENDKLIREVKVITLKSKLVSDFRKDFQFYKVREINNYHHAHDAYLNAVVGTALIKKYPKLESEFVYGDYKVYDVRKMIAKSEQEIGKATAKYFFYSNIMNFFKTEITLANGEIRKRPLIETNGETGEIVWDKGRDFATVRKVLSMPQVNIVKKTEVQTGGFSKESILPKRNSDKLIARKKDWDPKKYGGFDSPTVAYSVLVVAKVEKGKSKKLKSVKELLGITIMERSSFEKNPIDFLEAKGYKEVKKDLIIKLPKYSLFELENGRKRMLASAGELQKGNELALPSKYVNFLYLASHYEKLKGSPEDNEQKQLFVEQHKHYLDEIIEQISEFSKRVILADANLDKVLSAYNKHRDKPIREQAENIIHLFTLTNLGAPAAFKYFDTTIDRKRYTSTKEVLDATLIHQSITGLYETRIDLSQLGGDGGGGGGSGGGGSGGGGSGGGGSGGTLNIEDEYRLHETSKEPDVSLGSTWLSDFPQAWAETGGMGLAVRQAPLIIPLKATSTPVSIKQYPMSQEARLGIKPHIQRLLDQGILVPCQSPWNTPLLPVKKPGTNDYRPVQDLREVNKRVEDIHPTVPNPYNLLSGLPPSHQWYTVLDLKDAFFCLRLHPTSQPLFAFEWRDPEMGISGQLTWTRLPQGFKNSPTLFNEALHRDLAGFRIQHPDLILLQYVDDLLLAATSELDCQQGTRALLQTLGDLGYRASAKKAQICQKQVKYLGYLLKEGQRWLTEARKETVMGQPIPKTPRQLREFLGTAGFCRLWIPGFAEMAAPLYPLTKPGTLFNWGPDQQKAFQEIKQALLTAPALGLPDLTKPFELFVDEKQGYAKGVLTQKLGPWRRPVAYLSKKLDPVAAGWPPCLRMVAAIAVLTKDAGKLTMGQPLVILAPHAVEALVKQPPDRWLSNARMTHYQALLLDTDRVQFGPVVALNPATLLPLPEEGLQHDCLDILAEAHGTRSDLMDQPLPDADHTWYTDGSSFLQEGQRKAGAAVTTETEVIWARALPAGTSAQRAELIALTQALKMAEGKKLNVYTDSRYAFATAHIHGEIYRRRGWLTSEGKEIKNKDEILALLKALFLPKRLSIIHCPGHQKGNSAEARGNRMADQAAREVATRETPETSTLLAGKRTADGSEFEKRTADGSEFESPKKKAKVE

SEQ ID NO: 6155 - protein, 2105 aa, synthetic construct
MPAAKRVKLDGGDKKYSIGLDIGTNSVGWAVITDEYKVPSKKFKVLGNTDRHSIKKNLIGALLFDSGETAEATRLKRTARRRYTRRKNRICYLQEIFSNEMAKVDDSFFHRLEESFLVEEDKKHERHPIFGNIVDEVAYHEKYPTIYHLRKKLVDSTDKADLRLIYLALAHMIKFRGHFLIEGDLNPDNSDVDKLFIQLVQTYNQLFEENPINASGVDAKAILSARLSKSRRLENLIAQLPGEKKNGLFGNLIALSLGLTPNFKSNFDLAEDAKLQLSKDTYDDDLDNLLAQIGDQYADLFLAAKNLSDAILLSDILRVNTEITKAPLSASMIKRYDEHHQDLTLLKALVRQQLPEKYKEIFFDQSKNGYAGYIDGGASQEEFYKFIKPILEKMDGTEELLVKLNREDLLRKQRTFDNGSIPHQIHLGELHAILRRQEDFYPFLKDNREKIEKILTFRIPYYVGPLARGNSRFAWMTRKSEETITPWNFEEVVDKGASAQSFIERMTNFDKNLPNEKVLPKHSLLYEYFTVYNELTKVKYVTEGMRKPAFLSGEQKKAIVDLLFKTNRKVTVKQLKEDYFKKIECFDSVEISGVEDRFNASLGTYHDLLKIIKDKDFLDNEENEDILEDIVLTLTLFEDREMIEERLKTYAHLFDDKVMKQLKRRRYTGWGRLSRKLINGIRDKQSGKTILDFLKSDGFANRNFMQLIHDDSLTFKEDIQKAQVSGQGDSLHEHIANLAGSPAIKKGILQTVKVVDELVKVMGRHKPENIVIEMARENQTTQKGQKNSRERMKRIEEGIKELGSQILKEHPVENTQLQNEKLYLYYLQNGRDMYVDQELDINRLSDYDVDHIVPQSFLKDDSIDNKVLTRSDKARGKSDNVPSEEVVKKMKNYWRQLLNAKLITQRKFDNLTKAERGGLSELDKAGFIKRQLVETRQITKHVAQILDSRMNTKYDENDKLIREVKVITLKSKLVSDFRKDFQFYKVREINNYHHAHDAYLNAVVGTALIKKYPKLESEFVYGDYKVYDVRKMIAKSEQEIGKATAKYFFYSNIMNFFKTEITLANGEIRKRPLIETNGETGEIVWDKGRDFATVRKVLSMPQVNIVKKTEVQTGGFSKESILPKRNSDKLIARKKDWDPKKYGGFDSPTVAYSVLVVAKVEKGKSKKLKSVKELLGITIMERSSFEKNPIDFLEAKGYKEVKKDLIIKLPKYSLFELENGRKRMLASAGELQKGNELALPSKYVNFLYLASHYEKLKGSPEDNEQKQLFVEQHKHYLDEIIEQISEFSKRVILADANLDKVLSAYNKHRDKPIREQAENIIHLFTLTNLGAPAAFKYFDTTIDRKRYTSTKEVLDATLIHQSITGLYETRIDLSQLGGDGGGGGGSGGGGSGGGGSGGGGSGGTLNIEDEYRLHETSKGPDVPLGSTWLSDFPQAWAETGGMGLAVRQAPLIIPLKATSTPVSIKQYPMSQEARLGIKPHIQRLLDQGILVPCQSPWNTPLLPVKKPGTNDYRPVQDLREVNKRVEDIHPTVPNPYNLLSGLPPSHQWYTVLDLKDAFFCLRLHPTSQSLFAFEWRDPEMGISGQLTWTRLPQGFKNSPTLFNEALHRDLADFRIQHPDLILLQYVDDLLLAATSELDCQQGTRALLQTLGDLGYRASAKKAQICQKQVKYLGYLLKEGQRWLTEARKETVMGQPTPKTPRQLREFLGKAGFCRLFIPGFAEMAAPLYPLTKPGTLFEWGPDQQKAYQEIKQALLTAPALGLPDLTKPFELFVDEKQGYAKGVLTQKLGPWRRPVAYLSKKLDPVAAGWPPCLRMVAAIAVLTKDAGKLTMGQPLVILAPHAVEALVKQPPDRWLSNARMTHYQALLLDTDRVQFGPIVALNPATLLPLPEEGLQHDCLDILAEAHGTRPDLTDQPLPDADHTWYTDGSSFLQEGQRKAGAAVTTETEVVWAKALPAGTSAQRAELIALTQALKMAEGKKLNVYTDSRYAFATAHIHGEIYRRRGWLTSEGKEIKNKDEILALLKALFLPKRLSIIHCPGHQKGNRAEARGNRMADQAAREVATRETPETSTLLAGKRTADGSEFEKRTADGSEFESPKKKAKVE

SEQ ID NO: 6156 - protein, 2105 aa, synthetic construct
MPAAKRVKLDGGDKKYSIGLDIGTNSVGWAVITDEYKVPSKKFKVLGNTDRHSIKKNLIGALLFDSGETAEATRLKRTARRRYTRRKNRICYLQEIFSNEMAKVDDSFFHRLEESFLVEEDKKHERHPIFGNIVDEVAYHEKYPTIYHLRKKLVDSTDKADLRLIYLALAHMIKFRGHFLIEGDLNPDNSDVDKLFIQLVQTYNQLFEENPINASGVDAKAILSARLSKSRRLENLIAQLPGEKKNGLFGNLIALSLGLTPNFKSNFDLAEDAKLQLSKDTYDDDLDNLLAQIGDQYADLFLAAKNLSDAILLSDILRVNTEITKAPLSASMIKRYDEHHQDLTLLKALVRQQLPEKYKEIFFDQSKNGYAGYIDGGASQEEFYKFIKPILEKMDGTEELLVKLNREDLLRKQRTFDNGSIPHQIHLGELHAILRRQEDFYPFLKDNREKIEKILTFRIPYYVGPLARGNSRFAWMTRKSEETITPWNFEEVVDKGASAQSFIERMTNFDKNLPNEKVLPKHSLLYEYFTVYNELTKVKYVTEGMRKPAFLSGEQKKAIVDLLFKTNRKVTVKQLKEDYFKKIECFDSVEISGVEDRFNASLGTYHDLLKIIKDKDFLDNEENEDILEDIVLTLTLFEDREMIEERLKTYAHLFDDKVMKQLKRRRYTGWGRLSRKLINGIRDKQSGKTILDFLKSDGFANRNFMQLIHDDSLTFKEDIQKAQVSGQGDSLHEHIANLAGSPAIKKGILQTVKVVDELVKVMGRHKPENIVIEMARENQTTQKGQKNSRERMKRIEEGIKELGSQILKEHPVENTQLQNEKLYLYYLQNGRDMYVDQELDINRLSDYDVDHIVPQSFLKDDSIDNKVLTRSDKARGKSDNVPSEEVVKKMKNYWRQLLNAKLITQRKFDNLTKAERGGLSELDKAGFIKRQLVETRQITKHVAQILDSRMNTKYDENDKLIREVKVITLKSKLVSDFRKDFQFYKVREINNYHHAHDAYLNAVVGTALIKKYPKLESEFVYGDYKVYDVRKMIAKSEQEIGKATAKYFFYSNIMNFFKTEITLANGEIRKRPLIETNGETGEIVWDKGRDFATVRKVLSMPQVNIVKKTEVQTGGFSKESILPKRNSDKLIARKKDWDPKKYGGFDSPTVAYSVLVVAKVEKGKSKKLKSVKELLGITIMERSSFEKNPIDFLEAKGYKEVKKDLIIKLPKYSLFELENGRKRMLASAGELQKGNELALPSKYVNFLYLASHYEKLKGSPEDNEQKQLFVEQHKHYLDEIIEQISEFSKRVILADANLDKVLSAYNKHRDKPIREQAENIIHLFTLTNLGAPAAFKYFDTTIDRKRYTSTKEVLDATLIHQSITGLYETRIDLSQLGGDGGGGGGSGGGGSGGGGSGGGGSGGTLNIEDEHRLHETSKEPDVSLGSTWLSDFPQAWAETGGMGLAVRQAPLIIPLKATSTPVSIKQYPMSQEARLGIKPHIQRLLDQGILVPCQSPWNTPLLPVKKPGTNDYRPVQDLREVNKRVEDIHPTVPNPYNLLSGLPPSHQWYTVLDLKDAFFCLRLHPTSQPLFAFEWRDPEMGISGQLTWTRLPQGFKNSPTLFDEALHRDLADFRIQHPDLILLQYVDDLLLAATSELDCQQGTRALLQTLGNLGYRASAKKAQICQKQVKYLGYLLKEGQRWLTEARKETVMGQPTPKTPRQLREFLGTAGFCRLWIPGFAEMAAPLYPLTKTGTLFNWGPDQQKAYQEIKQALLTAPALGLPDLTKPFELFVDEKQGYAKGVLTQKLGPWRRPVAYLSKKLDPVAAGWPPCLRMVAAIAVLTKDAGKLTMGQPLVILAPHAVEALVKQPPDRWLSNARMTHYQALLLDTDRVQFGPVVALNPATLLPLPEEGLQHNCLDILAEAHGTRPDLTDQPLPDADHTWYTDGSSLLQEGQRKAGAAVTTETEVIWAKALPAGTSAQRAELIALTQALKMAEGKKLNVYTDSRYAFATAHIHGEIYRRRGLLTSEGKEIKNKDEILALLKALFLPKRLSIIHCPGHQKGHSAEARGNRMADQAARKAAITETPDTSTLLAGKRTADGSEFEKRTADGSEFESPKKKAKVE

SEQ ID NO: 6157 - protein, 2033 aa, synthetic construct
MPAAKRVKLDGGDKKYSIGLDIGTNSVGWAVITDEYKVPSKKFKVLGNTDRHSIKKNLIGALLFDSGETAEATRLKRTARRRYTRRKNRICYLQEIFSNEMAKVDDSFFHRLEESFLVEEDKKHERHPIFGNIVDEVAYHEKYPTIYHLRKKLVDSTDKADLRLIYLALAHMIKFRGHFLIEGDLNPDNSDVDKLFIQLVQTYNQLFEENPINASGVDAKAILSARLSKSRRLENLIAQLPGEKKNGLFGNLIALSLGLTPNFKSNFDLAEDAKLQLSKDTYDDDLDNLLAQIGDQYADLFLAAKNLSDAILLSDILRVNTEITKAPLSASMIKRYDEHHQDLTLLKALVRQQLPEKYKEIFFDQSKNGYAGYIDGGASQEEFYKFIKPILEKMDGTEELLVKLNREDLLRKQRTFDNGSIPHQIHLGELHAILRRQEDFYPFLKDNREKIEKILTFRIPYYVGPLARGNSRFAWMTRKSEETITPWNFEEVVDKGASAQSFIERMTNFDKNLPNEKVLPKHSLLYEYFTVYNELTKVKYVTEGMRKPAFLSGEQKKAIVDLLFKTNRKVTVKQLKEDYFKKIECFDSVEISGVEDRFNASLGTYHDLLKIIKDKDFLDNEENEDILEDIVLTLTLFEDREMIEERLKTYAHLFDDKVMKQLKRRRYTGWGRLSRKLINGIRDKQSGKTILDFLKSDGFANRNFMQLIHDDSLTFKEDIQKAQVSGQGDSLHEHIANLAGSPAIKKGILQTVKVVDELVKVMGRHKPENIVIEMARENQTTQKGQKNSRERMKRIEEGIKELGSQILKEHPVENTQLQNEKLYLYYLQNGRDMYVDQELDINRLSDYDVDHIVPQSFLKDDSIDNKVLTRSDKARGKSDNVPSEEVVKKMKNYWRQLLNAKLITQRKFDNLTKAERGGLSELDKAGFIKRQLVETRQITKHVAQILDSRMNTKYDENDKLIREVKVITLKSKLVSDFRKDFQFYKVREINNYHHAHDAYLNAVVGTALIKKYPKLESEFVYGDYKVYDVRKMIAKSEQEIGKATAKYFFYSNIMNFFKTEITLANGEIRKRPLIETNGETGEIVWDKGRDFATVRKVLSMPQVNIVKKTEVQTGGFSKESILPKRNSDKLIARKKDWDPKKYGGFDSPTVAYSVLVVAKVEKGKSKKLKSVKELLGITIMERSSFEKNPIDFLEAKGYKEVKKDLIIKLPKYSLFELENGRKRMLASAGELQKGNELALPSKYVNFLYLASHYEKLKGSPEDNEQKQLFVEQHKHYLDEIIEQISEFSKRVILADANLDKVLSAYNKHRDKPIREQAENIIHLFTLTNLGAPAAFKYFDTTIDRKRYTSTKEVLDATLIHQSITGLYETRIDLSQLGGDGGGGGGSGGGGSGGGGSGGGGSGGGRDIMKDIKVRLMTDSPDDSQDLMIGAIESNLFADQISWKSDQPVWLNQWPLKQEKLQALQQLVTEQLQLGHLEESNSPWNTPVFVIKKKSGKWRLLQDLRAVNATMHDMGALQPGLPSPVAVPKGWEIIIIDLQDCFFNIKLHPEDCKRFAFSVPSPNFKRPYQRFQWKVLPQGMKNSPTLCQKFVDKAILTVRDKYQDSYIVHYMDDILLAHPSRSIVDEILTSMIQALNKHGLVVSTEKIQKYDNLKYLGTHIQGDSVSYQKLQIRTDKLRTLNDFQKLLGNINWIRPFLKLTTGELKPLFEILNGDSNPISTRKLTPEACKALQLMNERLSTARVKRLDLSQPWSLCILKTEYTPTACLWQDGVVEWIHLPHISPKVITPYDIFCTQLIIKGRHRSKELFSKDPDYIVVPYTKVQFDLLLQEKEDWPISLLGFLGEVHFHLPKDPLLTFTLQTAIIFPHMTSTTPLEKGIVIFTDGSANGRSVTYIQGREPIIKENTQNTAQQAEIVAVITAFEEVSQPFNLYTDSKYVTGLFPEIETATLSPRTKIYTELKHLQRLIHKRQEKFYIGHIRGHTGLPGPLAQGNAYADSLTRILTAGKRTADGSEFEKRTADGSEFESPKKKAKVE

SEQ ID NO: 6158 - protein, 2097 aa, synthetic construct
MPAAKRVKLDGGDKKYSIGLDIGTNSVGWAVITDEYKVPSKKFKVLGNTDRHSIKKNLIGALLFDSGETAEATRLKRTARRRYTRRKNRICYLQEIFSNEMAKVDDSFFHRLEESFLVEEDKKHERHPIFGNIVDEVAYHEKYPTIYHLRKKLVDSTDKADLRLIYLALAHMIKFRGHFLIEGDLNPDNSDVDKLFIQLVQTYNQLFEENPINASGVDAKAILSARLSKSRRLENLIAQLPGEKKNGLFGNLIALSLGLTPNFKSNFDLAEDAKLQLSKDTYDDDLDNLLAQIGDQYADLFLAAKNLSDAILLSDILRVNTEITKAPLSASMIKRYDEHHQDLTLLKALVRQQLPEKYKEIFFDQSKNGYAGYIDGGASQEEFYKFIKPILEKMDGTEELLVKLNREDLLRKQRTFDNGSIPHQIHLGELHAILRRQEDFYPFLKDNREKIEKILTFRIPYYVGPLARGNSRFAWMTRKSEETITPWNFEEVVDKGASAQSFIERMTNFDKNLPNEKVLPKHSLLYEYFTVYNELTKVKYVTEGMRKPAFLSGEQKKAIVDLLFKTNRKVTVKQLKEDYFKKIECFDSVEISGVEDRFNASLGTYHDLLKIIKDKDFLDNEENEDILEDIVLTLTLFEDREMIEERLKTYAHLFDDKVMKQLKRRRYTGWGRLSRKLINGIRDKQSGKTILDFLKSDGFANRNFMQLIHDDSLTFKEDIQKAQVSGQGDSLHEHIANLAGSPAIKKGILQTVKVVDELVKVMGRHKPENIVIEMARENQTTQKGQKNSRERMKRIEEGIKELGSQILKEHPVENTQLQNEKLYLYYLQNGRDMYVDQELDINRLSDYDVDHIVPQSFLKDDSIDNKVLTRSDKARGKSDNVPSEEVVKKMKNYWRQLLNAKLITQRKFDNLTKAERGGLSELDKAGFIKRQLVETRQITKHVAQILDSRMNTKYDENDKLIREVKVITLKSKLVSDFRKDFQFYKVREINNYHHAHDAYLNAVVGTALIKKYPKLESEFVYGDYKVYDVRKMIAKSEQEIGKATAKYFFYSNIMNFFKTEITLANGEIRKRPLIETNGETGEIVWDKGRDFATVRKVLSMPQVNIVKKTEVQTGGFSKESILPKRNSDKLIARKKDWDPKKYGGFDSPTVAYSVLVVAKVEKGKSKKLKSVKELLGITIMERSSFEKNPIDFLEAKGYKEVKKDLIIKLPKYSLFELENGRKRMLASAGELQKGNELALPSKYVNFLYLASHYEKLKGSPEDNEQKQLFVEQHKHYLDEIIEQISEFSKRVILADANLDKVLSAYNKHRDKPIREQAENIIHLFTLTNLGAPAAFKYFDTTIDRKRYTSTKEVLDATLIHQSITGLYETRIDLSQLGGDGGGGGGSGGGGSGGGGSGGGGSGGLDDEYRLYSPLVKPDQNIQFWLEQFPQAWAETAGMGLAKQVPPQVIQLKASATPVSVRQYPLSKEAQEGIRPHVQRLIQQGILVPVQSPWNTPLLPVRKPGTNDYRPVQDLREVNKRVQDIHPTVPNPYNLLCALPPQRSWYTVLDLKDAFFCLRLHPTSQPLFAFEWRDPGTGRTGQLTWTRLPQGFKNSPTIFNEALHRDLANFRIQHPQVTLLQYVDDLLLAGATKQDCLEGTKALLLELSDLGYRASAKKAQICRREVTYLGYSLRDGQRWLTEARKKTVVQIPAPTTAKQVREFLGKAGFCRLFIPGFATLAAPLYPLTKPKGEFSWAPEHQKAFDAIKKALLSAPALALPDVTKPFTLYVDERKGVARGVLTQTLGPWRRPVAYLSKKLDPVASGWPVCLKAIAAVAILVKDADKLTLGQNITVIAPHALENIVRQPPDRWMTNARMTHYQSLLLTERVTFAPPAALNPATLLPEETDEPVTHDCHQLLIEETGVRKDLTDIPLTGEVLTWFTDGSSYVVEGKRMAGAAVVDGTRTIWASSLPEGTSAQKAELMALTQALRLAEGKSINIYTDSRYAFATAHVHGAIYKQRGWLTSAGREIKNKEEILSLLEALHLPKRLAIIHCPGHQKAKDPISRGNQMADRVAKQAAQGVNLLPAGKRTADGSEFEKRTADGSEFESPKKKAKVE

SEQ ID NO: 6159 - protein, 2097 aa, synthetic construct; identical to SEQ ID NO: 6158

SEQ ID NO: 6160 - protein, 2096 aa, synthetic construct
MPAAKRVKLDGGDKKYSIGLDIGTNSVGWAVITDEYKVPSKKFKVLGNTDRHSIKKNLIGALLFDSGETAEATRLKRTARRRYTRRKNRICYLQEIFSNEMAKVDDSFFHRLEESFLVEEDKKHERHPIFGNIVDEVAYHEKYPTIYHLRKKLVDSTDKADLRLIYLALAHMIKFRGHFLIEGDLNPDNSDVDKLFIQLVQTYNQLFEENPINASGVDAKAILSARLSKSRRLENLIAQLPGEKKNGLFGNLIALSLGLTPNFKSNFDLAEDAKLQLSKDTYDDDLDNLLAQIGDQYADLFLAAKNLSDAILLSDILRVNTEITKAPLSASMIKRYDEHHQDLTLLKALVRQQLPEKYKEIFFDQSKNGYAGYIDGGASQEEFYKFIKPILEKMDGTEELLVKLNREDLLRKQRTFDNGSIPHQIHLGELHAILRRQEDFYPFLKDNREKIEKILTFRIPYYVGPLARGNSRFAWMTRKSEETITPWNFEEVVDKGASAQSFIERMTNFDKNLPNEKVLPKHSLLYEYFTVYNELTKVKYVTEGMRKPAFLSGEQKKAIVDLLFKTNRKVTVKQLKEDYFKKIECFDSVEISGVEDRFNASLGTYHDLLKIIKDKDFLDNEENEDILEDIVLTLTLFEDREMIEERLKTYAHLFDDKVMKQLKRRRYTGWGRLSRKLINGIRDKQSGKTILDFLKSDGFANRNFMQLIHDDSLTFKEDIQKAQVSGQGDSLHEHIANLAGSPAIKKGILQTVKVVDELVKVMGRHKPENIVIEMARENQTTQKGQKNSRERMKRIEEGIKELGSQILKEHPVENTQLQNEKLYLYYLQNGRDMYVDQELDINRLSDYDVDHIVPQSFLKDDSIDNKVLTRSDKARGKSDNVPSEEVVKKMKNYWRQLLNAKLITQRKFDNLTKAERGGLSELDKAGFIKRQLVETRQITKHVAQILDSRMNTKYDENDKLIREVKVITLKSKLVSDFRKDFQFYKVREINNYHHAHDAYLNAVVGTALIKKYPKLESEFVYGDYKVYDVRKMIAKSEQEIGKATAKYFFYSNIMNFFKTEITLANGEIRKRPLIETNGETGEIVWDKGRDFATVRKVLSMPQVNIVKKTEVQTGGFSKESILPKRNSDKLIARKKDWDPKKYGGFDSPTVAYSVLVVAKVEKGKSKKLKSVKELLGITIMERSSFEKNPIDFLEAKGYKEVKKDLIIKLPKYSLFELENGRKRMLASAGELQKGNELALPSKYVNFLYLASHYEKLKGSPEDNEQKQLFVEQHKHYLDEIIEQISEFSKRVILADANLDKVLSAYNKHRDKPIREQAENIIHLFTLTNLGAPAAFKYFDTTIDRKRYTSTKEVLDATLIHQSITGLYETRIDLSQLGGDGGGGGGSGGGGSGGGGSGGGGSGGVPWLMKKPLQLTVLVPLHEYQERLLQQTALPKEQKELLQKLFLKYDALWQHWENQVGHRRIKPHNIATGTLAPRPQKQYPINPKAKPSIQIVIDDLLKQGVLIQQNSTMNTPVYPVPKPDGKWRMVLDYREVNKTIPLIAAQNQHSAGILSSIYRGKYKTTLDLTNGFWAHPITPESYWLTAFTWQGKQYCWTRLPQGFLNSPALFTADVVDLLKEIPNVQAYVDDIYISHDDPQEHLEQLEKIFSILLNAGYVVSLKKSEIAQREVEFLGFNITKEGRGLTDTFKQKLLNITPPKDLKQLQSILGLLNFARNFIPNYSELVKPLYTIVANANGKFISWTEDNSNQLQHIISVLNQADNLEERNPETRLIIKVNSSPSAGYIRYYNEGSKRPIMYVNYIFSKAEAKFTQTEKLLTTMHKGLIKAMDLAMGQEILVYSPIVSMTKIQRTPLPERKALPVRWITWMTYLEDPRIQFHYDKSLPELQQIPNVTEDVIAKTKHPSEFAMVFYTDGSAIKHPDVNKSHSAGMGIAQVQFIPEYKIVHQWSIPLGDHTAQLAEIAAVEFACKKALKISGPVLIVTDSFYVAESANKELPYWKSNGFLNNKKKPLRHVSKWKSIAECLQLKPDIIIMHEKGHQQPMTTLHTEGNNLADKLATQGSYVVHAGKRTADGSEFEKRTADGSEFESPKKKAKVE

SEQ ID NO: 6161 - protein, 2185 aa, synthetic construct
MPAAKRVKLDGGDKKYSIGLDIGTNSVGWAVITDEYKVPSKKFKVLGNTDRHSIKKNLIGALLFDSGETAEATRLKRTARRRYTRRKNRICYLQEIFSNEMAKVDDSFFHRLEESFLVEEDKKHERHPIFGNIVDEVAYHEKYPTIYHLRKKLVDSTDKADLRLIYLALAHMIKFRGHFLIEGDLNPDNSDVDKLFIQLVQTYNQLFEENPINASGVDAKAILSARLSKSRRLENLIAQLPGEKKNGLFGNLIALSLGLTPNFKSNFDLAEDAKLQLSKDTYDDDLDNLLAQIGDQYADLFLAAKNLSDAILLSDILRVNTEITKAPLSASMIKRYDEHHQDLTLLKALVRQQLPEKYKEIFFDQSKNGYAGYIDGGASQEEFYKFIKPILEKMDGTEELLVKLNREDLLRKQRTFDNGSIPHQIHLGELHAILRRQEDFYPFLKDNREKIEKILTFRIPYYVGPLARGNSRFAWMTRKSEETITPWNFEEVVDKGASAQSFIERMTNFDKNLPNEKVLPKHSLLYEYFTVYNELTKVKYVTEGMRKPAFLSGEQKKAIVDLLFKTNRKVTVKQLKEDYFKKIECFDSVEISGVEDRFNASLGTYHDLLKIIKDKDFLDNEENEDILEDIVLTLTLFEDREMIEERLKTYAHLFDDKVMKQLKRRRYTGWGRLSRKLINGIRDKQSGKTILDFLKSDGFANRNFMQLIHDDSLTFKEDIQKAQVSGQGDSLHEHIANLAGSPAIKKGILQTVKVVDELVKVMGRHKPENIVIEMARENQTTQKGQKNSRERMKRIEEGIKELGSQILKEHPVENTQLQNEKLYLYYLQNGRDMYVDQELDINRLSDYDVDHIVPQSFLKDDSIDNKVLTRSDKARGKSDNVPSEEVVKKMKNYWRQLLNAKLITQRKFDNLTKAERGGLSELDKAGFIKRQLVETRQITKHVAQILDSRMNTKYDENDKLIREVKVITLKSKLVSDFRKDFQFYKVREINNYHHAHDAYLNAVVGTALIKKYPKLESEFVYGDYKVYDVRKMIAKSEQEIGKATAKYFFYSNIMNFFKTEITLANGEIRKRPLIETNGETGEIVWDKGRDFATVRKVLSMPQVNIVKKTEVQTGGFSKESILPKRNSDKLIARKKDWDPKKYGGFDSPTVAYSVLVVAKVEKGKSKKLKSVKELLGITIMERSSFEKNPIDFLEAKGYKEVKKDLIIKLPKYSLFELENGRKRMLASAGELQKGNELALPSKYVNFLYLASHYEKLKGSPEDNEQKQLFVEQHKHYLDEIIEQISEFSKRVILADANLDKVLSAYNKHRDKPIREQAENIIHLFTLTNLGAPAAFKYFDTTIDRKRYTSTKEVLDATLIHQSITGLYETRIDLSQLGGDGGGGGGSGGGGSGGGGSGGGGSGGMDPLQLLQPLEAEIKGTKLKAHWNSGATITCVPQAFLEEEVPIKNIWIKTIHGEKEQPVYYLTFKIQGRKVEAEVISSPYDYILVSPSDIPWLMKKPLQLTTLVPLQEYEERLLKQTMLTGSYKEKLQSLFLKYDALWQHWENQVGHRRIKPHHIATGTVNPRPQKQYPINPKAKASIQTVINDLLKQGVLIQQNSIMNTPVYPVPKPDGKWRMVLDYREVNKTIPLIAAQNQHSAGILSSIFRGKYKTTLDLSNGFWAHSITPESYWLTAFTWLGQQYCWTRLPQGFLNSPALFTADVVDLLKEVPNVQVYVDDIYISHDDPREHLEQLEKVFSLLLNAGYVVSLKKSEIAQHEVEFLGFNITKEGRGLTETFKQKLLNITPPRDLKQLQSILGLLNFARNFIPNFSELVKPLYNIIATANGKYITWTTDNSQQLQNIISMLNSAENLEERNPEVRLIMKVNTSPSAGYIRFYNEFAKRPIMYLNYVYTKAEVKFTNTEKLLTTIHKGLIKALDLGMGQEILVYSPIVSMTKIQKTPLPERKALPIRWITWMSYLEDPRIQFHYDKTLPELQQVPTVTDDIIAKIKHPSEFSMVFYTDGSAIKHPNVNKSHNAGMGIAQVQFKPEFTVINTWSIPLGDHTAQLAEVAAVEFACKKALKIDGPVLIVTDSFYVAESVNKELPYWQSNGFFNNKKKPLKHVSKWKSIADCIQLKPDIIIIHEKGHQPTASTFHTEGNNLADKLATQGSYVVNAGKRTADGSEFEKRTADGSEFESPKKKAKVE

SEQ ID NO: 6162 - protein, 2096 aa, synthetic construct
MPAAKRVKLDGGDKKYSIGLDIGTNSVGWAVITDEYKVPSKKFKVLGNTDRHSIKKNLIGALLFDSGETAEATRLKRTARRRYTRRKNRICYLQEIFSNEMAKVDDSFFHRLEESFLVEEDKKHERHPIFGNIVDEVAYHEKYPTIYHLRKKLVDSTDKADLRLIYLALAHMIKFRGHFLIEGDLNPDNSDVDKLFIQLVQTYNQLFEENPINASGVDAKAILSARLSKSRRLENLIAQLPGEKKNGLFGNLIALSLGLTPNFKSNFDLAEDAKLQLSKDTYDDDLDNLLAQIGDQYADLFLAAKNLSDAILLSDILRVNTEITKAPLSASMIKRYDEHHQDLTLLKALVRQQLPEKYKEIFFDQSKNGYAGYIDGGASQEEFYKFIKPILEKMDGTEELLVKLNREDLLRKQRTFDNGSIPHQIHLGELHAILRRQEDFYPFLKDNREKIEKILTFRIPYYVGPLARGNSRFAWMTRKSEETITPWNFEEVVDKGASAQSFIERMTNFDKNLPNEKVLPKHSLLYEYFTVYNELTKVKYVTEGMRKPAFLSGEQKKAIVDLLFKTNRKVTVKQLKEDYFKKIECFDSVEISGVEDRFNASLGTYHDLLKIIKDKDFLDNEENEDILEDIVLTLTLFEDREMIEERLKTYAHLFDDKVMKQLKRRRYTGWGRLSRKLINGIRDKQSGKTILDFLKSDGFANRNFMQLIHDDSLTFKEDIQKAQVSGQGDSLHEHIANLAGSPAIKKGILQTVKVVDELVKVMGRHKPENIVIEMARENQTTQKGQKNSRERMKRIEEGIKELGSQILKEHPVENTQLQNEKLYLYYLQNGRDMYVDQELDINRLSDYDVDHIVPQSFLKDDSIDNKVLTRSDKARGKSDNVPSEEVVKKMKNYWRQLLNAKLITQRKFDNLTKAERGGLSELDKAGFIKRQLVETRQITKHVAQILDSRMNTKYDENDKLIREVKVITLKSKLVSDFRKDFQFYKVREINNYHHAHDAYLNAVVGTALIKKYPKLESEFVYGDYKVYDVRKMIAKSEQEIGKATAKYFFYSNIMNFFKTEITLANGEIRKRPLIETNGETGEIVWDKGRDFATVRKVLSMPQVNIVKKTEVQTGGFSKESILPKRNSDKLIARKKDWDPKKYGGFDSPTVAYSVLVVAKVEKGKSKKLKSVKELLGITIMERSSFEKNPIDFLEAKGYKEVKKDLIIKLPKYSLFELENGRKRMLASAGELQKGNELALPSKYVNFLYLASHYEKLKGSPEDNEQKQLFVEQHKHYLDEIIEQISEFSKRVILADANLDKVLSAYNKHRDKPIREQAENIIHLFTLTNLGAPAAFKYFDTTIDRKRYTSTKEVLDATLIHQSITGLYETRIDLSQLGGDGGGGGGSGGGGSGGGGSGGGGSGGIPWLMKKPLQLTTLVPLQEYEERLLKQTMLTGSYKEKLQSLFLKYDALWQHWENQVGHRRIKPHHIATGTVNPRPQKQYPINPKAKASIQTVINDLLKQGVLIQQNSIMNTPVYPVPKPDGKWRMVLDYREVNKTIPLIAAQNQHSAGILSSIFRGKYKTTLDLSNGFWAHSITPESYWLTAFTWLGQQYCWTRLPQGFLNSPALFNADVVDLLKEVPNVQVYVDDIYISHDDPREHLEQLEKVFSLLLNAGYVVSLKKSEIAQHEVEFLGFNITKEGRGLTETFKQKLLNITPPRDLKQLQSILGKLNFARNFIPNFSELVKPLYNIIATAPGKYITWTTDNSQQLQNIISMLNSAENLEERNPEVRLIMKVNTSPSAGYIRFYNEFAKRPIMYLNYVYTKAEVKFTNTEKLLTTIHKGLIKALDLGMGQEILVYSPIVSMTKIQKTPLPERKALPIRWITWMSYLEDPRIQFHYDKTLPELQQVPTVTDDIIAKIKHPSEFSMVFYTDGSAIKHPNVNKSHNAGMGIAQVQFKPEFTVINTWSIPLGDHTAQLAEVAAVEFACKKALKIDGPVLIVTDSFYVAESVNKELPYWQSNGFFNNKKKPLKHVSKWKSIADCIQLKPDIIIIHEKGHQPTASTFHTEGNNLADKLATQGSYVVNAGKRTADGSEFEKRTADGSEFESPKKKAKVE

SEQ ID NO: 6163 - protein, 2103 aa, synthetic construct
MPAAKRVKLDGGDKKYSIGLDIGTNSVGWAVITDEYKVPSKKFKVLGNTDRHSIKKNLIGALLFDSGETAEATRLKRTARRRYTRRKNRICYLQEIFSNEMAKVDDSFFHRLEESFLVEEDKKHERHPIFGNIVDEVAYHEKYPTIYHLRKKLVDSTDKADLRLIYLALAHMIKFRGHFLIEGDLNPDNSDVDKLFIQLVQTYNQLFEENPINASGVDAKAILSARLSKSRRLENLIAQLPGEKKNGLFGNLIALSLGLTPNFKSNFDLAEDAKLQLSKDTYDDDLDNLLAQIGDQYADLFLAAKNLSDAILLSDILRVNTEITKAPLSASMIKRYDEHHQDLTLLKALVRQQLPEKYKEIFFDQSKNGYAGYIDGGASQEEFYKFIKPILEKMDGTEELLVKLNREDLLRKQRTFDNGSIPHQIHLGELHAILRRQEDFYPFLKDNREKIEKILTFRIPYYVGPLARGNSRFAWMTRKSEETITPWNFEEVVDKGASAQSFIERMTNFDKNLPNEKVLPKHSLLYEYFTVYNELTKVKYVTEGMRKPAFLSGEQKKAIVDLLFKTNRKVTVKQLKEDYFKKIECFDSVEISGVEDRFNASLGTYHDLLKIIKDKDFLDNEENEDILEDIVLTLTLFEDREMIEERLKTYAHLFDDKVMKQLKRRRYTGWGRLSRKLINGIRDKQSGKTILDFLKSDGFANRNFMQLIHDDSLTFKEDIQKAQVSGQGDSLHEHIANLAGSPAIKKGILQTVKVVDELVKVMGRHKPENIVIEMARENQTTQKGQKNSRERMKRIEEGIKELGSQILKEHPVENTQLQNEKLYLYYLQNGRDMYVDQELDINRLSDYDVDHIVPQSFLKDDSIDNKVLTRSDKARGKSDNVPSEEVVKKMKNYWRQLLNAKLITQRKFDNLTKAERGGLSELDKAGFIKRQLVETRQITKHVAQILDSRMNTKYDENDKLIREVKVITLKSKLVSDFRKDFQFYKVREINNYHHAHDAYLNAVVGTALIKKYPKLESEFVYGDYKVYDVRKMIAKSEQEIGKATAKYFFYSNIMNFFKTEITLANGEIRKRPLIETNGETGEIVWDKGRDFATVRKVLSMPQVNIVKKTEVQTGGFSKESILPKRNSDKLIARKKDWDPKKYGGFDSPTVAYSVLVVAKVEKGKSKKLKSVKELLGITIMERSSFEKNPIDFLEAKGYKEVKKDLIIKLPKYSLFELENGRKRMLASAGELQKGNELALPSKYVNFLYLASHYEKLKGSPEDNEQKQLFVEQHKHYLDEIIEQISEFSKRVILADANLDKVLSAYNKHRDKPIREQAENIIHLFTLTNLGAPAAFKYFDTTIDRKRYTSTKEVLDATLIHQSITGLYETRIDLSQLGGDGGGGGGSGGGGSGGGGSGGGGSGGVLNLEEEYRLHEKPVPSSIDPSWLQLFPTVWAERAGMGLANQVPPVVVELRSGASPVAVRQYPMSKEAREGIRPHIQRFLDLGVLVPCQSPWNTPLLPVKKPGTNDYRPVQDLREINKRVQDIHPTVPNPYNLLSSLPPSHTWYSVLDLKDAFFCLKLHPNSQPLFAFEWRDPEKGNTGQLTWTRLPQGFKNSPTLFNEALHRDLAPFRALNPQVVLLQYVDDLLVAAPTYRDCKEGTQKLLQELSKLGYRVSAKKAQLCQKEVTYLGYLLKEGKRWLTPARKATVMKIPPPTTPRQVREFLGKAGFCRLFIPGFASLAAPLYPLTKPSIPFIWTEEHQKAFDRIKEALLSAPALALPDLTKPFTLYVDERAGVARGVLTQTLGPWRRPVAYLSKKLDPVASGWPTCLKAVAAVALLLKDADKLTLGQNVTVIASHSLESIVRQPPDRWMTNARMTHYQSLLLNERVSFAPPAVLNPATLLPVESEATPVHRCSEILAEETGTRRDLKDQPLPGVPAWYTDGSSFIAEGKRRAGAAIVDGKRTVWASSLPEGTSAQKAELVALTQALRLAEGKDINIYTDSRYAFATAHIHGAIYKQRGWLTSAGKDIKNKEEILALLEAIHLPKRVAIIHCPGHQKGNDPVATGNRRADEAAKQAALSTRVLAETTKPAGKRTADGSEFEKRTADGSEFESPKKKAKVE

SEQ ID NO: 6164 - protein, 2112 aa, synthetic construct
MPAAKRVKLDGGDKKYSIGLDIGTNSVGWAVITDEYKVPSKKFKVLGNTDRHSIKKNLIGALLFDSGETAEATRLKRTARRRYTRRKNRICYLQEIFSNEMAKVDDSFFHRLEESFLVEEDKKHERHPIFGNIVDEVAYHEKYPTIYHLRKKLVDSTDKADLRLIYLALAHMIKFRGHFLIEGDLNPDNSDVDKLFIQLVQTYNQLFEENPINASGVDAKAILSARLSKSRRLENLIAQLPGEKKNGLFGNLIALSLGLTPNFKSNFDLAEDAKLQLSKDTYDDDLDNLLAQIGDQYADLFLAAKNLSDAILLSDILRVNTEITKAPLSASMIKRYDEHHQDLTLLKALVRQQLPEKYKEIFFDQSKNGYAGYIDGGASQEEFYKFIKPILEKMDGTEELLVKLNREDLLRKQRTFDNGSIPHQIHLGELHAILRRQEDFYPFLKDNREKIEKILTFRIPYYVGPLARGNSRFAWMTRKSEETITPWNFEEVVDKGASAQSFIERMTNFDKNLPNEKVLPKHSLLYEYFTVYNELTKVKYVTEGMRKPAFLSGEQKKAIVDLLFKTNRKVTVKQLKEDYFKKIECFDSVEISGVEDRFNASLGTYHDLLKIIKDKDFLDNEENEDILEDIVLTLTLFEDREMIEERLKTYAHLFDDKVMKQLKRRRYTGWGRLSRKLINGIRDKQSGKTILDFLKSDGFANRNFMQLIHDDSLTFKEDIQKAQVSGQGDSLHEHIANLAGSPAIKKGILQTVKVVDELVKVMGRHKPENIVIEMARENQTTQKGQKNSRERMKRIEEGIKELGSQILKEHPVENTQLQNEKLYLYYLQNGRDMYVDQELDINRLSDYDVDHIVPQSFLKDDSIDNKVLTRSDKARGKSDNVPSEEVVKKMKNYWRQLLNAKLITQRKFDNLTKAERGGLSELDKAGFIKRQLVETRQITKHVAQILDSRMNTKYDENDKLIREVKVITLKSKLVSDFRKDFQFYKVREINNYHHAHDAYLNAVVGTALIKKYPKLESEFVYGDYKVYDVRKMIAKSEQEIGKATAKYFFYSNIMNFFKTEITLANGEIRKRPLIETNGETGEIVWDKGRDFATVRKVLSMPQVNIVKKTEVQTGGFSKESILPKRNSDKLIARKKDWDPKKYGGFDSPTVAYSVLVVAKVEKGKSKKLKSVKELLGITIMERSSFEKNPIDFLEAKGYKEVKKDLIIKLPKYSLFELENGRKRMLASAGELQKGNELALPSKYVNFLYLASHYEKLKGSPEDNEQKQLFVEQHKHYLDEIIEQISEFSKRVILADANLDKVLSAYNKHRDKPIREQAENIIHLFTLTNLGAPAAFKYFDTTIDRKRYTSTKEVLDATLIHQSITGLYETRIDLSQLGGDGGGGGGSGGGGSGGGGSGGGGSGGGGSGGTAPLEEEYRLFLEAPIQNVTLLEQWKREIPKVWAEINPPGLASTQAPIHVQLLSTALPVRVRQYPITLEAKRSLRETIRKFRAAGILRPVHSPWNTPLLPVRKSGTSEYRMVQDLREVNKRVETIHPTVPNPYTLLSLLPPDRIWYSVLDLKDAFFCIPLAPESQLIFAFEWADAEEGESGQLTWTRLPQGFKNSPTLFNEALNRDLQGFRLDHPSVSLLQYVDDLLIAADTQAACLSATRDLLMTLAELGYRVSGKKAQLCQEEVTYLGFKIHKGSRSLSNSRTQAILQIPVPKTKRQVREFLGTIGYCRLWIPGFAELAQPLYAATRPGNDPLVWGEKEEEAFQSLKLALTQPPALALPSLDKPFQLFVEETSGAAKGVLTQALGPWKRPVAYLSKRLDPVAAGWPRCLRAIAAAALLTREASKLTFGQDIEITSSHNLESLLRSPPDKWLTNARITQYQVLLLDPPRVRFKQTAALNPATLLPETDDTLPIHHCLDTLDSLTSTRPDLTDQPLAQAEATLFTDGSSYIRDGKRYAGAAVVTLDSVIWAEPLPIGTSAQKAELIALTKALEWSKDKSVNIYTDSRYAFATLHVHGMIYRERGWLTAGGKAIKNAPEILALLTAVWLPKRVAVMHCKGHQKDDAPTSTGNRRADEVAREVAIRPLSTQATISAGKRTADGSEFEKRTADGSEFESPKKKAKVE

SEQ ID NO: 6165 - protein, 2112 aa, synthetic construct
MPAAKRVKLDGGDKKYSIGLDIGTNSVGWAVITDEYKVPSKKFKVLGNTDRHSIKKNLIGALLFDSGETAEATRLKRTARRRYTRRKNRICYLQEIFSNEMAKVDDSFFHRLEESFLVEEDKKHERHPIFGNIVDEVAYHEKYPTIYHLRKKLVDSTDKADLRLIYLALAHMIKFRGHFLIEGDLNPDNSDVDKLFIQLVQTYNQLFEENPINASGVDAKAILSARLSKSRRLENLIAQLPGEKKNGLFGNLIALSLGLTPNFKSNFDLAEDAKLQLSKDTYDDDLDNLLAQIGDQYADLFLAAKNLSDAILLSDILRVNTEITKAPLSASMIKRYDEHHQDLTLLKALVRQQLPEKYKEIFFDQSKNGYAGYIDGGASQEEFYKFIKPILEKMDGTEELLVKLNREDLLRKQRTFDNGSIPHQIHLGELHAILRRQEDFYPFLKDNREKIEKILTFRIPYYVGPLARGNSRFAWMTRKSEETITPWNFEEVVDKGASAQSFIERMTNFDKNLPNEKVLPKHSLLYEYFTVYNELTKVKYVTEGMRKPAFLSGEQKKAIVDLLFKTNRKVTVKQLKEDYFKKIECFDSVEISGVEDRFNASLGTYHDLLKIIKDKDFLDNEENEDILEDIVLTLTLFEDREMIEERLKTYAHLFDDKVMKQLKRRRYTGWGRLSRKLINGIRDKQSGKTILDFLKSDGFANRNFMQLIHDDSLTFKEDIQKAQVSGQGDSLHEHIANLAGSPAIKKGILQTVKVVDELVKVMGRHKPENIVIEMARENQTTQKGQKNSRERMKRIEEGIKELGSQILKEHPVENTQLQNEKLYLYYLQNGRDMYVDQELDINRLSDYDVDHIVPQSFLKDDSIDNKVLTRSDKARGKSDNVPSEEVVKKMKNYWRQLLNAKLITQRKFDNLTKAERGGLSELDKAGFIKRQLVETRQITKHVAQILDSRMNTKYDENDKLIREVKVITLKSKLVSDFRKDFQFYKVREINNYHHAHDAYLNAVVGTALIKKYPKLESEFVYGDYKVYDVRKMIAKSEQEIGKATAKYFFYSNIMNFFKTEITLANGEIRKRPLIETNGETGEIVWDKGRDFATVRKVLSMPQVNIVKKTEVQTGGFSKESILPKRNSDKLIARKKDWDPKKYGGFDSPTVAYSVLVVAKVEKGKSKKLKSVKELLGITIMERSSFEKNPIDFLEAKGYKEVKKDLIIKLPKYSLFELENGRKRMLASAGELQKGNELALPSKYVNFLYLASHYEKLKGSPEDNEQKQLFVEQHKHYLDEIIEQISEFSKRVILADANLDKVLSAYNKHRDKPIREQAENIIHLFTLTNLGAPAAFKYFDTTIDRKRYTSTKEVLDATLIHQSITGLYETRIDLSQLGGDGGGGGGSGGGGSGGGGSGGGGSGGGGSGGTAPLEEEYRLFLEAPIQNVTLLEQWKREIPKVWAEINPPGLASTQAPIHVQLLSTALPVRVRQYPITLEAKRSLRETIRKFRAAGILRPVHSPWNTPLLPVRKSGTSEYRMVQDLREVNKRVETIHPTVPNPYTLLSLLPPDRIWYSVLDLKDAFFCIPLAPESQLIFAFEWADAEEGESGQLTWTRLPQGFKNSPTLFNEALNRDLQGFRLDHPSVSLLQYVDDLLIAADTQAACLSATRDLLMTLAELGYRVSGKKAQLCQEEVTYLGFKIHKGSRSLSNSRTQAILQIPVPKTKRQVREFLGKIGYCRLFIPGFAELAQPLYAATRPGNDPLVWGEKEEEAFQSLKLALTQPPALALPSLDKPFQLFVEETSGAAKGVLTQALGPWKRPVAYLSKRLDPVAAGWPRCLRAIAAAALLTREASKLTFGQDIEITSSHNLESLLRSPPDKWLTNARITQYQVLLLDPPRVRFKQTAALNPATLLPETDDTLPIHHCLDTLDSLTSTRPDLTDQPLAQAEATLFTDGSSYIRDGKRYAGAAVVTLDSVIWAEPLPIGTSAQKAELIALTKALEWSKDKSVNIYTDSRYAFATLHVHGMIYRERGWLTAGGKAIKNAPEILALLTAVWLPKRVAVMHCKGHQKDDAPTSTGNRRADEVAREVAIRPLSTQATISAGKRTADGSEFEKRTADGSEFESPKKKAKVE

SEQ ID NO: 6166 - protein, 2116 aa, synthetic construct
MPAAKRVKLDGGDKKYSIGLDIGTNSVGWAVITDEYKVPSKKFKVLGNTDRHSIKKNLIGALLFDSGETAEATRLKRTARRRYTRRKNRICYLQEIFSNEMAKVDDSFFHRLEESFLVEEDKKHERHPIFGNIVDEVAYHEKYPTIYHLRKKLVDSTDKADLRLIYLALAHMIKFRGHFLIEGDLNPDNSDVDKLFIQLVQTYNQLFEENPINASGVDAKAILSARLSKSRRLENLIAQLPGEKKNGLFGNLIALSLGLTPNFKSNFDLAEDAKLQLSKDTYDDDLDNLLAQIGDQYADLFLAAKNLSDAILLSDILRVNTEITKAPLSASMIKRYDEHHQDLTLLKALVRQQLPEKYKEIFFDQSKNGYAGYIDGGASQEEFYKFIKPILEKMDGTEELLVKLNREDLLRKQRTFDNGSIPHQIHLGELHAILRRQEDFYPFLKDNREKIEKILTFRIPYYVGPLARGNSRFAWMTRKSEETITPWNFEEVVDKGASAQSFIERMTNFDKNLPNEKVLPKHSLLYEYFTVYNELTKVKYVTEGMRKPAFLSGEQKKAIVDLLFKTNRKVTVKQLKEDYFKKIECFDSVEISGVEDRFNASLGTYHDLLKIIKDKDFLDNEENEDILEDIVLTLTLFEDREMIEERLKTYAHLFDDKVMKQLKRRRYTGWGRLSRKLINGIRDKQSGKTILDFLKSDGFANRNFMQLIHDDSLTFKEDIQKAQVSGQGDSLHEHIANLAGSPAIKKGILQTVKVVDELVKVMGRHKPENIVIEMARENQTTQKGQKNSRERMKRIEEGIKELGSQILKEHPVENTQLQNEKLYLYYLQNGRDMYVDQELDINRLSDYDVDHIVPQSFLKDDSIDNKVLTRSDKARGKSDNVPSEEVVKKMKNYWRQLLNAKLITQRKFDNLTKAERGGLSELDKAGFIKRQLVETRQITKHVAQILDSRMNTKYDENDKLIREVKVITLKSKLVSDFRKDFQFYKVREINNYHHAHDAYLNAVVGTALIKKYPKLESEFVYGDYKVYDVRKMIAKSEQEIGKATAKYFFYSNIMNFFKTEITLANGEIRKRPLIETNGETGEIVWDKGRDFATVRKVLSMPQVNIVKKTEVQTGGFSKESILPKRNSDKLIARKKDWDPKKYGGFDSPTVAYSVLVVAKVEKGKSKKLKSVKELLGITIMERSSFEKNPIDFLEAKGYKEVKKDLIIKLPKYSLFELENGRKRMLASAGELQKGNELALPSKYVNFLYLASHYEKLKGSPEDNEQKQLFVEQHKHYLDEIIEQISEFSKRVILADANLDKVLSAYNKHRDKPIREQAENIIHLFTLTNLGAPAAFKYFDTTIDRKRYTSTKEVLDATLIHQSITGLYETRIDLSQLGGDGGGGGGSGGGGSGGGGSGGGGSGGGGSGGTVSLQDEHRLFDIPVTTSLPDVWLQDFPQAWAETGGLGRAKCQAPIIIDLKPTAVPVSIKQYPMSLEAHMGIRQHIIKFLELGVLRPCRSPWNTPLLPVKKPGTQDYRPVQDLREINKRTVDIHPTVPNPYNLLSTLKPDYSWYTVLDLKDAFFCLPLAPQSQELFAFEWKDPERGISGQLTWTRLPQGFKNSPTLFDEALHRDLTDFRTQHPEVTLLQYVDDLLLAAPTKKACTQGTRHLLQELGEKGYRASAKKAQICQTKVTYLGYILSEGKRWLTPGRIETVARIPPPRNPREVREFLGTAGFCRLWIPGFAELAAPLYALTKESTPFTWQTEHQLAFEALKKALLSAPALGLPDTSKPFTLFLDERQGIAKGVLTQKLGPWKRPVAYLSKKLDPVAAGWPPCLRIMAATAMLVKDSAKLTLGQPLTVITPHTLEAIVRQPPDRWITNARLTHYQALLLDTDRVQFGPPVTLNPATLLPVPENQPSPHDCRQVLAETHGTREDLKDQELPDADHTWYTDGSSYLDSGTRRAGAAVVDGHNTIWAQSLPPGTSAQKAELIALTKALELSKGKKANIYTDSRYAFATAHTHGSIYERRGLLTSEGKEIKNKAEIIALLKALFLPQEVAIIHCPGHQKGQDPVAVGNRQADRVARQAAMAEVLTLATEPDNTSHITAGKRTADGSEFEKRTADGSEFESPKKKAKVE

SEQ ID NO: 6167 - protein, 2015 aa, synthetic construct
MPAAKRVKLDGGDKKYSIGLDIGTNSVGWAVITDEYKVPSKKFKVLGNTDRHSIKKNLIGALLFDSGETAEATRLKRTARRRYTRRKNRICYLQEIFSNEMAKVDDSFFHRLEESFLVEEDKKHERHPIFGNIVDEVAYHEKYPTIYHLRKKLVDSTDKADLRLIYLALAHMIKFRGHFLIEGDLNPDNSDVDKLFIQLVQTYNQLFEENPINASGVDAKAILSARLSKSRRLENLIAQLPGEKKNGLFGNLIALSLGLTPNFKSNFDLAEDAKLQLSKDTYDDDLDNLLAQIGDQYADLFLAAKNLSDAILLSDILRVNTEITKAPLSASMIKRYDEHHQDLTLLKALVRQQLPEKYKEIFFDQSKNGYAGYIDGGASQEEFYKFIKPILEKMDGTEELLVKLNREDLLRKQRTFDNGSIPHQIHLGELHAILRRQEDFYPFLKDNREKIEKILTFRIPYYVGPLARGNSRFAWMTRKSEETITPWNFEEVVDKGASAQSFIERMTNFDKNLPNEKVLPKHSLLYEYFTVYNELTKVKYVTEGMRKPAFLSGEQKKAIVDLLFKTNRKVTVKQLKEDYFKKIECFDSVEISGVEDRFNASLGTYHDLLKIIKDKDFLDNEENEDILEDIVLTLTLFEDREMIEERLKTYAHLFDDKVMKQLKRRRYTGWGRLSRKLINGIRDKQSGKTILDFLKSDGFANRNFMQLIHDDSLTFKEDIQKAQVSGQGDSLHEHIANLAGSPAIKKGILQTVKVVDELVKVMGRHKPENIVIEMARENQTTQKGQKNSRERMKRIEEGIKELGSQILKEHPVENTQLQNEKLYLYYLQNGRDMYVDQELDINRLSDYDVDHIVPQSFLKDDSIDNKVLTRSDKARGKSDNVPSEEVVKKMKNYWRQLLNAKLITQRKFDNLTKAERGGLSELDKAGFIKRQLVETRQITKHVAQILDSRMNTKYDENDKLIREVKVITLKSKLVSDFRKDFQFYKVREINNYHHAHDAYLNAVVGTALIKKYPKLESEFVYGDYKVYDVRKMIAKSEQEIGKATAKYFFYSNIMNFFKTEITLANGEIRKRPLIETNGETGEIVWDKGRDFATVRKVLSMPQVNIVKKTEVQTGGFSKESILPKRNSDKLIARKKDWDPKKYGGFDSPTVAYSVLVVAKVEKGKSKKLKSVKELLGITIMERSSFEKNPIDFLEAKGYKEVKKDLIIKLPKYSLFELENGRKRMLASAGELQKGNELALPSKYVNFLYLASHYEKLKGSPEDNEQKQLFVEQHKHYLDEIIEQISEFSKRVILADANLDKVLSAYNKHRDKPIREQAENIIHLFTLTNLGAPAAFKYFDTTIDRKRYTSTKEVLDATLIHQSITGLYETRIDLSQLGGDGGGGGGSGGGGSGGGGSGGGGSGGGGSGGGVLDAPPSHIGLEHLPPPPEVPQFPLNLERLQALQDLVHRSLEAGYISPWDGPGNNPVFPVRKPNGAWRFVHDLRVTNALTKPIPALSPGPPDLTAIPTHLPHIICLDLKDAFFQIPVEDRFRSYFAFTLPTPGGLQPHRRFAWRVLPQGFINSPALFQRALQEPLRQVSAAFSQSLLVSYMDDILYVSPTEEQRLQCYQTMAAHLRDLGFQVASEKTRQTPSPVPFLGQMVHERMVTYQSLPTLQISSPISLHQLQTVLGDLQWVSRGTPTTRRPLQLLYSSLKPIDDPRAIIHLSPEQQQGIAELRQALSHNARSRYNEQEPLLAYVHLTRAGSTLVLFQKGAQFPLAYFQTPLTDNQASPWGLLLLLGCQYLQAQALSSYAKTILKYYHNLPKTSLDNWIQSSEDPRVQELLQLWPQISSQGIQPPGPWKTLVTRAEVFLTPQFSPEPIPAALCLFSDGAARRGAYCLWKDHLLDFQAVPAPESAQKGELAGLLAGLAAAPPEPLNIWVDSKYLYSLLRTLVLGAWLQPDPVPSYALLYKSLLRHPAIFVGHVRSHSSASHPIASLNNYVDQLAGKRTADGSEFEKRTADGSEFESPKKKAKVE

SEQ ID NO: 6168 - protein, 2187 aa, synthetic construct
MPAAKRVKLDGGDKKYSIGLDIGTNSVGWAVITDEYKVPSKKFKVLGNTDRHSIKKNLIGALLFDSGETAEATRLKRTARRRYTRRKNRICYLQEIFSNEMAKVDDSFFHRLEESFLVEEDKKHERHPIFGNIVDEVAYHEKYPTIYHLRKKLVDSTDKADLRLIYLALAHMIKFRGHFLIEGDLNPDNSDVDKLFIQLVQTYNQLFEENPINASGVDAKAILSARLSKSRRLENLIAQLPGEKKNGLFGNLIALSLGLTPNFKSNFDLAEDAKLQLSKDTYDDDLDNLLAQIGDQYADLFLAAKNLSDAILLSDILRVNTEITKAPLSASMIKRYDEHHQDLTLLKALVRQQLPEKYKEIFFDQSKNGYAGYIDGGASQEEFYKFIKPILEKMDGTEELLVKLNREDLLRKQRTFDNGSIPHQIHLGELHAILRRQEDFYPFLKDNREKIEKILTFRIPYYVGPLARGNSRFAWMTRKSEETITPWNFEEVVDKGASAQSFIERMTNFDKNLPNEKVLPKHSLLYEYFTVYNELTKVKYVTEGMRKPAFLSGEQKKAIVDLLFKTNRKVTVKQLKEDYFKKIECFDSVEISGVEDRFNASLGTYHDLLKIIKDKDFLDNEENEDILEDIVLTLTLFEDREMIEERLKTYAHLFDDKVMKQLKRRRYTGWGRLSRKLINGIRDKQSGKTILDFLKSDGFANRNFMQLIHDDSLTFKEDIQKAQVSGQGDSLHEHIANLAGSPAIKKGILQTVKVVDELVKVMGRHKPENIVIEMARENQTTQKGQKNSRERMKRIEEGIKELGSQILKEHPVENTQLQNEKLYLYYLQNGRDMYVDQELDINRLSDYDVDHIVPQSFLKDDSIDNKVLTRSDKARGKSDNVPSEEVVKKMKNYWRQLLNAKLITQRKFDNLTKAERGGLSELDKAGFIKRQLVETRQITKHVAQILDSRMNTKYDENDKLIREVKVITLKSKLVSDFRKDFQFYKVREINNYHHAHDAYLNAVVGTALIKKYPKLESEFVYGDYKVYDVRKMIAKSEQEIGKATAKYFFYSNIMNFFKTEITLANGEIRKRPLIETNGETGEIVWDKGRDFATVRKVLSMPQVNIVKKTEVQTGGFSKESILPKRNSDKLIARKKDWDPKKYGGFDSPTVAYSVLVVAKVEKGKSKKLKSVKELLGITIMERSSFEKNPIDFLEAKGYKEVKKDLIIKLPKYSLFELENGRKRMLASAGELQKGNELALPSKYVNFLYLASHYEKLKGSPEDNEQKQLFVEQHKHYLDEIIEQISEFSKRVILADANLDKVLSAYNKHRDKPIREQAENIIHLFTLTNLGAPAAFKYFDTTIDRKRYTSTKEVLDATLIHQSITGLYETRIDLSQLGGDGGGGGGSGGGGSGGGGSGGGGSGGGGSGGMDLLKPLTVERKGVKIKGYWNSQADITCVPKDLLQGEEPVRQQNVTTIHGTQEGDVYYVNLKIDGRRINTEVIGTTLDYAIITPGDVPWILKKPLELTIKLDLEEQQGTLLNNSILSKKGKEELKQLFEKYSALWQSWENQVGHRRIRPHKIATGTVKPTPQKQYHINPKAKPDIQIVINDLLKQGVLIQKESTMNTPVYPVPKPNGRWRMVLDYRAVNKVTPLIAVQNQHSYGILGSLFKGRYKTTIDLSNGFWAHPIVPEDYWITAFTWQGKQYCWTVLPQGFLNSPGLFTGDVVDLLQGIPNVEVYVDDVYISHDSEKEHLEYLDILFNRLKEAGYIISLKKSNIANSIVDFLGFQITNEGRGLTDTFKEKLENITAPTTLKQLQSILGLLNFARNFIPDFTELIAPLYALIPKSTKNYVPWQIEHSTTLETLITKLNGAEYLQGRKGDKTLIMKVNASYTTGYIRYYNEGEKKPISYVSIVFSKTELKFTELEKLLTTVHKGLLKALDLSMGQNIHVYSPIVSMQNIQKTPQTAKKALASRWLSWLSYLEDPRIRFFYDPQMPALKDLPAVDTGKDNKKHPSNFQHIFYTDGSAITSPTKEGHLNAGMGIVYFINKDGNLQKQQEWSISLGNHTAQFAEIAAFEFALKKCLPLGGNILVVTDSNYVAKAYNEELDVWASNGFVNNRKKPLKHISKWKSVADLKRLRPDVVVTHEPGHQKLDSSPHAYGNNLADQLATQASFKVHAGKRTADGSEFEKRTADGSEFESPKKKAKVE

SEQ ID NO: 6169 - protein, 2101 aa, synthetic construct
MPAAKRVKLDGGDKKYSIGLDIGTNSVGWAVITDEYKVPSKKFKVLGNTDRHSIKKNLIGALLFDSGETAEATRLKRTARRRYTRRKNRICYLQEIFSNEMAKVDDSFFHRLEESFLVEEDKKHERHPIFGNIVDEVAYHEKYPTIYHLRKKLVDSTDKADLRLIYLALAHMIKFRGHFLIEGDLNPDNSDVDKLFIQLVQTYNQLFEENPINASGVDAKAILSARLSKSRRLENLIAQLPGEKKNGLFGNLIALSLGLTPNFKSNFDLAEDAKLQLSKDTYDDDLDNLLAQIGDQYADLFLAAKNLSDAILLSDILRVNTEITKAPLSASMIKRYDEHHQDLTLLKALVRQQLPEKYKEIFFDQSKNGYAGYIDGGASQEEFYKFIKPILEKMDGTEELLVKLNREDLLRKQRTFDNGSIPHQIHLGELHAILRRQEDFYPFLKDNREKIEKILTFRIPYYVGPLARGNSRFAWMTRKSEETITPWNFEEVVDKGASAQSFIERMTNFDKNLPNEKVLPKHSLLYEYFTVYNELTKVKYVTEGMRKPAFLSGEQKKAIVDLLFKTNRKVTVKQLKEDYFKKIECFDSVEISGVEDRFNASLGTYHDLLKIIKDKDFLDNEENEDILEDIVLTLTLFEDREMIEERLKTYAHLFDDKVMKQLKRRRYTGWGRLSRKLINGIRDKQSGKTILDFLKSDGFANRNFMQLIHDDSLTFKEDIQKAQVSGQGDSLHEHIANLAGSPAIKKGILQTVKVVDELVKVMGRHKPENIVIEMARENQTTQKGQKNSRERMKRIEEGIKELGSQILKEHPVENTQLQNEKLYLYYLQNGRDMYVDQELDINRLSDYDVDHIVPQSFLKDDSIDNKVLTRSDKARGKSDNVPSEEVVKKMKNYWRQLLNAKLITQRKFDNLTKAERGGLSELDKAGFIKRQLVETRQITKHVAQILDSRMNTKYDENDKLIREVKVITLKSKLVSDFRKDFQFYKVREINNYHHAHDAYLNAVVGTALIKKYPKLESEFVYGDYKVYDVRKMIAKSEQEIGKATAKYFFYSNIMNFFKTEITLANGEIRKRPLIETNGETGEIVWDKGRDFATVRKVLSMPQVNIVKKTEVQTGGFSKESILPKRNSDKLIARKKDWDPKKYGGFDSPTVAYSVLVVAKVEKGKSKKLKSVKELLGITIMERSSFEKNPIDFLEAKGYKEVKKDLIIKLPKYSLFELENGRKRMLASAGELQKGNELALPSKYVNFLYLASHYEKLKGSPEDNEQKQLFVEQHKHYLDEIIEQISEFSKRVILADANLDKVLSAYNKHRDKPIREQAENIIHLFTLTNLGAPAAFKYFDTTIDRKRYTSTKEVLDATLIHQSITGLYETRIDLSQLGGDGGGGGGSGGGGSGGGGSGGGGSGGGGSGGVPWILKKPLELTIKLDLEEQQGTLLNNSILSKKGKEELKQLFEKYSALWQSWENQVGHRRIRPHKIATGTVKPTPQKQYHINPKAKPDIQIVINDLLKQGVLIQKESTMNTPVYPVPKPNGRWRMVLDYRAVNKVTPLIAVQNQHSYGILGSLFKGRYKTTIDLSNGFWAHPIVPEDYWITAFTWQGKQYCWTVLPQGFLNSPGLFTGDVVDLLQGIPNVEVYVDDVYISHDSEKEHLEYLDILFNRLKEAGYIISLKKSNIANSIVDFLGFQITNEGRGLTDTFKEKLENITAPTTLKQLQSILGLLNFARNFIPDFTELIAPLYALIPKSTKNYVPWQIEHSTTLETLITKLNGAEYLQGRKGDKTLIMKVNASYTTGYIRYYNEGEKKPISYVSIVFSKTELKFTELEKLLTTVHKGLLKALDLSMGQNIHVYSPIVSMQNIQKTPQTAKKALASRWLSWLSYLEDPRIRFFYDPQMPALKDLPAVDTGKDNKKHPSNFQHIFYTDGSAITSPTKEGHLNAGMGIVYFINKDGNLQKQQEWSISLGNHTAQFAEIAAFEFALKKCLPLGGNILVVTDSNYVAKAYNEELDVWASNGFVNNRKKPLKHISKWKSVADLKRLRPDVVVTHEPGHQKLDSSPHAYGNNLADQLATQASFKVHAGKRTADGSEFEKRTADGSEFESPKKKAKVE

SEQ ID NO: 6170 - protein, 2101 aa, synthetic construct
MPAAKRVKLDGGDKKYSIGLDIGTNSVGWAVITDEYKVPSKKFKVLGNTDRHSIKKNLIGALLFDSGETAEATRLKRTARRRYTRRKNRICYLQEIFSNEMAKVDDSFFHRLEESFLVEEDKKHERHPIFGNIVDEVAYHEKYPTIYHLRKKLVDSTDKADLRLIYLALAHMIKFRGHFLIEGDLNPDNSDVDKLFIQLVQTYNQLFEENPINASGVDAKAILSARLSKSRRLENLIAQLPGEKKNGLFGNLIALSLGLTPNFKSNFDLAEDAKLQLSKDTYDDDLDNLLAQIGDQYADLFLAAKNLSDAILLSDILRVNTEITKAPLSASMIKRYDEHHQDLTLLKALVRQQLPEKYKEIFFDQSKNGYAGYIDGGASQEEFYKFIKPILEKMDGTEELLVKLNREDLLRKQRTFDNGSIPHQIHLGELHAILRRQEDFYPFLKDNREKIEKILTFRIPYYVGPLARGNSRFAWMTRKSEETITPWNFEEVVDKGASAQSFIERMTNFDKNLPNEKVLPKHSLLYEYFTVYNELTKVKYVTEGMRKPAFLSGEQKKAIVDLLFKTNRKVTVKQLKEDYFKKIECFDSVEISGVEDRFNASLGTYHDLLKIIKDKDFLDNEENEDILEDIVLTLTLFEDREMIEERLKTYAHLFDDKVMKQLKRRRYTGWGRLSRKLINGIRDKQSGKTILDFLKSDGFANRNFMQLIHDDSLTFKEDIQKAQVSGQGDSLHEHIANLAGSPAIKKGILQTVKVVDELVKVMGRHKPENIVIEMARENQTTQKGQKNSRERMKRIEEGIKELGSQILKEHPVENTQLQNEKLYLYYLQNGRDMYVDQELDINRLSDYDVDHIVPQSFLKDDSIDNKVLTRSDKARGKSDNVPSEEVVKKMKNYWRQLLNAKLITQRKFDNLTKAERGGLSELDKAGFIKRQLVETRQITKHVAQILDSRMNTKYDENDKLIREVKVITLKSKLVSDFRKDFQFYKVREINNYHHAHDAYLNAVVGTALIKKYPKLESEFVYGDYKVYDVRKMIAKSEQEIGKATAKYFFYSNIMNFFKTEITLANGEIRKRPLIETNGETGEIVWDKGRDFATVRKVLSMPQVNIVKKTEVQTGGFSKESILPKRNSDKLIARKKDWDPKKYGGFDSPTVAYSVLVVAKVEKGKSKKLKSVKELLGITIMERSSFEKNPIDFLEAKGYKEVKKDLIIKLPKYSLFELENGRKRMLASAGELQKGNELALPSKYVNFLYLASHYEKLKGSPEDNEQKQLFVEQHKHYLDEIIEQISEFSKRVILADANLDKVLSAYNKHRDKPIREQAENIIHLFTLTNLGAPAAFKYFDTTIDRKRYTSTKEVLDATLIHQSITGLYETRIDLSQLGGDGGGGGGSGGGGSGGGGSGGGGSGGGGSGGVPWILKKPLELTIKLDLEEQQGTLLNNSILSKKGKEELKQLFEKYSALWQSWENQVGHRRIRPHKIATGTVKPTPQKQYHINPKAKPDIQIVINDLLKQGVLIQKESTMNTPVYPVPKPNGRWRMVLDYRAVNKVTPLIAVQNQHSYGILGSLFKGRYKTTIDLSNGFWAHPIVPEDYWITAFTWQGKQYCWTVLPQGFLNSPGLFNGDVVDLLQGIPNVEVYVDDVYISHDSEKEHLEYLDILFNRLKEAGYIISLKKSNIANSIVDFLGFQITNEGRGLTDTFKEKLENITAPTTLKQLQSILGLLNFARNFIPDFTELIAPLYALIPKSPKNYVPWQIEHSTTLETLITKLNGAEYLQGRKGDKTLIMKVNASYTTGYIRYYNEGEKKPISYVSIVFSKTELKFTELEKLLTTVHKGLLKALDLSMGQNIHVYSPIVSMQNIQKTPQTAKKALASRWLSWLSYLEDPRIRFFYDPQMPALKDLPAVDTGKDNKKHPSNFQHIFYTDGSAITSPTKEGHLNAGMGIVYFINKDGNLQKQQEWSISLGNHTAQFAEIAAFEFALKKCLPLGGNILVVTDSNYVAKAYNEELDVWASNGFVNNRKKPLKHISKWKSVADLKRLRPDVVVTHEPGHQKLDSSPHAYGNNLADQLATQASFKVHAGKRTADGSEFEKRTADGSEFESPKKKAKVE

SEQ ID NO: 6171 - protein, 2109 aa, synthetic construct
MPAAKRVKLDGGDKKYSIGLDIGTNSVGWAVITDEYKVPSKKFKVLGNTDRHSIKKNLIGALLFDSGETAEATRLKRTARRRYTRRKNRICYLQEIFSNEMAKVDDSFFHRLEESFLVEEDKKHERHPIFGNIVDEVAYHEKYPTIYHLRKKLVDSTDKADLRLIYLALAHMIKFRGHFLIEGDLNPDNSDVDKLFIQLVQTYNQLFEENPINASGVDAKAILSARLSKSRRLENLIAQLPGEKKNGLFGNLIALSLGLTPNFKSNFDLAEDAKLQLSKDTYDDDLDNLLAQIGDQYADLFLAAKNLSDAILLSDILRVNTEITKAPLSASMIKRYDEHHQDLTLLKALVRQQLPEKYKEIFFDQSKNGYAGYIDGGASQEEFYKFIKPILEKMDGTEELLVKLNREDLLRKQRTFDNGSIPHQIHLGELHAILRRQEDFYPFLKDNREKIEKILTFRIPYYVGPLARGNSRFAWMTRKSEETITPWNFEEVVDKGASAQSFIERMTNFDKNLPNEKVLPKHSLLYEYFTVYNELTKVKYVTEGMRKPAFLSGEQKKAIVDLLFKTNRKVTVKQLKEDYFKKIECFDSVEISGVEDRFNASLGTYHDLLKIIKDKDFLDNEENEDILEDIVLTLTLFEDREMIEERLKTYAHLFDDKVMKQLKRRRYTGWGRLSRKLINGIRDKQSGKTILDFLKSDGFANRNFMQLIHDDSLTFKEDIQKAQVSGQGDSLHEHIANLAGSPAIKKGILQTVKVVDELVKVMGRHKPENIVIEMARENQTTQKGQKNSRERMKRIEEGIKELGSQILKEHPVENTQLQNEKLYLYYLQNGRDMYVDQELDINRLSDYDVDHIVPQSFLKDDSIDNKVLTRSDKARGKSDNVPSEEVVKKMKNYWRQLLNAKLITQRKFDNLTKAERGGLSELDKAGFIKRQLVETRQITKHVAQILDSRMNTKYDENDKLIREVKVITLKSKLVSDFRKDFQFYKVREINNYHHAHDAYLNAVVGTALIKKYPKLESEFVYGDYKVYDVRKMIAKSEQEIGKATAKYFFYSNIMNFFKTEITLANGEIRKRPLIETNGETGEIVWDKGRDFATVRKVLSMPQVNIVKKTEVQTGGFSKESILPKRNSDKLIARKKDWDPKKYGGFDSPTVAYSVLVVAKVEKGKSKKLKSVKELLGITIMERSSFEKNPIDFLEAKGYKEVKKDLIIKLPKYSLFELENGRKRMLASAGELQKGNELALPSKYVNFLYLASHYEKLKGSPEDNEQKQLFVEQHKHYLDEIIEQISEFSKRVILADANLDKVLSAYNKHRDKPIREQAENIIHLFTLTNLGAPAAFKYFDTTIDRKRYTSTKEVLDATLIHQSITGLYETRIDLSQLGGDGGGGGGSGGGGSGGGGSGGGGSGGGGSGGTLQLEEEYRLFEPESTQKQEMDIWLKNFPQAWAETGGMGTAHCQAPVLIQLKATATPISIRQYPMPHEAYQGIKPHIRRMLDQGILKPCQSPWNTPLLPVKKPGTEDYRPVQDLREVNKRVEDIHPTVPNPYNLLSTLPPSHPWYTVLDLKDAFFCLRLHSESQLLFAFEWRDPEIGLSGQLTWTRLPQGFKNSPTLFNEALHSDLADFRVRYPALVLLQYVDDLLLAAATRTECLEGTKALLETLGNKGYRASAKKAQICLQEVTYLGYSLKDGQRWLTKARKEAILSIPVPKNSRQVREFLGTAGYCRLWIPGFAELAAPLYPLTRPGTLFQWGTEQQLAFEDIKKALLSSPALGLPDITKPFELFIDENSGFAKGVLVQKLGPWKRPVAYLSKKLDTVASGWPPCLRMVAAIAILVKDAGKLTLGQPLTILTSHPVEALVRQPPNKWLSNARMTHYQAMLLDAERVHFGPTVSLNPATLLPLPSGGNHHDCLQILAETHGTRPDLTDQPLPDADLTWYTDGSSFIRNGEREAGAAVTTESEVIWAAPLPPGTSAQRAELIALTQALKMAEGKKLTVYTDSRYAFATTHVHGEIYRRRGWLTSEGKEIKNKNEILALLEALFLPKRLSIIHCPGHQKGDSPQAKGNRLADDTAKKAATETHSSLTVLPAGKRTADGSEFEKRTADGSEFESPKKKAKVE

SEQ ID NO: 6172 - protein, 2108 aa, synthetic construct
MPAAKRVKLDGGDKKYSIGLDIGTNSVGWAVITDEYKVPSKKFKVLGNTDRHSIKKNLIGALLFDSGETAEATRLKRTARRRYTRRKNRICYLQEIFSNEMAKVDDSFFHRLEESFLVEEDKKHERHPIFGNIVDEVAYHEKYPTIYHLRKKLVDSTDKADLRLIYLALAHMIKFRGHFLIEGDLNPDNSDVDKLFIQLVQTYNQLFEENPINASGVDAKAILSARLSKSRRLENLIAQLPGEKKNGLFGNLIALSLGLTPNFKSNFDLAEDAKLQLSKDTYDDDLDNLLAQIGDQYADLFLAAKNLSDAILLSDILRVNTEITKAPLSASMIKRYDEHHQDLTLLKALVRQQLPEKYKEIFFDQSKNGYAGYIDGGASQEEFYKFIKPILEKMDGTEELLVKLNREDLLRKQRTFDNGSIPHQIHLGELHAILRRQEDFYPFLKDNREKIEKILTFRIPYYVGPLARGNSRFAWMTRKSEETITPWNFEEVVDKGASAQSFIERMTNFDKNLPNEKVLPKHSLLYEYFTVYNELTKVKYVTEGMRKPAFLSGEQKKAIVDLLFKTNRKVTVKQLKEDYFKKIECFDSVEISGVEDRFNASLGTYHDLLKIIKDKDFLDNEENEDILEDIVLTLTLFEDREMIEERLKTYAHLFDDKVMKQLKRRRYTGWGRLSRKLINGIRDKQSGKTILDFLKSDGFANRNFMQLIHDDSLTFKEDIQKAQVSGQGDSLHEHIANLAGSPAIKKGILQTVKVVDELVKVMGRHKPENIVIEMARENQTTQKGQKNSRERMKRIEEGIKELGSQILKEHPVENTQLQNEKLYLYYLQNGRDMYVDQELDINRLSDYDVDHIVPQSFLKDDSIDNKVLTRSDKARGKSDNVPSEEVVKKMKNYWRQLLNAKLITQRKFDNLTKAERGGLSELDKAGFIKRQLVETRQITKHVAQILDSRMNTKYDENDKLIREVKVITLKSKLVSDFRKDFQFYKVREINNYHHAHDAYLNAVVGTALIKKYPKLESEFVYGDYKVYDVRKMIAKSEQEIGKATAKYFFYSNIMNFFKTEITLANGEIRKRPLIETNGETGEIVWDKGRDFATVRKVLSMPQVNIVKKTEVQTGGFSKESILPKRNSDKLIARKKDWDPKKYGGFDSPTVAYSVLVVAKVEKGKSKKLKSVKELLGITIMERSSFEKNPIDFLEAKGYKEVKKDLIIKLPKYSLFELENGRKRMLASAGELQKGNELALPSKYVNFLYLASHYEKLKGSPEDNEQKQLFVEQHKHYLDEIIEQISEFSKRVILADANLDKVLSAYNKHRDKPIREQAENIIHLFTLTNLGAPAAFKYFDTTIDRKRYTSTKEVLDATLIHQSITGLYETRIDLSQLGGDGGGGGGSGGGGSGGGGSGGGGSGGGGSGGVLNLEEEYRLHEKPVPSSIDPSWLQLFPTVWAERAGMGLANQVPPVVVELRSGASPVAVRQYPMSKEAREGIRPHIQKFLDLGVLVPCRSPWNTPLLPVKKPGTNDYRPVQDLREINKRVQDIHPTVPNPYNLLSSLPPSYTWYSVLDLKDAFFCLRLHPNSQPLFAFEWKDPEKGNTGQLTWTRLPQGFKNSPTLFNEALHRDLAPFRALNPQVVLLQYVDDLLVAAPTYEDCKKGTQKLLQELSKLGYRVSAKKAQLCQREVTYLGYLLKEGKRWLTPARKATVMKIPVPTTPRQVREFLGKAGFCRLFIPGFASLAAPLYPLTKPSIPFIWTEEHQQAFDHIKKALLSAPALALPDLTKPFTLYIDERAGVARGVLTQTLGPWRRPVAYLSKKLDPVASGWPTCLKAVAAVALLLKDADKLTLGQNVTVIASHSLESIVRQPPDRWMTNARMTHYQSLLLNERVSFAPPAVLNPATLLPVESEATPVHRCSEILAEETGTRRDLEDQPLPGVPTWYTDGSSFITEGKRRAGAPIVDGKRTVWASSLPEGTSAQKAELVALTQALRLAEGKNINIYTDSRYAFATAHIHGAIYKQRGWLTSAGKDIKNKEEILALLEAIHLPRRVAIIHCPGHQRGSNPVATGNRRADEAAKQAALSTRVLAGTTKPAGKRTADGSEFEKRTADGSEFESPKKKAKVE

SEQ ID NO: 6173 - protein, 2232 aa, synthetic construct
MPAAKRVKLDGGDKKYSIGLDIGTNSVGWAVITDEYKVPSKKFKVLGNTDRHSIKKNLIGALLFDSGETAEATRLKRTARRRYTRRKNRICYLQEIFSNEMAKVDDSFFHRLEESFLVEEDKKHERHPIFGNIVDEVAYHEKYPTIYHLRKKLVDSTDKADLRLIYLALAHMIKFRGHFLIEGDLNPDNSDVDKLFIQLVQTYNQLFEENPINASGVDAKAILSARLSKSRRLENLIAQLPGEKKNGLFGNLIALSLGLTPNFKSNFDLAEDAKLQLSKDTYDDDLDNLLAQIGDQYADLFLAAKNLSDAILLSDILRVNTEITKAPLSASMIKRYDEHHQDLTLLKALVRQQLPEKYKEIFFDQSKNGYAGYIDGGASQEEFYKFIKPILEKMDGTEELLVKLNREDLLRKQRTFDNGSIPHQIHLGELHAILRRQEDFYPFLKDNREKIEKILTFRIPYYVGPLARGNSRFAWMTRKSEETITPWNFEEVVDKGASAQSFIERMTNFDKNLPNEKVLPKHSLLYEYFTVYNELTKVKYVTEGMRKPAFLSGEQKKAIVDLLFKTNRKVTVKQLKEDYFKKIECFDSVEISGVEDRFNASLGTYHDLLKIIKDKDFLDNEENEDILEDIVLTLTLFEDREMIEERLKTYAHLFDDKVMKQLKRRRYTGWGRLSRKLINGIRDKQSGKTILDFLKSDGFANRNFMQLIHDDSLTFKEDIQKAQVSGQGDSLHEHIANLAGSPAIKKGILQTVKVVDELVKVMGRHKPENIVIEMARENQTTQKGQKNSRERMKRIEEGIKELGSQILKEHPVENTQLQNEKLYLYYLQNGRDMYVDQELDINRLSDYDVDHIVPQSFLKDDSIDNKVLTRSDKARGKSDNVPSEEVVKKMKNYWRQLLNAKLITQRKFDNLTKAERGGLSELDKAGFIKRQLVETRQITKHVAQILDSRMNTKYDENDKLIREVKVITLKSKLVSDFRKDFQFYKVREINNYHHAHDAYLNAVVGTALIKKYPKLESEFVYGDYKVYDVRKMIAKSEQEIGKATAKYFFYSNIMNFFKTEITLANGEIRKRPLIETNGETGEIVWDKGRDFATVRKVLSMPQVNIVKKTEVQTGGFSKESILPKRNSDKLIARKKDWDPKKYGGFDSPTVAYSVLVVAKVEKGKSKKLKSVKELLGITIMERSSFEKNPIDFLEAKGYKEVKKDLIIKLPKYSLFELENGRKRMLASAGELQKGNELALPSKYVNFLYLASHYEKLKGSPEDNEQKQLFVEQHKHYLDEIIEQISEFSKRVILADANLDKVLSAYNKHRDKPIREQAENIIHLFTLTNLGAPAAFKYFDTTIDRKRYTSTKEVLDATLIHQSITGLYETRIDLSQLGGDGGGGGGSGGGGSGGGGSGGGGSGGGGSGGTLGDQGSRGSDPLPEPRVTLTVEGIPTEFLVNTGAEHSVLTKPMGKMGSKRTVVAGATGSKVYPWTTKRLLKIGQKQVTHSFLVIPECPAPLLGRDLLTKLKAQIQFSTEGPQVTWEDRPAMCLVLNLEEEYRLHEKPVPPSIDPSWLQLFPMVWAEKAGMGLANQVPPVVVELKSDASPVAVRQYPMSKEAREGIRPHIQRFLDLGILVPCQSPWNTPLLPVKKPGTNDYRPVQDLREVNKRVQDIHPTVPNPYNLLSSLPPSHTWYSVLDLKDAFFCLKLHPNSQPLFAFEWRDPEKGNTGQLTWTRLPQGFKNSPTLFDEALHRDLASFRALNPQVVMLQYVDDLLVAAPTYRDCKEGTRRLLQELSKLGYRVSAKKAQLCREEVTYLGYLLKGGKRWLTPARKATVMKIPTPTTPRQVREFLGTAGFCRLWIPGFASLAAPLYPLTREKVPFTWTEAHQEAFGRIKEALLSAPALALPDLTKPFALYVDEKEGVARGVLTQTLGPWRRPVAYLSKKLDPVASGWPTCLKAIAAVALLLKDADKLTLGQNVLVIAPHNLESIVRQPPDRWMTNARMTHYQSLLLNERVSFAPPAILNPATLLPVESDDTPIHICSEILAEETGTRPDLRDQPLPGVPAWYTDGSSFIMDGRRQAGAAIVDNKRTVWASNLPEGTSAQKAELIALTQALRLAEGKSINIYTDSRYAFATAHVHGAIYKQRGLLTSAGKDIKNKEEILALLEAIHLPKRVAIIHCPGHQRGTDPVATGNRKADEAAKQAAQSTRILTETTKNAGKRTADGSEFEKRTADGSEFESPKKKAKVE

SEQ ID NO: 6174 - protein, 2141 aa, synthetic construct
MPAAKRVKLDGGDKKYSIGLDIGTNSVGWAVITDEYKVPSKKFKVLGNTDRHSIKKNLIGALLFDSGETAEATRLKRTARRRYTRRKNRICYLQEIFSNEMAKVDDSFFHRLEESFLVEEDKKHERHPIFGNIVDEVAYHEKYPTIYHLRKKLVDSTDKADLRLIYLALAHMIKFRGHFLIEGDLNPDNSDVDKLFIQLVQTYNQLFEENPINASGVDAKAILSARLSKSRRLENLIAQLPGEKKNGLFGNLIALSLGLTPNFKSNFDLAEDAKLQLSKDTYDDDLDNLLAQIGDQYADLFLAAKNLSDAILLSDILRVNTEITKAPLSASMIKRYDEHHQDLTLLKALVRQQLPEKYKEIFFDQSKNGYAGYIDGGASQEEFYKFIKPILEKMDGTEELLVKLNREDLLRKQRTFDNGSIPHQIHLGELHAILRRQEDFYPFLKDNREKIEKILTFRIPYYVGPLARGNSRFAWMTRKSEETITPWNFEEVVDKGASAQSFIERMTNFDKNLPNEKVLPKHSLLYEYFTVYNELTKVKYVTEGMRKPAFLSGEQKKAIVDLLFKTNRKVTVKQLKEDYFKKIECFDSVEISGVEDRFNASLGTYHDLLKIIKDKDFLDNEENEDILEDIVLTLTLFEDREMIEERLKTYAHLFDDKVMKQLKRRRYTGWGRLSRKLINGIRDKQSGKTILDFLKSDGFANRNFMQLIHDDSLTFKEDIQKAQVSGQGDSLHEHIANLAGSPAIKKGILQTVKVVDELVKVMGRHKPENIVIEMARENQTTQKGQKNSRERMKRIEEGIKELGSQILKEHPVENTQLQNEKLYLYYLQNGRDMYVDQELDINRLSDYDVDHIVPQSFLKDDSIDNKVLTRSDKARGKSDNVPSEEVVKKMKNYWRQLLNAKLITQRKFDNLTKAERGGLSELDKAGFIKRQLVETRQITKHVAQILDSRMNTKYDENDKLIREVKVITLKSKLVSDFRKDFQFYKVREINNYHHAHDAYLNAVVGTALIKKYPKLESEFVYGDYKVYDVRKMIAKSEQEIGKATAKYFFYSNIMNFFKTEITLANGEIRKRPLIETNGETGEIVWDKGRDFATVRKVLSMPQVNIVKKTEVQTGGFSKESILPKRNSDKLIARKKDWDPKKYGGFDSPTVAYSVLVVAKVEKGKSKKLKSVKELLGITIMERSSFEKNPIDFLEAKGYKEVKKDLIIKLPKYSLFELENGRKRMLASAGELQKGNELALPSKYVNFLYLASHYEKLKGSPEDNEQKQLFVEQHKHYLDEIIEQISEFSKRVILADANLDKVLSAYNKHRDKPIREQAENIIHLFTLTNLGAPAAFKYFDTTIDRKRYTSTKEVLDATLIHQSITGLYETRIDLSQLGGDGGGGGGSGGGGSGGGGSGGGGSGGGGSGGLLGRDLLTKLKAQIQFSTEGPQVTWEDRPAMCLVLNLEEEYRLHEKPVPPSIDPSWLQLFPMVWAEKAGMGLANQVPPVVVELKSDASPVAVRQYPMSKEAREGIRPHIQRFLDLGILVPCQSPWNTPLLPVKKPGTNDYRPVQDLREVNKRVQDIHPTVPNPYNLLSSLPPSHTWYSVLDLKDAFFCLKLHPNSQPLFAFEWRDPEKGNTGQLTWTRLPQGFKNSPTLFDEALHRDLASFRALNPQVVMLQYVDDLLVAAPTYRDCKEGTRRLLQELSKLGYRVSAKKAQLCREEVTYLGYLLKGGKRWLTPARKATVMKIPTPTTPRQVREFLGTAGFCRLWIPGFASLAAPLYPLTREKVPFTWTEAHQEAFGRIKEALLSAPALALPDLTKPFALYVDEKEGVARGVLTQTLGPWRRPVAYLSKKLDPVASGWPTCLKAIAAVALLLKDADKLTLGQNVLVIAPHNLESIVRQPPDRWMTNARMTHYQSLLLNERVSFAPPAILNPATLLPVESDDTPIHICSEILAEETGTRPDLRDQPLPGVPAWYTDGSSFIMDGRRQAGAAIVDNKRTVWASNLPEGTSAQKAELIALTQALRLAEGKSINIYTDSRYAFATAHVHGAIYKQRGLLTSAGKDIKNKEEILALLEAIHLPKRVAIIHCPGHQRGTDPVATGNRKADEAAKQAAQSTRILTETTKNAGKRTADGSEFEKRTADGSEFESPKKKAKVE

SEQ ID NO: 6175 - protein, 2141 aa, synthetic construct
MPAAKRVKLDGGDKKYSIGLDIGTNSVGWAVITDEYKVPSKKFKVLGNTDRHSIKKNLIGALLFDSGETAEATRLKRTARRRYTRRKNRICYLQEIFSNEMAKVDDSFFHRLEESFLVEEDKKHERHPIFGNIVDEVAYHEKYPTIYHLRKKLVDSTDKADLRLIYLALAHMIKFRGHFLIEGDLNPDNSDVDKLFIQLVQTYNQLFEENPINASGVDAKAILSARLSKSRRLENLIAQLPGEKKNGLFGNLIALSLGLTPNFKSNFDLAEDAKLQLSKDTYDDDLDNLLAQIGDQYADLFLAAKNLSDAILLSDILRVNTEITKAPLSASMIKRYDEHHQDLTLLKALVRQQLPEKYKEIFFDQSKNGYAGYIDGGASQEEFYKFIKPILEKMDGTEELLVKLNREDLLRKQRTFDNGSIPHQIHLGELHAILRRQEDFYPFLKDNREKIEKILTFRIPYYVGPLARGNSRFAWMTRKSEETITPWNFEEVVDKGASAQSFIERMTNFDKNLPNEKVLPKHSLLYEYFTVYNELTKVKYVTEGMRKPAFLSGEQKKAIVDLLFKTNRKVTVKQLKEDYFKKIECFDSVEISGVEDRFNASLGTYHDLLKIIKDKDFLDNEENEDILEDIVLTLTLFEDREMIEERLKTYAHLFDDKVMKQLKRRRYTGWGRLSRKLINGIRDKQSGKTILDFLKSDGFANRNFMQLIHDDSLTFKEDIQKAQVSGQGDSLHEHIANLAGSPAIKKGILQTVKVVDELVKVMGRHKPENIVIEMARENQTTQKGQKNSRERMKRIEEGIKELGSQILKEHPVENTQLQNEKLYLYYLQNGRDMYVDQELDINRLSDYDVDHIVPQSFLKDDSIDNKVLTRSDKARGKSDNVPSEEVVKKMKNYWRQLLNAKLITQRKFDNLTKAERGGLSELDKAGFIKRQLVETRQITKHVAQILDSRMNTKYDENDKLIREVKVITLKSKLVSDFRKDFQFYKVREINNYHHAHDAYLNAVVGTALIKKYPKLESEFVYGDYKVYDVRKMIAKSEQEIGKATAKYFFYSNIMNFFKTEITLANGEIRKRPLIETNGETGEIVWDKGRDFATVRKVLSMPQVNIVKKTEVQTGGFSKESILPKRNSDKLIARKKDWDPKKYGGFDSPTVAYSVLVVAKVEKGKSKKLKSVKELLGITIMERSSFEKNPIDFLEAKGYKEVKKDLIIKLPKYSLFELENGRKRMLASAGELQKGNELALPSKYVNFLYLASHYEKLKGSPEDNEQKQLFVEQHKHYLDEIIEQISEFSKRVILADANLDKVLSAYNKHRDKPIREQAENIIHLFTLTNLGAPAAFKYFDTTIDRKRYTSTKEVLDATLIHQSITGLYETRIDLSQLGGDGGGGGGSGGGGSGGGGSGGGGSGGGGSGGLLGRDLLTKLKAQIQFSTEGPQVTWEDRPAMCLVLNLEEEYRLHEKPVPPSIDPSWLQLFPMVWAEKAGMGLANQVPPVVVELKSDASPVAVRQYPMSKEAREGIRPHIQRFLDLGILVPCQSPWNTPLLPVKKPGTNDYRPVQDLREVNKRVQDIHPTVPNPYNLLSSLPPSHTWYSVLDLKDAFFCLKLHPNSQPLFAFEWRDPEKGNTGQLTWTRLPQGFKNSPTLFNEALHRDLASFRALNPQVVMLQYVDDLLVAAPTYRDCKEGTRRLLQELSKLGYRVSAKKAQLCREEVTYLGYLLKGGKRWLTPARKATVMKIPTPTTPRQVREFLGTAGFCRLWIPGFASLAAPLYPLTRPKVPFTWTEAHQEAFGRIKEALLSAPALALPDLTKPFALYVDEKEGVARGVLTQTLGPWRRPVAYLSKKLDPVASGWPTCLKAIAAVALLLKDADKLTLGQNVLVIAPHNLESIVRQPPDRWMTNARMTHYQSLLLNERVSFAPPAILNPATLLPVESDDTPIHICSEILAEETGTRPDLRDQPLPGVPAWYTDGSSFIMDGRRQAGAAIVDNKRTVWASNLPEGTSAQKAELIALTQALRLAEGKSINIYTDSRYAFATAHVHGAIYKQRGWLTSAGKDIKNKEEILALLEAIHLPKRVAIIHCPGHQRGTDPVATGNRKADEAAKQAAQSTRILTETTKNAGKRTADGSEFEKRTADGSEFESPKKKAKVE

SEQ ID NO: 6176 - protein, 2141 aa, synthetic construct
MPAAKRVKLDGGDKKYSIGLDIGTNSVGWAVITDEYKVPSKKFKVLGNTDRHSIKKNLIGALLFDSGETAEATRLKRTARRRYTRRKNRICYLQEIFSNEMAKVDDSFFHRLEESFLVEEDKKHERHPIFGNIVDEVAYHEKYPTIYHLRKKLVDSTDKADLRLIYLALAHMIKFRGHFLIEGDLNPDNSDVDKLFIQLVQTYNQLFEENPINASGVDAKAILSARLSKSRRLENLIAQLPGEKKNGLFGNLIALSLGLTPNFKSNFDLAEDAKLQLSKDTYDDDLDNLLAQIGDQYADLFLAAKNLSDAILLSDILRVNTEITKAPLSASMIKRYDEHHQDLTLLKALVRQQLPEKYKEIFFDQSKNGYAGYIDGGASQEEFYKFIKPILEKMDGTEELLVKLNREDLLRKQRTFDNGSIPHQIHLGELHAILRRQEDFYPFLKDNREKIEKILTFRIPYYVGPLARGNSRFAWMTRKSEETITPWNFEEVVDKGASAQSFIERMTNFDKNLPNEKVLPKHSLLYEYFTVYNELTKVKYVTEGMRKPAFLSGEQKKAIVDLLFKTNRKVTVKQLKEDYFKKIECFDSVEISGVEDRFNASLGTYHDLLKIIKDKDFLDNEENEDILEDIVLTLTLFEDREMIEERLKTYAHLFDDKVMKQLKRRRYTGWGRLSRKLINGIRDKQSGKTILDFLKSDGFANRNFMQLIHDDSLTFKEDIQKAQVSGQGDSLHEHIANLAGSPAIKKGILQTVKVVDELVKVMGRHKPENIVIEMARENQTTQKGQKNSRERMKRIEEGIKELGSQILKEHPVENTQLQNEKLYLYYLQNGRDMYVDQELDINRLSDYDVDHIVPQSFLKDDSIDNKVLTRSDKARGKSDNVPSEEVVKKMKNYWRQLLNAKLITQRKFDNLTKAERGGLSELDKAGFIKRQLVETRQITKHVAQILDSRMNTKYDENDKLIREVKVITLKSKLVSDFRKDFQFYKVREINNYHHAHDAYLNAVVGTALIKKYPKLESEFVYGDYKVYDVRKMIAKSEQEIGKATAKYFFYSNIMNFFKTEITLANGEIRKRPLIETNGETGEIVWDKGRDFATVRKVLSMPQVNIVKKTEVQTGGFSKESILPKRNSDKLIARKKDWDPKKYGGFDSPTVAYSVLVVAKVEKGKSKKLKSVKELLGITIMERSSFEKNPIDFLEAKGYKEVKKDLIIKLPKYSLFELENGRKRMLASAGELQKGNELALPSKYVNFLYLASHYEKLKGSPEDNEQKQLFVEQHKHYLDEIIEQISEFSKRVILADANLDKVLSAYNKHRDKPIREQAENIIHLFTLTNLGAPAAFKYFDTTIDRKRYTSTKEVLDATLIHQSITGLYETRIDLSQLGGDGGGGGGSGGGGSGGGGSGGGGSGGGGSGGLLGRDLLTKLKAQIQFSTEGPQVTWEDRPAMCLVLNLEEEYRLHEKPVPPSIDPSWLQLFPMVWAEKAGMGLANQVPPVVVELKSDASPVAVRQYPMSKEAREGIRPHIQRFLDLGILVPCQSPWNTPLLPVKKPGTNDYRPVQDLREVNKRVQDIHPTVPNPYNLLSSLPPSHTWYSVLDLKDAFFCLKLHPNSQPLFAFEWRDPEKGNTGQLTWTRLPQGFKNSPTLFNEALHRDLASFRALNPQVVMLQYVDDLLVAAPTYRDCKEGTRRLLQELSKLGYRVSAKKAQLCREEVTYLGYLLKGGKRWLTPARKATVMKIPTPTTPRQVREFLGKAGFCRLFIPGFASLAAPLYPLTRPKVPFTWTEAHQEAFGRIKEALLSAPALALPDLTKPFALYVDEKEGVARGVLTQTLGPWRRPVAYLSKKLDPVASGWPTCLKAIAAVALLLKDADKLTLGQNVLVIAPHNLESIVRQPPDRWMTNARMTHYQSLLLNERVSFAPPAILNPATLLPVESDDTPIHICSEILAEETGTRPDLRDQPLPGVPAWYTDGSSFIMDGRRQAGAAIVDNKRTVWASNLPEGTSAQKAELIALTQALRLAEGKSINIYTDSRYAFATAHVHGAIYKQRGWLTSAGKDIKNKEEILALLEAIHLPKRVAIIHCPGHQRGTDPVATGNRKADEAAKQAAQSTRILTETTKNAGKRTADGSEFEKRTADGSEFESPKKKAKVE

SEQ ID NO: 6177 - protein, 2232 aa, synthetic construct
MPAAKRVKLDGGDKKYSIGLDIGTNSVGWAVITDEYKVPSKKFKVLGNTDRHSIKKNLIGALLFDSGETAEATRLKRTARRRYTRRKNRICYLQEIFSNEMAKVDDSFFHRLEESFLVEEDKKHERHPIFGNIVDEVAYHEKYPTIYHLRKKLVDSTDKADLRLIYLALAHMIKFRGHFLIEGDLNPDNSDVDKLFIQLVQTYNQLFEENPINASGVDAKAILSARLSKSRRLENLIAQLPGEKKNGLFGNLIALSLGLTPNFKSNFDLAEDAKLQLSKDTYDDDLDNLLAQIGDQYADLFLAAKNLSDAILLSDILRVNTEITKAPLSASMIKRYDEHHQDLTLLKALVRQQLPEKYKEIFFDQSKNGYAGYIDGGASQEEFYKFIKPILEKMDGTEELLVKLNREDLLRKQRTFDNGSIPHQIHLGELHAILRRQEDFYPFLKDNREKIEKILTFRIPYYVGPLARGNSRFAWMTRKSEETITPWNFEEVVDKGASAQSFIERMTNFDKNLPNEKVLPKHSLLYEYFTVYNELTKVKYVTEGMRKPAFLSGEQKKAIVDLLFKTNRKVTVKQLKEDYFKKIECFDSVEISGVEDRFNASLGTYHDLLKIIKDKDFLDNEENEDILEDIVLTLTLFEDREMIEERLKTYAHLFDDKVMKQLKRRRYTGWGRLSRKLINGIRDKQSGKTILDFLKSDGFANRNFMQLIHDDSLTFKEDIQKAQVSGQGDSLHEHIANLAGSPAIKKGILQTVKVVDELVKVMGRHKPENIVIEMARENQTTQKGQKNSRERMKRIEEGIKELGSQILKEHPVENTQLQNEKLYLYYLQNGRDMYVDQELDINRLSDYDVDHIVPQSFLKDDSIDNKVLTRSDKARGKSDNVPSEEVVKKMKNYWRQLLNAKLITQRKFDNLTKAERGGLSELDKAGFIKRQLVETRQITKHVAQILDSRMNTKYDENDKLIREVKVITLKSKLVSDFRKDFQFYKVREINNYHHAHDAYLNAVVGTALIKKYPKLESEFVYGDYKVYDVRKMIAKSEQEIGKATAKYFFYSNIMNFFKTEITLANGEIRKRPLIETNGETGEIVWDKGRDFATVRKVLSMPQVNIVKKTEVQTGGFSKESILPKRNSDKLIARKKDWDPKKYGGFDSPTVAYSVLVVAKVEKGKSKKLKSVKELLGITIMERSSFEKNPIDFLEAKGYKEVKKDLIIKLPKYSLFELENGRKRMLASAGELQKGNELALPSKYVNFLYLASHYEKLKGSPEDNEQKQLFVEQHKHYLDEIIEQISEFSKRVILADANLDKVLSAYNKHRDKPIREQAENIIHLFTLTNLGAPAAFKYFDTTIDRKRYTSTKEVLDATLIHQSITGLYETRIDLSQLGGDGGGGGGSGGGGSGGGGSGGGGSGGGGSGGTLGDQGSRGSDPLPEPRVTLTVEGIPTEFLVNTGAEHSVLTKPMGKMGSKRTVVAGATGSKVYPWTTKRLLKIGQKQVTHSFLVIPECPAPLLGRDLLTKLKAQIQFSTEGPQVTWEDRPAMCLVLNLEEEYRLHEKPVPPSIDPSWLQLFPMVWAEKAGMGLANQVPPVVVELKSDASPVAVRQYPMSKEAREGIRPHIQRFLDLGILVPCQSPWNTPLLPVKKPGTNDYRPVQDLREVNKRVQDIHPTVPNPYNLLSSLPPSHTWYSVLDLKDAFFCLKLHPNSQPLFAFEWRDPEKGNTGQLTWTRLPQGFKNSPTLFNEALHRDLASFRALNPQVVMLQYVDDLLVAAPTYRDCKEGTRRLLQELSKLGYRVSAKKAQLCREEVTYLGYLLKGGKRWLTPARKATVMKIPTPTTPRQVREFLGTAGFCRLWIPGFASLAAPLYPLTRPKVPFTWTEAHQEAFGRIKEALLSAPALALPDLTKPFALYVDEKEGVARGVLTQTLGPWRRPVAYLSKKLDPVASGWPTCLKAIAAVALLLKDADKLTLGQNVLVIAPHNLESIVRQPPDRWMTNARMTHYQSLLLNERVSFAPPAILNPATLLPVESDDTPIHICSEILAEETGTRPDLRDQPLPGVPAWYTDGSSFIMDGRRQAGAAIVDNKRTVWASNLPEGTSAQKAELIALTQALRLAEGKSINIYTDSRYAFATAHVHGAIYKQRGWLTSAGKDIKNKEEILALLEAIHLPKRVAIIHCPGHQRGTDPVATGNRKADEAAKQAAQSTRILTETTKNAGKRTADGSEFEKRTADGSEFESPKKKAKVE

SEQ ID NO: 6178 - protein, 2110 aa, synthetic construct
MPAAKRVKLDGGDKKYSIGLDIGTNSVGWAVITDEYKVPSKKFKVLGNTDRHSIKKNLIGALLFDSGETAEATRLKRTARRRYTRRKNRICYLQEIFSNEMAKVDDSFFHRLEESFLVEEDKKHERHPIFGNIVDEVAYHEKYPTIYHLRKKLVDSTDKADLRLIYLALAHMIKFRGHFLIEGDLNPDNSDVDKLFIQLVQTYNQLFEENPINASGVDAKAILSARLSKSRRLENLIAQLPGEKKNGLFGNLIALSLGLTPNFKSNFDLAEDAKLQLSKDTYDDDLDNLLAQIGDQYADLFLAAKNLSDAILLSDILRVNTEITKAPLSASMIKRYDEHHQDLTLLKALVRQQLPEKYKEIFFDQSKNGYAGYIDGGASQEEFYKFIKPILEKMDGTEELLVKLNREDLLRKQRTFDNGSIPHQIHLGELHAILRRQEDFYPFLKDNREKIEKILTFRIPYYVGPLARGNSRFAWMTRKSEETITPWNFEEVVDKGASAQSFIERMTNFDKNLPNEKVLPKHSLLYEYFTVYNELTKVKYVTEGMRKPAFLSGEQKKAIVDLLFKTNRKVTVKQLKEDYFKKIECFDSVEISGVEDRFNASLGTYHDLLKIIKDKDFLDNEENEDILEDIVLTLTLFEDREMIEERLKTYAHLFDDKVMKQLKRRRYTGWGRLSRKLINGIRDKQSGKTILDFLKSDGFANRNFMQLIHDDSLTFKEDIQKAQVSGQGDSLHEHIANLAGSPAIKKGILQTVKVVDELVKVMGRHKPENIVIEMARENQTTQKGQKNSRERMKRIEEGIKELGSQILKEHPVENTQLQNEKLYLYYLQNGRDMYVDQELDINRLSDYDVDHIVPQSFLKDDSIDNKVLTRSDKARGKSDNVPSEEVVKKMKNYWRQLLNAKLITQRKFDNLTKAERGGLSELDKAGFIKRQLVETRQITKHVAQILDSRMNTKYDENDKLIREVKVITLKSKLVSDFRKDFQFYKVREINNYHHAHDAYLNAVVGTALIKKYPKLESEFVYGDYKVYDVRKMIAKSEQEIGKATAKYFFYSNIMNFFKTEITLANGEIRKRPLIETNGETGEIVWDKGRDFATVRKVLSMPQVNIVKKTEVQTGGFSKESILPKRNSDKLIARKKDWDPKKYGGFDSPTVAYSVLVVAKVEKGKSKKLKSVKELLGITIMERSSFEKNPIDFLEAKGYKEVKKDLIIKLPKYSLFELENGRKRMLASAGELQKGNELALPSKYVNFLYLASHYEKLKGSPEDNEQKQLFVEQHKHYLDEIIEQISEFSKRVILADANLDKVLSAYNKHRDKPIREQAENIIHLFTLTNLGAPAAFKYFDTTIDRKRYTSTKEVLDATLIHQSITGLYETRIDLSQLGGDGGGGGGSGGGGSGGGGSGGGGSGGGGSGGTLNLEDEYRLYETSAEPEVSPGSTWLSDFPQAWAETGGMGLAVRQAPLIIPLKATSTPVSIKQYPMSQEAKLGIKPHIQRLLDQGILVPCQSPWNTPLLPVKKPGTNDYRPVQDLREVNKRVEDIHPTVPNPYNLLSGLPPSHRWYTVLDLKDAFFCLRLHPTSQPLFAFEWRDPGMGISGQLTWTRLPQGFKNSPTLFNEALHRDLADFRIQHPDLILLQYVDDILLAATSELDCQQGTRALLLTLGNLGYRASAKKAQLCQKQVKYLGYLLKEGQRWLTEARKETVMGQPTPKTPRQLREFLGKAGFCRLFIPGFAEMAAPLYPLTKPGTLFNWGPDQQKAYQEIKQALLTAPALGLPDLTKPFELFVDEKQGYAKGVLTQKLGPWRRPVAYLSKKLDPVAAGWPPCLRMVAAIAVLRKDAGKLTMGQPLVILAPHAVEALVKQPPDRWLSNARMTHYQAMLLDTDRVQFGPVVALNPATLLPLPEEGAPHDCLEILAETHGTRPDLTDQPIPDADHTWYTDGSSFLQEGQRKAGAAVTTETEVIWARALPAGTSAQRAELIALTQALKMAEGKRLNVYTDSRYAFATAHIHGEIYRRRGWLTSEGREIKNKSEILALLKALFLPKRLSIIHCLGHQKGDSAEARGNRLADQAAREAAIKTPPDTSTLLAGKRTADGSEFEKRTADGSEFESPKKKAKVE

SEQ ID NO: 6179 - protein, 2110 aa, synthetic construct
MPAAKRVKLDGGDKKYSIGLDIGTNSVGWAVITDEYKVPSKKFKVLGNTDRHSIKKNLIGALLFDSGETAEATRLKRTARRRYTRRKNRICYLQEIFSNEMAKVDDSFFHRLEESFLVEEDKKHERHPIFGNIVDEVAYHEKYPTIYHLRKKLVDSTDKADLRLIYLALAHMIKFRGHFLIEGDLNPDNSDVDKLFIQLVQTYNQLFEENPINASGVDAKAILSARLSKSRRLENLIAQLPGEKKNGLFGNLIALSLGLTPNFKSNFDLAEDAKLQLSKDTYDDDLDNLLAQIGDQYADLFLAAKNLSDAILLSDILRVNTEITKAPLSASMIKRYDEHHQDLTLLKALVRQQLPEKYKEIFFDQSKNGYAGYIDGGASQEEFYKFIKPILEKMDGTEELLVKLNREDLLRKQRTFDNGSIPHQIHLGELHAILRRQEDFYPFLKDNREKIEKILTFRIPYYVGPLARGNSRFAWMTRKSEETITPWNFEEVVDKGASAQSFIERMTNFDKNLPNEKVLPKHSLLYEYFTVYNELTKVKYVTEGMRKPAFLSGEQKKAIVDLLFKTNRKVTVKQLKEDYFKKIECFDSVEISGVEDRFNASLGTYHDLLKIIKDKDFLDNEENEDILEDIVLTLTLFEDREMIEERLKTYAHLFDDKVMKQLKRRRYTGWGRLSRKLINGIRDKQSGKTILDFLKSDGFANRNFMQLIHDDSLTFKEDIQKAQVSGQGDSLHEHIANLAGSPAIKKGILQTVKVVDELVKVMGRHKPENIVIEMARENQTTQKGQKNSRERMKRIEEGIKELGSQILKEHPVENTQLQNEKLYLYYLQNGRDMYVDQELDINRLSDYDVDHIVPQSFLKDDSIDNKVLTRSDKARGKSDNVPSEEVVKKMKNYWRQLLNAKLITQRKFDNLTKAERGGLSELDKAGFIKRQLVETRQITKHVAQILDSRMNTKYDENDKLIREVKVITLKSKLVSDFRKDFQFYKVREINNYHHAHDAYLNAVVGTALIKKYPKLESEFVYGDYKVYDVRKMIAKSEQEIGKATAKYFFYSNIMNFFKTEITLANGEIRKRPLIETNGETGEIVWDKGRDFATVRKVLSMPQVNIVKKTEVQTGGFSKESILPKRNSDKLIARKKDWDPKKYGGFDSPTVAYSVLVVAKVEKGKSKKLKSVKELLGITIMERSSFEKNPIDFLEAKGYKEVKKDLIIKLPKYSLFELENGRKRMLASAGELQKGNELALPSKYVNFLYLASHYEKLKGSPEDNEQKQLFVEQHKHYLDEIIEQISEFSKRVILADANLDKVLSAYNKHRDKPIREQAENIIHLFTLTNLGAPAAFKYFDTTIDRKRYTSTKEVLDATLIHQSITGLYETRIDLSQLGGDGGGGGGSGGGGSGGGGSGGGGSGGGGSGGTLNIEDEYRLHETSKGPDVPLGSTWLSDFPQAWAETGGMGLAFRQAPLIISLKATSTPVSIKQYPMSQEARLGIKPHIQRLLDQGILVPCQSPWNTPLLPVKKPGTNDYRPVQDLREVNKRVEDIHPTVPNPYNLLSGLPPSHQWYTVLDLKDAFFCLRLHPTSQSLFAFEWKDPEMGISGQLTWTRLPQGFKNSPTLFNEALHRDLADFRIQHPDLILLQYVDDLLLAATSELDCQQGTRALLQTLGDLGYRASAKKAQICQKQVKYLGYLLKEGQRWLTEARKETVMGQPTPKTPRQLREFLGTAGLCRLWIPGFAEMAAPLYPLTKPGTLFKWGPDQQKAYQEIKQALLTAPALGLPDLTKPFELFVDEKQGYAKGVLTQKLGPWRRPVAYLSKKLDPVAAGWPPCLRMVAAIAVLTKDVGKLTMGQPLVILAPHAVEALVKQPPDRWLSNARMTHYQALLLDTDRVQFGPIVALNPATLLPLPEEGLQHDCLDILAEAHGTRPDLTDQPLPDADHTWYTDGSSFLQEGQRRAGAAVTTETEVIWAKALPAGTSAQRAELIALTQALKMAAGKKLNVYTDSRYAFATAHIHGEIYRRRGWLTSEGKEIKNKDEILALLKALFLPKRLSIIHCPGHQKGNHAEARGNRMADQAAREVATRETPETSTLLAGKRTADGSEFEKRTADGSEFESPKKKAKVE

SEQ ID NO: 6180 - protein, 2110 aa, synthetic construct
MPAAKRVKLDGGDKKYSIGLDIGTNSVGWAVITDEYKVPSKKFKVLGNTDRHSIKKNLIGALLFDSGETAEATRLKRTARRRYTRRKNRICYLQEIFSNEMAKVDDSFFHRLEESFLVEEDKKHERHPIFGNIVDEVAYHEKYPTIYHLRKKLVDSTDKADLRLIYLALAHMIKFRGHFLIEGDLNPDNSDVDKLFIQLVQTYNQLFEENPINASGVDAKAILSARLSKSRRLENLIAQLPGEKKNGLFGNLIALSLGLTPNFKSNFDLAEDAKLQLSKDTYDDDLDNLLAQIGDQYADLFLAAKNLSDAILLSDILRVNTEITKAPLSASMIKRYDEHHQDLTLLKALVRQQLPEKYKEIFFDQSKNGYAGYIDGGASQEEFYKFIKPILEKMDGTEELLVKLNREDLLRKQRTFDNGSIPHQIHLGELHAILRRQEDFYPFLKDNREKIEKILTFRIPYYVGPLARGNSRFAWMTRKSEETITPWNFEEVVDKGASAQSFIERMTNFDKNLPNEKVLPKHSLLYEYFTVYNELTKVKYVTEGMRKPAFLSGEQKKAIVDLLFKTNRKVTVKQLKEDYFKKIECFDSVEISGVEDRFNASLGTYHDLLKIIKDKDFLDNEENEDILEDIVLTLTLFEDREMIEERLKTYAHLFDDKVMKQLKRRRYTGWGRLSRKLINGIRDKQSGKTILDFLKSDGFANRNFMQLIHDDSLTFKEDIQKAQVSGQGDSLHEHIANLAGSPAIKKGILQTVKVVDELVKVMGRHKPENIVIEMARENQTTQKGQKNSRERMKRIEEGIKELGSQILKEHPVENTQLQNEKLYLYYLQNGRDMYVDQELDINRLSDYDVDHIVPQSFLKDDSIDNKVLTRSDKARGKSDNVPSEEVVKKMKNYWRQLLNAKLITQRKFDNLTKAERGGLSELDKAGFIKRQLVETRQITKHVAQILDSRMNTKYDENDKLIREVKVITLKSKLVSDFRKDFQFYKVREINNYHHAHDAYLNAVVGTALIKKYPKLESEFVYGDYKVYDVRKMIAKSEQEIGKATAKYFFYSNIMNFFKTEITLANGEIRKRPLIETNGETGEIVWDKGRDFATVRKVLSMPQVNIVKKTEVQTGGFSKESILPKRNSDKLIARKKDWDPKKYGGFDSPTVAYSVLVVAKVEKGKSKKLKSVKELLGITIMERSSFEKNPIDFLEAKGYKEVKKDLIIKLPKYSLFELENGRKRMLASAGELQKGNELALPSKYVNFLYLASHYEKLKGSPEDNEQKQLFVEQHKHYLDEIIEQISEFSKRVILADANLDKVLSAYNKHRDKPIREQAENIIHLFTLTNLGAPAAFKYFDTTIDRKRYTSTKEVLDATLIHQSITGLYETRIDLSQLGGDGGGGGGSGGGGSGGGGSGGGGSGGGGSGGTLNIEDEHRLHETSKEPDVSLGSTWLSDFPQAWAETGGMGLAVRQAPLIIPLKATSTPVSIKQYPMSQEARLGIKPHIQRLLDQGILVPCQSPWNTPLLPVKKPGTNDYRPVQDLREVNKRVEDIHPTVPNPYNLLSGLPPSHQWYTVLDLKDAFFCLRLHPTSQPLFAFEWRDPEMGISGQLTWTRLPQGFKNSPTLFNEALHRDLADFRIQHPDLILLQYVDDLLLAATSELDCQQGTRALLQTLGNLGYRASAKKAQICQKQVKYLGYLLKEGQRWLTEARKETVMGQPTPKTPRQLREFLGTAGFCRLWIPGFAEMAAPLYPLTKPGTLFNWGPDQQKAYQEIKQALLTAPALGLPDLTKPFELFVDEKQGYAKGVLTQKLGPWRRPVAYLSKKLDPVAAGWPPCLRMVAAIAVLTKDAGKLTMGQPLVILAPHAVEALVKQPPDRWLSNARMTHYQALLLDTDRVQFGPVVALNPATLLPLPEEGLQHNCLDILAEAHGTRPDLTDQPLPDADHTWYTDGSSLLQEGQRKAGAAVTTETEVIWAKALPAGTSAQRAELIALTQALKMAEGKKLNVYTDSRYAFATAHIHGEIYRRRGWLTSEGKEIKNKDEILALLKALFLPKRLSIIHCPGHQKGHSAEARGNRMADQAARKAAITETPDTSTLLAGKRTADGSEFEKRTADGSEFESPKKKAKVE

SEQ ID NO: 6181 - protein, 2110 aa, synthetic construct; identical to SEQ ID NO: 4504

SEQ ID NO: 6182 - protein, 2110 aa, synthetic construct; identical to SEQ ID NO: 6180

SEQ ID NO: 6183 - protein, 2110 aa, synthetic construct; identical to SEQ ID NO: 4504

SEQ ID NO: 6184 - protein, 2130 aa, synthetic construct
MPAAKRVKLDGGDKKYSIGLDIGTNSVGWAVITDEYKVPSKKFKVLGNTDRHSIKKNLIGALLFDSGETAEATRLKRTARRRYTRRKNRICYLQEIFSNEMAKVDDSFFHRLEESFLVEEDKKHERHPIFGNIVDEVAYHEKYPTIYHLRKKLVDSTDKADLRLIYLALAHMIKFRGHFLIEGDLNPDNSDVDKLFIQLVQTYNQLFEENPINASGVDAKAILSARLSKSRRLENLIAQLPGEKKNGLFGNLIALSLGLTPNFKSNFDLAEDAKLQLSKDTYDDDLDNLLAQIGDQYADLFLAAKNLSDAILLSDILRVNTEITKAPLSASMIKRYDEHHQDLTLLKALVRQQLPEKYKEIFFDQSKNGYAGYIDGGASQEEFYKFIKPILEKMDGTEELLVKLNREDLLRKQRTFDNGSIPHQIHLGELHAILRRQEDFYPFLKDNREKIEKILTFRIPYYVGPLARGNSRFAWMTRKSEETITPWNFEEVVDKGASAQSFIERMTNFDKNLPNEKVLPKHSLLYEYFTVYNELTKVKYVTEGMRKPAFLSGEQKKAIVDLLFKTNRKVTVKQLKEDYFKKIECFDSVEISGVEDRFNASLGTYHDLLKIIKDKDFLDNEENEDILEDIVLTLTLFEDREMIEERLKTYAHLFDDKVMKQLKRRRYTGWGRLSRKLINGIRDKQSGKTILDFLKSDGFANRNFMQLIHDDSLTFKEDIQKAQVSGQGDSLHEHIANLAGSPAIKKGILQTVKVVDELVKVMGRHKPENIVIEMARENQTTQKGQKNSRERMKRIEEGIKELGSQILKEHPVENTQLQNEKLYLYYLQNGRDMYVDQELDINRLSDYDVDHIVPQSFLKDDSIDNKVLTRSDKARGKSDNVPSEEVVKKMKNYWRQLLNAKLITQRKFDNLTKAERGGLSELDKAGFIKRQLVETRQITKHVAQILDSRMNTKYDENDKLIREVKVITLKSKLVSDFRKDFQFYKVREINNYHHAHDAYLNAVVGTALIKKYPKLESEFVYGDYKVYDVRKMIAKSEQEIGKATAKYFFYSNIMNFFKTEITLANGEIRKRPLIETNGETGEIVWDKGRDFATVRKVLSMPQVNIVKKTEVQTGGFSKESILPKRNSDKLIARKKDWDPKKYGGFDSPTVAYSVLVVAKVEKGKSKKLKSVKELLGITIMERSSFEKNPIDFLEAKGYKEVKKDLIIKLPKYSLFELENGRKRMLASAGELQKGNELALPSKYVNFLYLASHYEKLKGSPEDNEQKQLFVEQHKHYLDEIIEQISEFSKRVILADANLDKVLSAYNKHRDKPIREQAENIIHLFTLTNLGAPAAFKYFDTTIDRKRYTSTKEVLDATLIHQSITGLYETRIDLSQLGGDGGGGGGSGGGGSGGGGSGGGGSGGGGSGGVQEISDSRPMLHIYLNGRRFLGLLDTGADKTCIAGRDWPANWPIHQTESSLQGLGMACGVARSSQPLRWQHEDKSGIIHPFVIPTLPFTLWGRDIMKDIKVRLMTDSPDDSQDLMIGAIESNLFADQISWKSDQPVWLNQWPLKQEKLQALQQLVTEQLQLGHLEESNSPWNTPVFVIKKKSGKWRLLQDLRAVNATMHDMGALQPGLPSPVAVPKGWEIIIIDLQDCFFNIKLHPEDCKRFAFSVPSPNFKRPYQRFQWKVLPQGMKNSPTLCQKFVDKAILTVRDKYQDSYIVHYMDDILLAHPSRSIVDEILTSMIQALNKHGLVVSTEKIQKYDNLKYLGTHIQGDSVSYQKLQIRTDKLRTLNDFQKLLGNINWIRPFLKLTTGELKPLFEILNGDSNPISTRKLTPEACKALQLMNERLSTARVKRLDLSQPWSLCILKTEYTPTACLWQDGVVEWIHLPHISPKVITPYDIFCTQLIIKGRHRSKELFSKDPDYIVVPYTKVQFDLLLQEKEDWPISLLGFLGEVHFHLPKDPLLTFTLQTAIIFPHMTSTTPLEKGIVIFTDGSANGRSVTYIQGREPIIKENTQNTAQQAEIVAVITAFEEVSQPFNLYTDSKYVTGLFPEIETATLSPRTKIYTELKHLQRLIHKRQEKFYIGHIRGHTGLPGPLAQGNAYADSLTRILTAAGKRTADGSEFEKRTADGSEFESPKKKAKVE

SEQ ID NO: 6185 - protein, 2130 aa, synthetic construct
MPAAKRVKLDGGDKKYSIGLDIGTNSVGWAVITDEYKVPSKKFKVLGNTDRHSIKKNLIGALLFDSGETAEATRLKRTARRRYTRRKNRICYLQEIFSNEMAKVDDSFFHRLEESFLVEEDKKHERHPIFGNIVDEVAYHEKYPTIYHLRKKLVDSTDKADLRLIYLALAHMIKFRGHFLIEGDLNPDNSDVDKLFIQLVQTYNQLFEENPINASGVDAKAILSARLSKSRRLENLIAQLPGEKKNGLFGNLIALSLGLTPNFKSNFDLAEDAKLQLSKDTYDDDLDNLLAQIGDQYADLFLAAKNLSDAILLSDILRVNTEITKAPLSASMIKRYDEHHQDLTLLKALVRQQLPEKYKEIFFDQSKNGYAGYIDGGASQEEFYKFIKPILEKMDGTEELLVKLNREDLLRKQRTFDNGSIPHQIHLGELHAILRRQEDFYPFLKDNREKIEKILTFRIPYYVGPLARGNSRFAWMTRKSEETITPWNFEEVVDKGASAQSFIERMTNFDKNLPNEKVLPKHSLLYEYFTVYNELTKVKYVTEGMRKPAFLSGEQKKAIVDLLFKTNRKVTVKQLKEDYFKKIECFDSVEISGVEDRFNASLGTYHDLLKIIKDKDFLDNEENEDILEDIVLTLTLFEDREMIEERLKTYAHLFDDKVMKQLKRRRYTGWGRLSRKLINGIRDKQSGKTILDFLKSDGFANRNFMQLIHDDSLTFKEDIQKAQVSGQGDSLHEHIANLAGSPAIKKGILQTVKVVDELVKVMGRHKPENIVIEMARENQTTQKGQKNSRERMKRIEEGIKELGSQILKEHPVENTQLQNEKLYLYYLQNGRDMYVDQELDINRLSDYDVDHIVPQSFLKDDSIDNKVLTRSDKARGKSDNVPSEEVVKKMKNYWRQLLNAKLITQRKFDNLTKAERGGLSELDKAGFIKRQLVETRQITKHVAQILDSRMNTKYDENDKLIREVKVITLKSKLVSDFRKDFQFYKVREINNYHHAHDAYLNAVVGTALIKKYPKLESEFVYGDYKVYDVRKMIAKSEQEIGKATAKYFFYSNIMNFFKTEITLANGEIRKRPLIETNGETGEIVWDKGRDFATVRKVLSMPQVNIVKKTEVQTGGFSKESILPKRNSDKLIARKKDWDPKKYGGFDSPTVAYSVLVVAKVEKGKSKKLKSVKELLGITIMERSSFEKNPIDFLEAKGYKEVKKDLIIKLPKYSLFELENGRKRMLASAGELQKGNELALPSKYVNFLYLASHYEKLKGSPEDNEQKQLFVEQHKHYLDEIIEQISEFSKRVILADANLDKVLSAYNKHRDKPIREQAENIIHLFTLTNLGAPAAFKYFDTTIDRKRYTSTKEVLDATLIHQSITGLYETRIDLSQLGGDGGGGGGSGGGGSGGGGSGGGGSGGGGSGGWVQEISDSRPMLHIYLNGRRFLGLLNTGADKTCIAGRDWPANWPIHQTESSLQGLGMACGVARSSQPLRWQHEDKSGIIHPFVIPTLPFTLWGRDIMKDIKVRLMTDSPDDSQDLMIGAIESNLFADQISWKSDQPVWLNQWPLKQEKLQALQQLVTEQLQLGHLEESNSPWNTPVFVIKKKSGKWRLLQDLRAVNATMHDMGALQPGLPSPVAVPKGWEIIIIDLQDCFFNIKLHPEDCKRFAFSVPSPNFKRPYQRFQWKVLPQGMKNSPTLCQKFVDKAILTVRDKYQDSYIVHYMDDILLAHPSRSIVDEILTSMIQALNKHGLVVSTEKIQKYDNLKYLGTHIQGDSVSYQKLQIRTDKLRTLNDFQKLLGNINWIRPFLKLTTGELKPLFEILNGDSNPISTRKLTPEACKALQLMNERLSTARVKRLDLSQPWSLCILKTEYTPTACLWQDGVVEWIHLPHISPKVITPYDIFCTQLIIKGRHRSKELFSKDPDYIVVPYTKVQFDLLLQEKEDWPISLLGFLGEVHFHLPKDPLLTFTLQTAIIFPHMTSTTPLEKGIVIFTDGSANGRSVTYIQGREPIIKENTQNTAQQAEIVAVITAFEEVSQPFNLYTDSKYVTGLFPEIETATLSPRTKIYTELKHLQRLIHKRQEKFYIGHIRGHTGLPGPLAQGNAYADSLTRILTAGKRTADGSEFEKRTADGSEFESPKKKAKVE

SEQ ID NO: 6186 - protein, 2130 aa, synthetic construct; identical to SEQ ID NO: 6185

SEQ ID NO: 6187 - protein, 2038 aa, synthetic construct
MPAAKRVKLDGGDKKYSIGLDIGTNSVGWAVITDEYKVPSKKFKVLGNTDRHSIKKNLIGALLFDSGETAEATRLKRTARRRYTRRKNRICYLQEIFSNEMAKVDDSFFHRLEESFLVEEDKKHERHPIFGNIVDEVAYHEKYPTIYHLRKKLVDSTDKADLRLIYLALAHMIKFRGHFLIEGDLNPDNSDVDKLFIQLVQTYNQLFEENPINASGVDAKAILSARLSKSRRLENLIAQLPGEKKNGLFGNLIALSLGLTPNFKSNFDLAEDAKLQLSKDTYDDDLDNLLAQIGDQYADLFLAAKNLSDAILLSDILRVNTEITKAPLSASMIKRYDEHHQDLTLLKALVRQQLPEKYKEIFFDQSKNGYAGYIDGGASQEEFYKFIKPILEKMDGTEELLVKLNREDLLRKQRTFDNGSIPHQIHLGELHAILRRQEDFYPFLKDNREKIEKILTFRIPYYVGPLARGNSRFAWMTRKSEETITPWNFEEVVDKGASAQSFIERMTNFDKNLPNEKVLPKHSLLYEYFTVYNELTKVKYVTEGMRKPAFLSGEQKKAIVDLLFKTNRKVTVKQLKEDYFKKIECFDSVEISGVEDRFNASLGTYHDLLKIIKDKDFLDNEENEDILEDIVLTLTLFEDREMIEERLKTYAHLFDDKVMKQLKRRRYTGWGRLSRKLINGIRDKQSGKTILDFLKSDGFANRNFMQLIHDDSLTFKEDIQKAQVSGQGDSLHEHIANLAGSPAIKKGILQTVKVVDELVKVMGRHKPENIVIEMARENQTTQKGQKNSRERMKRIEEGIKELGSQILKEHPVENTQLQNEKLYLYYLQNGRDMYVDQELDINRLSDYDVDHIVPQSFLKDDSIDNKVLTRSDKARGKSDNVPSEEVVKKMKNYWRQLLNAKLITQRKFDNLTKAERGGLSELDKAGFIKRQLVETRQITKHVAQILDSRMNTKYDENDKLIREVKVITLKSKLVSDFRKDFQFYKVREINNYHHAHDAYLNAVVGTALIKKYPKLESEFVYGDYKVYDVRKMIAKSEQEIGKATAKYFFYSNIMNFFKTEITLANGEIRKRPLIETNGETGEIVWDKGRDFATVRKVLSMPQVNIVKKTEVQTGGFSKESILPKRNSDKLIARKKDWDPKKYGGFDSPTVAYSVLVVAKVEKGKSKKLKSVKELLGITIMERSSFEKNPIDFLEAKGYKEVKKDLIIKLPKYSLFELENGRKRMLASAGELQKGNELALPSKYVNFLYLASHYEKLKGSPEDNEQKQLFVEQHKHYLDEIIEQISEFSKRVILADANLDKVLSAYNKHRDKPIREQAENIIHLFTLTNLGAPAAFKYFDTTIDRKRYTSTKEVLDATLIHQSITGLYETRIDLSQLGGDGGGGGGSGGGGSGGGGSGGGGSGGGGSGGGRDIMKDIKVRLMTDSPDDSQDLMIGAIESNLFADQISWKSDQPVWLNQWPLKQEKLQALQQLVTEQLQLGHLEESNSPWNTPVFVIKKKSGKWRLLQDLRAVNATMHDMGALQPGLPSPVAVPKGWEIIIIDLQDCFFNIKLHPEDCKRFAFSVPSPNFKRPYQRFQWKVLPQGMKNSPTLCQKFVDKAILTVRDKYQDSYIVHYMDDILLAHPSRSIVDEILTSMIQALNKHGLVVSTEKIQKYDNLKYLGTHIQGDSVSYQKLQIRTDKLRTLNDFQKLLGNINWIRPFLKLTTGELKPLFEILNGDSNPISTRKLTPEACKALQLMNERLSTARVKRLDLSQPWSLCILKTEYTPTACLWQDGVVEWIHLPHISPKVITPYDIFCTQLIIKGRHRSKELFSKDPDYIVVPYTKVQFDLLLQEKEDWPISLLGFLGEVHFHLPKDPLLTFTLQTAIIFPHMTSTTPLEKGIVIFTDGSANGRSVTYIQGREPIIKENTQNTAQQAEIVAVITAFEEVSQPFNLYTDSKYVTGLFPEIETATLSPRTKIYTELKHLQRLIHKRQEKFYIGHIRGHTGLPGPLAQGNAYADSLTRILTAGKRTADGSEFEKRTADGSEFESPKKKAKVE

SEQ ID NO: 6188 - protein, 2102 aa, synthetic construct
MPAAKRVKLDGGDKKYSIGLDIGTNSVGWAVITDEYKVPSKKFKVLGNTDRHSIKKNLIGALLFDSGETAEATRLKRTARRRYTRRKNRICYLQEIFSNEMAKVDDSFFHRLEESFLVEEDKKHERHPIFGNIVDEVAYHEKYPTIYHLRKKLVDSTDKADLRLIYLALAHMIKFRGHFLIEGDLNPDNSDVDKLFIQLVQTYNQLFEENPINASGVDAKAILSARLSKSRRLENLIAQLPGEKKNGLFGNLIALSLGLTPNFKSNFDLAEDAKLQLSKDTYDDDLDNLLAQIGDQYADLFLAAKNLSDAILLSDILRVNTEITKAPLSASMIKRYDEHHQDLTLLKALVRQQLPEKYKEIFFDQSKNGYAGYIDGGASQEEFYKFIKPILEKMDGTEELLVKLNREDLLRKQRTFDNGSIPHQIHLGELHAILRRQEDFYPFLKDNREKIEKILTFRIPYYVGPLARGNSRFAWMTRKSEETITPWNFEEVVDKGASAQSFIERMTNFDKNLPNEKVLPKHSLLYEYFTVYNELTKVKYVTEGMRKPAFLSGEQKKAIVDLLFKTNRKVTVKQLKEDYFKKIECFDSVEISGVEDRFNASLGTYHDLLKIIKDKDFLDNEENEDILEDIVLTLTLFEDREMIEERLKTYAHLFDDKVMKQLKRRRYTGWGRLSRKLINGIRDKQSGKTILDFLKSDGFANRNFMQLIHDDSLTFKEDIQKAQVSGQGDSLHEHIANLAGSPAIKKGILQTVKVVDELVKVMGRHKPENIVIEMARENQTTQKGQKNSRERMKRIEEGIKELGSQILKEHPVENTQLQNEKLYLYYLQNGRDMYVDQELDINRLSDYDVDHIVPQSFLKDDSIDNKVLTRSDKARGKSDNVPSEEVVKKMKNYWRQLLNAKLITQRKFDNLTKAERGGLSELDKAGFIKRQLVETRQITKHVAQILDSRMNTKYDENDKLIREVKVITLKSKLVSDFRKDFQFYKVREINNYHHAHDAYLNAVVGTALIKKYPKLESEFVYGDYKVYDVRKMIAKSEQEIGKATAKYFFYSNIMNFFKTEITLANGEIRKRPLIETNGETGEIVWDKGRDFATVRKVLSMPQVNIVKKTEVQTGGFSKESILPKRNSDKLIARKKDWDPKKYGGFDSPTVAYSVLVVAKVEKGKSKKLKSVKELLGITIMERSSFEKNPIDFLEAKGYKEVKKDLIIKLPKYSLFELENGRKRMLASAGELQKGNELALPSKYVNFLYLASHYEKLKGSPEDNEQKQLFVEQHKHYLDEIIEQISEFSKRVILADANLDKVLSAYNKHRDKPIREQAENIIHLFTLTNLGAPAAFKYFDTTIDRKRYTSTKEVLDATLIHQSITGLYETRIDLSQLGGDGGGGGGSGGGGSGGGGSGGGGSGGGGSGGLDDEYRLYSPLVKPDQNIQFWLEQFPQAWAETAGMGLAKQVPPQVIQLKASATPVSVRQYPLSKEAQEGIRPHVQRLIQQGILVPVQSPWNTPLLPVRKPGTNDYRPVQDLREVNKRVQDIHPTVPNPYNLLCALPPQRSWYTVLDLKDAFFCLRLHPTSQPLFAFEWRDPGTGRTGQLTWTRLPQGFKNSPTIFNEALHRDLANFRIQHPQVTLLQYVDDLLLAGATKQDCLEGTKALLLELSDLGYRASAKKAQICRREVTYLGYSLRDGQRWLTEARKKTVVQIPAPTTAKQVREFLGKAGFCRLFIPGFATLAAPLYPLTKPKGEFSWAPEHQKAFDAIKKALLSAPALALPDVTKPFTLYVDERKGVARGVLTQTLGPWRRPVAYLSKKLDPVASGWPVCLKAIAAVAILVKDADKLTLGQNITVIAPHALENIVRQPPDRWMTNARMTHYQSLLLTERVTFAPPAALNPATLLPEETDEPVTHDCHQLLIEETGVRKDLTDIPLTGEVLTWFTDGSSYVVEGKRMAGAAVVDGTRTIWASSLPEGTSAQKAELMALTQALRLAEGKSINIYTDSRYAFATAHVHGAIYKQRGWLTSAGREIKNKEEILSLLEALHLPKRLAIIHCPGHQKAKDPISRGNQMADRVAKQAAQGVNLLPAGKRTADGSEFEKRTADGSEFESPKKKAKVE

SEQ ID NO: 6189 - protein, 2104 aa, synthetic construct
MPAAKRVKLDGGDKKYSIGLDIGTNSVGWAVITDEYKVPSKKFKVLGNTDRHSIKKNLIGALLFDSGETAEATRLKRTARRRYTRRKNRICYLQEIFSNEMAKVDDSFFHRLEESFLVEEDKKHERHPIFGNIVDEVAYHEKYPTIYHLRKKLVDSTDKADLRLIYLALAHMIKFRGHFLIEGDLNPDNSDVDKLFIQLVQTYNQLFEENPINASGVDAKAILSARLSKSRRLENLIAQLPGEKKNGLFGNLIALSLGLTPNFKSNFDLAEDAKLQLSKDTYDDDLDNLLAQIGDQYADLFLAAKNLSDAILLSDILRVNTEITKAPLSASMIKRYDEHHQDLTLLKALVRQQLPEKYKEIFFDQSKNGYAGYIDGGASQEEFYKFIKPILEKMDGTEELLVKLNREDLLRKQRTFDNGSIPHQIHLGELHAILRRQEDFYPFLKDNREKIEKILTFRIPYYVGPLARGNSRFAWMTRKSEETITPWNFEEVVDKGASAQSFIERMTNFDKNLPNEKVLPKHSLLYEYFTVYNELTKVKYVTEGMRKPAFLSGEQKKAIVDLLFKTNRKVTVKQLKEDYFKKIECFDSVEISGVEDRFNASLGTYHDLLKIIKDKDFLDNEENEDILEDIVLTLTLFEDREMIEERLKTYAHLFDDKVMKQLKRRRYTGWGRLSRKLINGIRDKQSGKTILDFLKSDGFANRNFMQLIHDDSLTFKEDIQKAQVSGQGDSLHEHIANLAGSPAIKKGILQTVKVVDELVKVMGRHKPENIVIEMARENQTTQKGQKNSRERMKRIEEGIKELGSQILKEHPVENTQLQNEKLYLYYLQNGRDMYVDQELDINRLSDYDVDHIVPQSFLKDDSIDNKVLTRSDKARGKSDNVPSEEVVKKMKNYWRQLLNAKLITQRKFDNLTKAERGGLSELDKAGFIKRQLVETRQITKHVAQILDSRMNTKYDENDKLIREVKVITLKSKLVSDFRKDFQFYKVREINNYHHAHDAYLNAVVGTALIKKYPKLESEFVYGDYKVYDVRKMIAKSEQEIGKATAKYFFYSNIMNFFKTEITLANGEIRKRPLIETNGETGEIVWDKGRDFATVRKVLSMPQVNIVKKTEVQTGGFSKESILPKRNSDKLIARKKDWDPKKYGGFDSPTVAYSVLVVAKVEKGKSKKLKSVKELLGITIMERSSFEKNPIDFLEAKGYKEVKKDLIIKLPKYSLFELENGRKRMLASAGELQKGNELALPSKYVNFLYLASHYEKLKGSPEDNEQKQLFVEQHKHYLDEIIEQISEFSKRVILADANLDKVLSAYNKHRDKPIREQAENIIHLFTLTNLGAPAAFKYFDTTIDRKRYTSTKEVLDATLIHQSITGLYETRIDLSQLGGDGGGGGGSGGGGSGGGGSGGGGSGGGGSGGTLQLDDEYRLYSPLVKPDQNIQFWLEQFPQAWAETAGMGLAKQVPPQVIQLKASATPVSVRQYPLSKEAQEGIRPHVQRLIQQGILVPVQSPWNTPLLPVRKPGTNDYRPVQDLREVNKRVQDIHPTVPNPYNLLCALPPQRSWYTVLDLKDAFFCLRLHPTSQPLFAFEWRDPGTGRTGQLTWTRLPQGFKNSPTIFDEALHRDLANFRIQHPQVTLLQYVDDLLLAGATKQDCLEGTKALLLELSDLGYRASAKKAQICRREVTYLGYSLRDGQRWLTEARKKTVVQIPAPTTAKQVREFLGTAGFCRLWIPGFATLAAPLYPLTKEKGEFSWAPEHQKAFDAIKKALLSAPALALPDVTKPFTLYVDERKGVARGVLTQTLGPWRRPVAYLSKKLDPVASGWPVCLKAIAAVAILVKDADKLTLGQNITVIAPHALENIVRQPPDRWMTNARMTHYQSLLLTERVTFAPPAALNPATLLPEETDEPVTHDCHQLLIEETGVRKDLTDIPLTGEVLTWFTDGSSYVVEGKRMAGAAVVDGTRTIWASSLPEGTSAQKAELMALTQALRLAEGKSINIYTDSRYAFATAHVHGAIYKQRGLLTSAGREIKNKEEILSLLEALHLPKRLAIIHCPGHQKAKDPISRGNQMADRVAKQAAQGVNLLAGKRTADGSEFEKRTADGSEFESPKKKAKVE

SEQ ID NO: 6190 - protein, 2104 aa, synthetic construct
MPAAKRVKLDGGDKKYSIGLDIGTNSVGWAVITDEYKVPSKKFKVLGNTDRHSIKKNLIGALLFDSGETAEATRLKRTARRRYTRRKNRICYLQEIFSNEMAKVDDSFFHRLEESFLVEEDKKHERHPIFGNIVDEVAYHEKYPTIYHLRKKLVDSTDKADLRLIYLALAHMIKFRGHFLIEGDLNPDNSDVDKLFIQLVQTYNQLFEENPINASGVDAKAILSARLSKSRRLENLIAQLPGEKKNGLFGNLIALSLGLTPNFKSNFDLAEDAKLQLSKDTYDDDLDNLLAQIGDQYADLFLAAKNLSDAILLSDILRVNTEITKAPLSASMIKRYDEHHQDLTLLKALVRQQLPEKYKEIFFDQSKNGYAGYIDGGASQEEFYKFIKPILEKMDGTEELLVKLNREDLLRKQRTFDNGSIPHQIHLGELHAILRRQEDFYPFLKDNREKIEKILTFRIPYYVGPLARGNSRFAWMTRKSEETITPWNFEEVVDKGASAQSFIERMTNFDKNLPNEKVLPKHSLLYEYFTVYNELTKVKYVTEGMRKPAFLSGEQKKAIVDLLFKTNRKVTVKQLKEDYFKKIECFDSVEISGVEDRFNASLGTYHDLLKIIKDKDFLDNEENEDILEDIVLTLTLFEDREMIEERLKTYAHLFDDKVMKQLKRRRYTGWGRLSRKLINGIRDKQSGKTILDFLKSDGFANRNFMQLIHDDSLTFKEDIQKAQVSGQGDSLHEHIANLAGSPAIKKGILQTVKVVDELVKVMGRHKPENIVIEMARENQTTQKGQKNSRERMKRIEEGIKELGSQILKEHPVENTQLQNEKLYLYYLQNGRDMYVDQELDINRLSDYDVDHIVPQSFLKDDSIDNKVLTRSDKARGKSDNVPSEEVVKKMKNYWRQLLNAKLITQRKFDNLTKAERGGLSELDKAGFIKRQLVETRQITKHVAQILDSRMNTKYDENDKLIREVKVITLKSKLVSDFRKDFQFYKVREINNYHHAHDAYLNAVVGTALIKKYPKLESEFVYGDYKVYDVRKMIAKSEQEIGKATAKYFFYSNIMNFFKTEITLANGEIRKRPLIETNGETGEIVWDKGRDFATVRKVLSMPQVNIVKKTEVQTGGFSKESILPKRNSDKLIARKKDWDPKKYGGFDSPTVAYSVLVVAKVEKGKSKKLKSVKELLGITIMERSSFEKNPIDFLEAKGYKEVKKDLIIKLPKYSLFELENGRKRMLASAGELQKGNELALPSKYVNFLYLASHYEKLKGSPEDNEQKQLFVEQHKHYLDEIIEQISEFSKRVILADANLDKVLSAYNKHRDKPIREQAENIIHLFTLTNLGAPAAFKYFDTTIDRKRYTSTKEVLDATLIHQSITGLYETRIDLSQLGGDGGGGGGSGGGGSGGGGSGGGGSGGGGSGGTLQLDDEYRLYSPLVKPDQNIQFWLEQFPQAWAETAGMGLAKQVPPQVIQLKASATPVSVRQYPLSKEAQEGIRPHVQRLIQQGILVPVQSPWNTPLLPVRKPGTNDYRPVQDLREVNKRVQDIHPTVPNPYNLLCALPPQRSWYTVLDLKDAFFCLRLHPTSQPLFAFEWRDPGTGRTGQLTWTRLPQGFKNSPTIFNEALHRDLANFRIQHPQVTLLQYVDDLLLAGATKQDCLEGTKALLLELSDLGYRASAKKAQICRREVTYLGYSLRDGQRWLTEARKKTVVQIPAPTTAKQVREFLGTAGFCRLWIPGFATLAAPLYPLTKPKGEFSWAPEHQKAFDAIKKALLSAPALALPDVTKPFTLYVDERKGVARGVLTQTLGPWRRPVAYLSKKLDPVASGWPVCLKAIAAVAILVKDADKLTLGQNITVIAPHALENIVRQPPDRWMTNARMTHYQSLLLTERVTFAPPAALNPATLLPEETDEPVTHDCHQLLIEETGVRKDLTDIPLTGEVLTWFTDGSSYVVEGKRMAGAAVVDGTRTIWASSLPEGTSAQKAELMALTQALRLAEGKSINIYTDSRYAFATAHVHGAIYKQRGWLTSAGREIKNKEEILSLLEALHLPKRLAIIHCPGHQKAKDPISRGNQMADRVAKQAAQGVNLLAGKRTADGSEFEKRTADGSEFESPKKKAKVE

SEQ ID NO: 6191 - protein, 2190 aa, synthetic construct
MPAAKRVKLDGGDKKYSIGLDIGTNSVGWAVITDEYKVPSKKFKVLGNTDRHSIKKNLIGALLFDSGETAEATRLKRTARRRYTRRKNRICYLQEIFSNEMAKVDDSFFHRLEESFLVEEDKKHERHPIFGNIVDEVAYHEKYPTIYHLRKKLVDSTDKADLRLIYLALAHMIKFRGHFLIEGDLNPDNSDVDKLFIQLVQTYNQLFEENPINASGVDAKAILSARLSKSRRLENLIAQLPGEKKNGLFGNLIALSLGLTPNFKSNFDLAEDAKLQLSKDTYDDDLDNLLAQIGDQYADLFLAAKNLSDAILLSDILRVNTEITKAPLSASMIKRYDEHHQDLTLLKALVRQQLPEKYKEIFFDQSKNGYAGYIDGGASQEEFYKFIKPILEKMDGTEELLVKLNREDLLRKQRTFDNGSIPHQIHLGELHAILRRQEDFYPFLKDNREKIEKILTFRIPYYVGPLARGNSRFAWMTRKSEETITPWNFEEVVDKGASAQSFIERMTNFDKNLPNEKVLPKHSLLYEYFTVYNELTKVKYVTEGMRKPAFLSGEQKKAIVDLLFKTNRKVTVKQLKEDYFKKIECFDSVEISGVEDRFNASLGTYHDLLKIIKDKDFLDNEENEDILEDIVLTLTLFEDREMIEERLKTYAHLFDDKVMKQLKRRRYTGWGRLSRKLINGIRDKQSGKTILDFLKSDGFANRNFMQLIHDDSLTFKEDIQKAQVSGQGDSLHEHIANLAGSPAIKKGILQTVKVVDELVKVMGRHKPENIVIEMARENQTTQKGQKNSRERMKRIEEGIKELGSQILKEHPVENTQLQNEKLYLYYLQNGRDMYVDQELDINRLSDYDVDHIVPQSFLKDDSIDNKVLTRSDKARGKSDNVPSEEVVKKMKNYWRQLLNAKLITQRKFDNLTKAERGGLSELDKAGFIKRQLVETRQITKHVAQILDSRMNTKYDENDKLIREVKVITLKSKLVSDFRKDFQFYKVREINNYHHAHDAYLNAVVGTALIKKYPKLESEFVYGDYKVYDVRKMIAKSEQEIGKATAKYFFYSNIMNFFKTEITLANGEIRKRPLIETNGETGEIVWDKGRDFATVRKVLSMPQVNIVKKTEVQTGGFSKESILPKRNSDKLIARKKDWDPKKYGGFDSPTVAYSVLVVAKVEKGKSKKLKSVKELLGITIMERSSFEKNPIDFLEAKGYKEVKKDLIIKLPKYSLFELENGRKRMLASAGELQKGNELALPSKYVNFLYLASHYEKLKGSPEDNEQKQLFVEQHKHYLDEIIEQISEFSKRVILADANLDKVLSAYNKHRDKPIREQAENIIHLFTLTNLGAPAAFKYFDTTIDRKRYTSTKEVLDATLIHQSITGLYETRIDLSQLGGDGGGGGGSGGGGSGGGGSGGGGSGGGGSGGMDPLQLLQPLEAEIKGTKLKAHWNSGATITCVPEAFLEDERPIQTMLIKTIHGEKQQDVYYLTFKVQGRKVEAEVLASPYDYILLNPSDVPWLMKKPLQLTVLVPLHEYQERLLQQTALPKEQKELLQKLFLKYDALWQHWENQVGHRRIKPHNIATGTLAPRPQKQYPINPKAKPSIQIVIDDLLKQGVLIQQNSTMNTPVYPVPKPDGKWRMVLDYREVNKTIPLIAAQNQHSAGILSSIYRGKYKTTLDLTNGFWAHPITPESYWLTAFTWQGKQYCWTRLPQGFLNSPALFTADVVDLLKEIPNVQAYVDDIYISHDDPQEHLEQLEKIFSILLNAGYVVSLKKSEIAQREVEFLGFNITKEGRGLTDTFKQKLLNITPPKDLKQLQSILGLLNFARNFIPNYSELVKPLYTIVANANGKFISWTEDNSNQLQHIISVLNQADNLEERNPETRLIIKVNSSPSAGYIRYYNEGSKRPIMYVNYIFSKAEAKFTQTEKLLTTMHKGLIKAMDLAMGQEILVYSPIVSMTKIQRTPLPERKALPVRWITWMTYLEDPRIQFHYDKSLPELQQIPNVTEDVIAKTKHPSEFAMVFYTDGSAIKHPDVNKSHSAGMGIAQVQFIPEYKIVHQWSIPLGDHTAQLAEIAAVEFACKKALKISGPVLIVTDSFYVAESANKELPYWKSNGFLNNKKKPLRHVSKWKSIAECLQLKPDIIIMHEKGHQQPMTTLHTEGNNLADKLATQGSYVVHAGKRTADGSEFEKRTADGSEFESPKKKAKVE

SEQ ID NO: 6192 - protein, 2101 aa, synthetic construct
MPAAKRVKLDGGDKKYSIGLDIGTNSVGWAVITDEYKVPSKKFKVLGNTDRHSIKKNLIGALLFDSGETAEATRLKRTARRRYTRRKNRICYLQEIFSNEMAKVDDSFFHRLEESFLVEEDKKHERHPIFGNIVDEVAYHEKYPTIYHLRKKLVDSTDKADLRLIYLALAHMIKFRGHFLIEGDLNPDNSDVDKLFIQLVQTYNQLFEENPINASGVDAKAILSARLSKSRRLENLIAQLPGEKKNGLFGNLIALSLGLTPNFKSNFDLAEDAKLQLSKDTYDDDLDNLLAQIGDQYADLFLAAKNLSDAILLSDILRVNTEITKAPLSASMIKRYDEHHQDLTLLKALVRQQLPEKYKEIFFDQSKNGYAGYIDGGASQEEFYKFIKPILEKMDGTEELLVKLNREDLLRKQRTFDNGSIPHQIHLGELHAILRRQEDFYPFLKDNREKIEKILTFRIPYYVGPLARGNSRFAWMTRKSEETITPWNFEEVVDKGASAQSFIERMTNFDKNLPNEKVLPKHSLLYEYFTVYNELTKVKYVTEGMRKPAFLSGEQKKAIVDLLFKTNRKVTVKQLKEDYFKKIECFDSVEISGVEDRFNASLGTYHDLLKIIKDKDFLDNEENEDILEDIVLTLTLFEDREMIEERLKTYAHLFDDKVMKQLKRRRYTGWGRLSRKLINGIRDKQSGKTILDFLKSDGFANRNFMQLIHDDSLTFKEDIQKAQVSGQGDSLHEHIANLAGSPAIKKGILQTVKVVDELVKVMGRHKPENIVIEMARENQTTQKGQKNSRERMKRIEEGIKELGSQILKEHPVENTQLQNEKLYLYYLQNGRDMYVDQELDINRLSDYDVDHIVPQSFLKDDSIDNKVLTRSDKARGKSDNVPSEEVVKKMKNYWRQLLNAKLITQRKFDNLTKAERGGLSELDKAGFIKRQLVETRQITKHVAQILDSRMNTKYDENDKLIREVKVITLKSKLVSDFRKDFQFYKVREINNYHHAHDAYLNAVVGTALIKKYPKLESEFVYGDYKVYDVRKMIAKSEQEIGKATAKYFFYSNIMNFFKTEITLANGEIRKRPLIETNGETGEIVWDKGRDFATVRKVLSMPQVNIVKKTEVQTGGFSKESILPKRNSDKLIARKKDWDPKKYGGFDSPTVAYSVLVVAKVEKGKSKKLKSVKELLGITIMERSSFEKNPIDFLEAKGYKEVKKDLIIKLPKYSLFELENGRKRMLASAGELQKGNELALPSKYVNFLYLASHYEKLKGSPEDNEQKQLFVEQHKHYLDEIIEQISEFSKRVILADANLDKVLSAYNKHRDKPIREQAENIIHLFTLTNLGAPAAFKYFDTTIDRKRYTSTKEVLDATLIHQSITGLYETRIDLSQLGGDGGGGGGSGGGGSGGGGSGGGGSGGGGSGGVPWLMKKPLQLTVLVPLHEYQERLLQQTALPKEQKELLQKLFLKYDALWQHWENQVGHRRIKPHNIATGTLAPRPQKQYPINPKAKPSIQIVIDDLLKQGVLIQQNSTMNTPVYPVPKPDGKWRMVLDYREVNKTIPLIAAQNQHSAGILSSIYRGKYKTTLDLTNGFWAHPITPESYWLTAFTWQGKQYCWTRLPQGFLNSPALFNADVVDLLKEIPNVQAYVDDIYISHDDPQEHLEQLEKIFSILLNAGYVVSLKKSEIAQREVEFLGFNITKEGRGLTDTFKQKLLNITPPKDLKQLQSILGKLNFARNFIPNYSELVKPLYTIVAPANGKFISWTEDNSNQLQHIISVLNQADNLEERNPETRLIIKVNSSPSAGYIRYYNEGSKRPIMYVNYIFSKAEAKFTQTEKLLTTMHKGLIKAMDLAMGQEILVYSPIVSMTKIQRTPLPERKALPVRWITWMTYLEDPRIQFHYDKSLPELQQIPNVTEDVIAKTKHPSEFAMVFYTDGSAIKHPDVNKSHSAGMGIAQVQFIPEYKIVHQWSIPLGDHTAQLAEIAAVEFACKKALKISGPVLIVTDSFYVAESANKELPYWKSNGFLNNKKKPLRHVSKWKSIAECLQLKPDIIIMHEKGHQQPMTTLHTEGNNLADKLATQGSYVVHAGKRTADGSEFEKRTADGSEFESPKKKAKVE

SEQ ID NO: 6193 - protein, 2190 aa, synthetic construct
MPAAKRVKLDGGDKKYSIGLDIGTNSVGWAVITDEYKVPSKKFKVLGNTDRHSIKKNLIGALLFDSGETAEATRLKRTARRRYTRRKNRICYLQEIFSNEMAKVDDSFFHRLEESFLVEEDKKHERHPIFGNIVDEVAYHEKYPTIYHLRKKLVDSTDKADLRLIYLALAHMIKFRGHFLIEGDLNPDNSDVDKLFIQLVQTYNQLFEENPINASGVDAKAILSARLSKSRRLENLIAQLPGEKKNGLFGNLIALSLGLTPNFKSNFDLAEDAKLQLSKDTYDDDLDNLLAQIGDQYADLFLAAKNLSDAILLSDILRVNTEITKAPLSASMIKRYDEHHQDLTLLKALVRQQLPEKYKEIFFDQSKNGYAGYIDGGASQEEFYKFIKPILEKMDGTEELLVKLNREDLLRKQRTFDNGSIPHQIHLGELHAILRRQEDFYPFLKDNREKIEKILTFRIPYYVGPLARGNSRFAWMTRKSEETITPWNFEEVVDKGASAQSFIERMTNFDKNLPNEKVLPKHSLLYEYFTVYNELTKVKYVTEGMRKPAFLSGEQKKAIVDLLFKTNRKVTVKQLKEDYFKKIECFDSVEISGVEDRFNASLGTYHDLLKIIKDKDFLDNEENEDILEDIVLTLTLFEDREMIEERLKTYAHLFDDKVMKQLKRRRYTGWGRLSRKLINGIRDKQSGKTILDFLKSDGFANRNFMQLIHDDSLTFKEDIQKAQVSGQGDSLHEHIANLAGSPAIKKGILQTVKVVDELVKVMGRHKPENIVIEMARENQTTQKGQKNSRERMKRIEEGIKELGSQILKEHPVENTQLQNEKLYLYYLQNGRDMYVDQELDINRLSDYDVDHIVPQSFLKDDSIDNKVLTRSDKARGKSDNVPSEEVVKKMKNYWRQLLNAKLITQRKFDNLTKAERGGLSELDKAGFIKRQLVETRQITKHVAQILDSRMNTKYDENDKLIREVKVITLKSKLVSDFRKDFQFYKVREINNYHHAHDAYLNAVVGTALIKKYPKLESEFVYGDYKVYDVRKMIAKSEQEIGKATAKYFFYSNIMNFFKTEITLANGEIRKRPLIETNGETGEIVWDKGRDFATVRKVLSMPQVNIVKKTEVQTGGFSKESILPKRNSDKLIARKKDWDPKKYGGFDSPTVAYSVLVVAKVEKGKSKKLKSVKELLGITIMERSSFEKNPIDFLEAKGYKEVKKDLIIKLPKYSLFELENGRKRMLASAGELQKGNELALPSKYVNFLYLASHYEKLKGSPEDNEQKQLFVEQHKHYLDEIIEQISEFSKRVILADANLDKVLSAYNKHRDKPIREQAENIIHLFTLTNLGAPAAFKYFDTTIDRKRYTSTKEVLDATLIHQSITGLYETRIDLSQLGGDGGGGGGSGGGGSGGGGSGGGGSGGGGSGGMDPLQLLQPLEAEIKGTKLKAHWNSGATITCVPEAFLEDERPIQTMLIKTIHGEKQQDVYYLTFKVQGRKVEAEVLASPYDYILLNPSDVPWLMKKPLQLTVLVPLHEYQERLLQQTALPKEQKELLQKLFLKYDALWQHWENQVGHRRIKPHNIATGTLAPRPQKQYPINPKAKPSIQIVIDDLLKQGVLIQQNSTMNTPVYPVPKPDGKWRMVLDYREVNKTIPLIAAQNQHSAGILSSIYRGKYKTTLDLTNGFWAHPITPESYWLTAFTWQGKQYCWTRLPQGFLNSPALFNADVVDLLKEIPNVQAYVDDIYISHDDPQEHLEQLEKIFSILLNAGYVVSLKKSEIAQREVEFLGFNITKEGRGLTDTFKQKLLNITPPKDLKQLQSILGLLNFARNFIPNYSELVKPLYTIVAPANGKFISWTEDNSNQLQHIISVLNQADNLEERNPETRLIIKVNSSPSAGYIRYYNEGSKRPIMYVNYIFSKAEAKFTQTEKLLTTMHKGLIKAMDLAMGQEILVYSPIVSMTKIQRTPLPERKALPVRWITWMTYLEDPRIQFHYDKSLPELQQIPNVTEDVIAKTKHPSEFAMVFYTDGSAIKHPDVNKSHSAGMGIAQVQFIPEYKIVHQWSIPLGDHTAQLAEIAAVEFACKKALKISGPVLIVTDSFYVAESANKELPYWKSNGFLNNKKKPLRHVSKWKSIAECLQLKPDIIIMHEKGHQQPMTTLHTEGNNLADKLATQGSYVVHAGKRTADGSEFEKRTADGSEFESPKKKAKVE

SEQ ID NO: 6194 - protein, 2190 aa, synthetic construct
MPAAKRVKLDGGDKKYSIGLDIGTNSVGWAVITDEYKVPSKKFKVLGNTDRHSIKKNLIGALLFDSGETAEATRLKRTARRRYTRRKNRICYLQEIFSNEMAKVDDSFFHRLEESFLVEEDKKHERHPIFGNIVDEVAYHEKYPTIYHLRKKLVDSTDKADLRLIYLALAHMIKFRGHFLIEGDLNPDNSDVDKLFIQLVQTYNQLFEENPINASGVDAKAILSARLSKSRRLENLIAQLPGEKKNGLFGNLIALSLGLTPNFKSNFDLAEDAKLQLSKDTYDDDLDNLLAQIGDQYADLFLAAKNLSDAILLSDILRVNTEITKAPLSASMIKRYDEHHQDLTLLKALVRQQLPEKYKEIFFDQSKNGYAGYIDGGASQEEFYKFIKPILEKMDGTEELLVKLNREDLLRKQRTFDNGSIPHQIHLGELHAILRRQEDFYPFLKDNREKIEKILTFRIPYYVGPLARGNSRFAWMTRKSEETITPWNFEEVVDKGASAQSFIERMTNFDKNLPNEKVLPKHSLLYEYFTVYNELTKVKYVTEGMRKPAFLSGEQKKAIVDLLFKTNRKVTVKQLKEDYFKKIECFDSVEISGVEDRFNASLGTYHDLLKIIKDKDFLDNEENEDILEDIVLTLTLFEDREMIEERLKTYAHLFDDKVMKQLKRRRYTGWGRLSRKLINGIRDKQSGKTILDFLKSDGFANRNFMQLIHDDSLTFKEDIQKAQVSGQGDSLHEHIANLAGSPAIKKGILQTVKVVDELVKVMGRHKPENIVIEMARENQTTQKGQKNSRERMKRIEEGIKELGSQILKEHPVENTQLQNEKLYLYYLQNGRDMYVDQELDINRLSDYDVDHIVPQSFLKDDSIDNKVLTRSDKARGKSDNVPSEEVVKKMKNYWRQLLNAKLITQRKFDNLTKAERGGLSELDKAGFIKRQLVETRQITKHVAQILDSRMNTKYDENDKLIREVKVITLKSKLVSDFRKDFQFYKVREINNYHHAHDAYLNAVVGTALIKKYPKLESEFVYGDYKVYDVRKMIAKSEQEIGKATAKYFFYSNIMNFFKTEITLANGEIRKRPLIETNGETGEIVWDKGRDFATVRKVLSMPQVNIVKKTEVQTGGFSKESILPKRNSDKLIARKKDWDPKKYGGFDSPTVAYSVLVVAKVEKGKSKKLKSVKELLGITIMERSSFEKNPIDFLEAKGYKEVKKDLIIKLPKYSLFELENGRKRMLASAGELQKGNELALPSKYVNFLYLASHYEKLKGSPEDNEQKQLFVEQHKHYLDEIIEQISEFSKRVILADANLDKVLSAYNKHRDKPIREQAENIIHLFTLTNLGAPAAFKYFDTTIDRKRYTSTKEVLDATLIHQSITGLYETRIDLSQLGGDGGGGGGSGGGGSGGGGSGGGGSGGGGSGGMDPLQLLQPLEAEIKGTKLKAHWNSGATITCVPEAFLEDERPIQTMLIKTIHGEKQQDVYYLTFKVQGRKVEAEVLASPYDYILLNPSDVPWLMKKPLQLTVLVPLHEYQERLLQQTALPKEQKELLQKLFLKYDALWQHWENQVGHRRIKPHNIATGTLAPRPQKQYPINPKAKPSIQIVIDDLLKQGVLIQQNSTMNTPVYPVPKPDGKWRMVLDYREVNKTIPLIAAQNQHSAGILSSIYRGKYKTTLDLTNGFWAHPITPESYWLTAFTWQGKQYCWTRLPQGFLNSPALFNADVVDLLKEIPNVQAYVDDIYISHDDPQEHLEQLEKIFSILLNAGYVVSLKKSEIAQREVEFLGFNITKEGRGLTDTFKQKLLNITPPKDLKQLQSILGKLNFARNFIPNYSELVKPLYTIVAPANGKFISWTEDNSNQLQHIISVLNQADNLEERNPETRLIIKVNSSPSAGYIRYYNEGSKRPIMYVNYIFSKAEAKFTQTEKLLTTMHKGLIKAMDLAMGQEILVYSPIVSMTKIQRTPLPERKALPVRWITWMTYLEDPRIQFHYDKSLPELQQIPNVTEDVIAKTKHPSEFAMVFYTDGSAIKHPDVNKSHSAGMGIAQVQFIPEYKIVHQWSIPLGDHTAQLAEIAAVEFACKKALKISGPVLIVTDSFYVAESANKELPYWKSNGFLNNKKKPLRHVSKWKSIAECLQLKPDIIIMHEKGHQQPMTTLHTEGNNLADKLATQGSYVVHAGKRTADGSEFEKRTADGSEFESPKKKAKVE

SEQ ID NO: 6195 - protein, 2101 aa, synthetic construct
MPAAKRVKLDGGDKKYSIGLDIGTNSVGWAVITDEYKVPSKKFKVLGNTDRHSIKKNLIGALLFDSGETAEATRLKRTARRRYTRRKNRICYLQEIFSNEMAKVDDSFFHRLEESFLVEEDKKHERHPIFGNIVDEVAYHEKYPTIYHLRKKLVDSTDKADLRLIYLALAHMIKFRGHFLIEGDLNPDNSDVDKLFIQLVQTYNQLFEENPINASGVDAKAILSARLSKSRRLENLIAQLPGEKKNGLFGNLIALSLGLTPNFKSNFDLAEDAKLQLSKDTYDDDLDNLLAQIGDQYADLFLAAKNLSDAILLSDILRVNTEITKAPLSASMIKRYDEHHQDLTLLKALVRQQLPEKYKEIFFDQSKNGYAGYIDGGASQEEFYKFIKPILEKMDGTEELLVKLNREDLLRKQRTFDNGSIPHQIHLGELHAILRRQEDFYPFLKDNREKIEKILTFRIPYYVGPLARGNSRFAWMTRKSEETITPWNFEEVVDKGASAQSFIERMTNFDKNLPNEKVLPKHSLLYEYFTVYNELTKVKYVTEGMRKPAFLSGEQKKAIVDLLFKTNRKVTVKQLKEDYFKKIECFDSVEISGVEDRFNASLGTYHDLLKIIKDKDFLDNEENEDILEDIVLTLTLFEDREMIEERLKTYAHLFDDKVMKQLKRRRYTGWGRLSRKLINGIRDKQSGKTILDFLKSDGFANRNFMQLIHDDSLTFKEDIQKAQVSGQGDSLHEHIANLAGSPAIKKGILQTVKVVDELVKVMGRHKPENIVIEMARENQTTQKGQKNSRERMKRIEEGIKELGSQILKEHPVENTQLQNEKLYLYYLQNGRDMYVDQELDINRLSDYDVDHIVPQSFLKDDSIDNKVLTRSDKARGKSDNVPSEEVVKKMKNYWRQLLNAKLITQRKFDNLTKAERGGLSELDKAGFIKRQLVETRQITKHVAQILDSRMNTKYDENDKLIREVKVITLKSKLVSDFRKDFQFYKVREINNYHHAHDAYLNAVVGTALIKKYPKLESEFVYGDYKVYDVRKMIAKSEQEIGKATAKYFFYSNIMNFFKTEITLANGEIRKRPLIETNGETGEIVWDKGRDFATVRKVLSMPQVNIVKKTEVQTGGFSKESILPKRNSDKLIARKKDWDPKKYGGFDSPTVAYSVLVVAKVEKGKSKKLKSVKELLGITIMERSSFEKNPIDFLEAKGYKEVKKDLIIKLPKYSLFELENGRKRMLASAGELQKGNELALPSKYVNFLYLASHYEKLKGSPEDNEQKQLFVEQHKHYLDEIIEQISEFSKRVILADANLDKVLSAYNKHRDKPIREQAENIIHLFTLTNLGAPAAFKYFDTTIDRKRYTSTKEVLDATLIHQSITGLYETRIDLSQLGGDGGGGGGSGGGGSGGGGSGGGGSGGGGSGGIPWLMKKPLQLTTLVPLQEYEERLLKQTMLTGSYKEKLQSLFLKYDALWQHWENQVGHRRIKPHHIATGTVNPRPQKQYPINPKAKASIQTVINDLLKQGVLIQQNSIMNTPVYPVPKPDGKWRMVLDYREVNKTIPLIAAQNQHSAGILSSIFRGKYKTTLDLSNGFWAHSITPESYWLTAFTWLGQQYCWTRLPQGFLNSPALFNADVVDLLKEVPNVQVYVDDIYISHDDPREHLEQLEKVFSLLLNAGYVVSLKKSEIAQHEVEFLGFNITKEGRGLTETFKQKLLNITPPRDLKQLQSILGKLNFARNFIPNFSELVKPLYNIIATAPGKYITWTTDNSQQLQNIISMLNSAENLEERNPEVRLIMKVNTSPSAGYIRFYNEFAKRPIMYLNYVYTKAEVKFTNTEKLLTTIHKGLIKALDLGMGQEILVYSPIVSMTKIQKTPLPERKALPIRWITWMSYLEDPRIQFHYDKTLPELQQVPTVTDDIIAKIKHPSEFSMVFYTDGSAIKHPNVNKSHNAGMGIAQVQFKPEFTVINTWSIPLGDHTAQLAEVAAVEFACKKALKIDGPVLIVTDSFYVAESVNKELPYWQSNGFFNNKKKPLKHVSKWKSIADCIQLKPDIIIIHEKGHQPTASTFHTEGNNLADKLATQGSYVVNAGKRTADGSEFEKRTADGSEFESPKKKAKVE

SEQ ID NO: 6196 - protein, 2190 aa, synthetic construct
MPAAKRVKLDGGDKKYSIGLDIGTNSVGWAVITDEYKVPSKKFKVLGNTDRHSIKKNLIGALLFDSGETAEATRLKRTARRRYTRRKNRICYLQEIFSNEMAKVDDSFFHRLEESFLVEEDKKHERHPIFGNIVDEVAYHEKYPTIYHLRKKLVDSTDKADLRLIYLALAHMIKFRGHFLIEGDLNPDNSDVDKLFIQLVQTYNQLFEENPINASGVDAKAILSARLSKSRRLENLIAQLPGEKKNGLFGNLIALSLGLTPNFKSNFDLAEDAKLQLSKDTYDDDLDNLLAQIGDQYADLFLAAKNLSDAILLSDILRVNTEITKAPLSASMIKRYDEHHQDLTLLKALVRQQLPEKYKEIFFDQSKNGYAGYIDGGASQEEFYKFIKPILEKMDGTEELLVKLNREDLLRKQRTFDNGSIPHQIHLGELHAILRRQEDFYPFLKDNREKIEKILTFRIPYYVGPLARGNSRFAWMTRKSEETITPWNFEEVVDKGASAQSFIERMTNFDKNLPNEKVLPKHSLLYEYFTVYNELTKVKYVTEGMRKPAFLSGEQKKAIVDLLFKTNRKVTVKQLKEDYFKKIECFDSVEISGVEDRFNASLGTYHDLLKIIKDKDFLDNEENEDILEDIVLTLTLFEDREMIEERLKTYAHLFDDKVMKQLKRRRYTGWGRLSRKLINGIRDKQSGKTILDFLKSDGFANRNFMQLIHDDSLTFKEDIQKAQVSGQGDSLHEHIANLAGSPAIKKGILQTVKVVDELVKVMGRHKPENIVIEMARENQTTQKGQKNSRERMKRIEEGIKELGSQILKEHPVENTQLQNEKLYLYYLQNGRDMYVDQELDINRLSDYDVDHIVPQSFLKDDSIDNKVLTRSDKARGKSDNVPSEEVVKKMKNYWRQLLNAKLITQRKFDNLTKAERGGLSELDKAGFIKRQLVETRQITKHVAQILDSRMNTKYDENDKLIREVKVITLKSKLVSDFRKDFQFYKVREINNYHHAHDAYLNAVVGTALIKKYPKLESEFVYGDYKVYDVRKMIAKSEQEIGKATAKYFFYSNIMNFFKTEITLANGEIRKRPLIETNGETGEIVWDKGRDFATVRKVLSMPQVNIVKKTEVQTGGFSKESILPKRNSDKLIARKKDWDPKKYGGFDSPTVAYSVLVVAKVEKGKSKKLKSVKELLGITIMERSSFEKNPIDFLEAKGYKEVKKDLIIKLPKYSLFELENGRKRMLASAGELQKGNELALPSKYVNFLYLASHYEKLKGSPEDNEQKQLFVEQHKHYLDEIIEQISEFSKRVILADANLDKVLSAYNKHRDKPIREQAENIIHLFTLTNLGAPAAFKYFDTTIDRKRYTSTKEVLDATLIHQSITGLYETRIDLSQLGGDGGGGGGSGGGGSGGGGSGGGGSGGGGSGGMDPLQLLQPLEAEIKGTKLKAHWNSGATITCVPQAFLEEEVPIKNIWIKTIHGEKEQPVYYLTFKIQGRKVEAEVISSPYDYILVSPSDIPWLMKKPLQLTTLVPLQEYEERLLKQTMLTGSYKEKLQSLFLKYDALWQHWENQVGHRRIKPHHIATGTVNPRPQKQYPINPKAKASIQTVINDLLKQGVLIQQNSIMNTPVYPVPKPDGKWRMVLDYREVNKTIPLIAAQNQHSAGILSSIFRGKYKTTLDLSNGFWAHSITPESYWLTAFTWLGQQYCWTRLPQGFLNSPALFNADVVDLLKEVPNVQVYVDDIYISHDDPREHLEQLEKVFSLLLNAGYVVSLKKSEIAQHEVEFLGFNITKEGRGLTETFKQKLLNITPPRDLKQLQSILGLLNFARNFIPNFSELVKPLYNIIATAPGKYITWTTDNSQQLQNIISMLNSAENLEERNPEVRLIMKVNTSPSAGYIRFYNEFAKRPIMYLNYVYTKAEVKFTNTEKLLTTIHKGLIKALDLGMGQEILVYSPIVSMTKIQKTPLPERKALPIRWITWMSYLEDPRIQFHYDKTLPELQQVPTVTDDIIAKIKHPSEFSMVFYTDGSAIKHPNVNKSHNAGMGIAQVQFKPEFTVINTWSIPLGDHTAQLAEVAAVEFACKKALKIDGPVLIVTDSFYVAESVNKELPYWQSNGFFNNKKKPLKHVSKWKSIADCIQLKPDIIIIHEKGHQPTASTFHTEGNNLADKLATQGSYVVNAGKRTADGSEFEKRTADGSEFESPKKKAKVE

SEQ ID NO: 6197 - protein, 2190 aa, synthetic construct
MPAAKRVKLDGGDKKYSIGLDIGTNSVGWAVITDEYKVPSKKFKVLGNTDRHSIKKNLIGALLFDSGETAEATRLKRTARRRYTRRKNRICYLQEIFSNEMAKVDDSFFHRLEESFLVEEDKKHERHPIFGNIVDEVAYHEKYPTIYHLRKKLVDSTDKADLRLIYLALAHMIKFRGHFLIEGDLNPDNSDVDKLFIQLVQTYNQLFEENPINASGVDAKAILSARLSKSRRLENLIAQLPGEKKNGLFGNLIALSLGLTPNFKSNFDLAEDAKLQLSKDTYDDDLDNLLAQIGDQYADLFLAAKNLSDAILLSDILRVNTEITKAPLSASMIKRYDEHHQDLTLLKALVRQQLPEKYKEIFFDQSKNGYAGYIDGGASQEEFYKFIKPILEKMDGTEELLVKLNREDLLRKQRTFDNGSIPHQIHLGELHAILRRQEDFYPFLKDNREKIEKILTFRIPYYVGPLARGNSRFAWMTRKSEETITPWNFEEVVDKGASAQSFIERMTNFDKNLPNEKVLPKHSLLYEYFTVYNELTKVKYVTEGMRKPAFLSGEQKKAIVDLLFKTNRKVTVKQLKEDYFKKIECFDSVEISGVEDRFNASLGTYHDLLKIIKDKDFLDNEENEDILEDIVLTLTLFEDREMIEERLKTYAHLFDDKVMKQLKRRRYTGWGRLSRKLINGIRDKQSGKTILDFLKSDGFANRNFMQLIHDDSLTFKEDIQKAQVSGQGDSLHEHIANLAGSPAIKKGILQTVKVVDELVKVMGRHKPENIVIEMARENQTTQKGQKNSRERMKRIEEGIKELGSQILKEHPVENTQLQNEKLYLYYLQNGRDMYVDQELDINRLSDYDVDHIVPQSFLKDDSIDNKVLTRSDKARGKSDNVPSEEVVKKMKNYWRQLLNAKLITQRKFDNLTKAERGGLSELDKAGFIKRQLVETRQITKHVAQILDSRMNTKYDENDKLIREVKVITLKSKLVSDFRKDFQFYKVREINNYHHAHDAYLNAVVGTALIKKYPKLESEFVYGDYKVYDVRKMIAKSEQEIGKATAKYFFYSNIMNFFKTEITLANGEIRKRPLIETNGETGEIVWDKGRDFATVRKVLSMPQVNIVKKTEVQTGGFSKESILPKRNSDKLIARKKDWDPKKYGGFDSPTVAYSVLVVAKVEKGKSKKLKSVKELLGITIMERSSFEKNPIDFLEAKGYKEVKKDLIIKLPKYSLFELENGRKRMLASAGELQKGNELALPSKYVNFLYLASHYEKLKGSPEDNEQKQLFVEQHKHYLDEIIEQISEFSKRVILADANLDKVLSAYNKHRDKPIREQAENIIHLFTLTNLGAPAAFKYFDTTIDRKRYTSTKEVLDATLIHQSITGLYETRIDLSQLGGDGGGGGGSGGGGSGGGGSGGGGSGGGGSGGMDPLQLLQPLEAEIKGTKLKAHWNSGATITCVPQAFLEEEVPIKNIWIKTIHGEKEQPVYYLTFKIQGRKVEAEVISSPYDYILVSPSDIPWLMKKPLQLTTLVPLQEYEERLLKQTMLTGSYKEKLQSLFLKYDALWQHWENQVGHRRIKPHHIATGTVNPRPQKQYPINPKAKASIQTVINDLLKQGVLIQQNSIMNTPVYPVPKPDGKWRMVLDYREVNKTIPLIAAQNQHSAGILSSIFRGKYKTTLDLSNGFWAHSITPESYWLTAFTWLGQQYCWTRLPQGFLNSPALFNADVVDLLKEVPNVQVYVDDIYISHDDPREHLEQLEKVFSLLLNAGYVVSLKKSEIAQHEVEFLGFNITKEGRGLTETFKQKLLNITPPRDLKQLQSILGKLNFARNFIPNFSELVKPLYNIIATAPGKYITWTTDNSQQLQNIISMLNSAENLEERNPEVRLIMKVNTSPSAGYIRFYNEFAKRPIMYLNYVYTKAEVKFTNTEKLLTTIHKGLIKALDLGMGQEILVYSPIVSMTKIQKTPLPERKALPIRWITWMSYLEDPRIQFHYDKTLPELQQVPTVTDDIIAKIKHPSEFSMVFYTDGSAIKHPNVNKSHNAGMGIAQVQFKPEFTVINTWSIPLGDHTAQLAEVAAVEFACKKALKIDGPVLIVTDSFYVAESVNKELPYWQSNGFFNNKKKPLKHVSKWKSIADCIQLKPDIIIIHEKGHQPTASTFHTEGNNLADKLATQGSYVVNAGKRTADGSEFEKRTADGSEFESPKKKAKVE

SEQ ID NO: 6198 - protein, 2108 aa, synthetic construct
MPAAKRVKLDGGDKKYSIGLDIGTNSVGWAVITDEYKVPSKKFKVLGNTDRHSIKKNLIGALLFDSGETAEATRLKRTARRRYTRRKNRICYLQEIFSNEMAKVDDSFFHRLEESFLVEEDKKHERHPIFGNIVDEVAYHEKYPTIYHLRKKLVDSTDKADLRLIYLALAHMIKFRGHFLIEGDLNPDNSDVDKLFIQLVQTYNQLFEENPINASGVDAKAILSARLSKSRRLENLIAQLPGEKKNGLFGNLIALSLGLTPNFKSNFDLAEDAKLQLSKDTYDDDLDNLLAQIGDQYADLFLAAKNLSDAILLSDILRVNTEITKAPLSASMIKRYDEHHQDLTLLKALVRQQLPEKYKEIFFDQSKNGYAGYIDGGASQEEFYKFIKPILEKMDGTEELLVKLNREDLLRKQRTFDNGSIPHQIHLGELHAILRRQEDFYPFLKDNREKIEKILTFRIPYYVGPLARGNSRFAWMTRKSEETITPWNFEEVVDKGASAQSFIERMTNFDKNLPNEKVLPKHSLLYEYFTVYNELTKVKYVTEGMRKPAFLSGEQKKAIVDLLFKTNRKVTVKQLKEDYFKKIECFDSVEISGVEDRFNASLGTYHDLLKIIKDKDFLDNEENEDILEDIVLTLTLFEDREMIEERLKTYAHLFDDKVMKQLKRRRYTGWGRLSRKLINGIRDKQSGKTILDFLKSDGFANRNFMQLIHDDSLTFKEDIQKAQVSGQGDSLHEHIANLAGSPAIKKGILQTVKVVDELVKVMGRHKPENIVIEMARENQTTQKGQKNSRERMKRIEEGIKELGSQILKEHPVENTQLQNEKLYLYYLQNGRDMYVDQELDINRLSDYDVDHIVPQSFLKDDSIDNKVLTRSDKARGKSDNVPSEEVVKKMKNYWRQLLNAKLITQRKFDNLTKAERGGLSELDKAGFIKRQLVETRQITKHVAQILDSRMNTKYDENDKLIREVKVITLKSKLVSDFRKDFQFYKVREINNYHHAHDAYLNAVVGTALIKKYPKLESEFVYGDYKVYDVRKMIAKSEQEIGKATAKYFFYSNIMNFFKTEITLANGEIRKRPLIETNGETGEIVWDKGRDFATVRKVLSMPQVNIVKKTEVQTGGFSKESILPKRNSDKLIARKKDWDPKKYGGFDSPTVAYSVLVVAKVEKGKSKKLKSVKELLGITIMERSSFEKNPIDFLEAKGYKEVKKDLIIKLPKYSLFELENGRKRMLASAGELQKGNELALPSKYVNFLYLASHYEKLKGSPEDNEQKQLFVEQHKHYLDEIIEQISEFSKRVILADANLDKVLSAYNKHRDKPIREQAENIIHLFTLTNLGAPAAFKYFDTTIDRKRYTSTKEVLDATLIHQSITGLYETRIDLSQLGGDGGGGGGSGGGGSGGGGSGGGGSGGGGSGGVLNLEEEYRLHEKPVPSSIDPSWLQLFPTVWAERAGMGLANQVPPVVVELRSGASPVAVRQYPMSKEAREGIRPHIQRFLDLGVLVPCQSPWNTPLLPVKKPGTNDYRPVQDLREINKRVQDIHPTVPNPYNLLSSLPPSHTWYSVLDLKDAFFCLKLHPNSQPLFAFEWRDPEKGNTGQLTWTRLPQGFKNSPTLFNEALHRDLAPFRALNPQVVLLQYVDDLLVAAPTYRDCKEGTQKLLQELSKLGYRVSAKKAQLCQKEVTYLGYLLKEGKRWLTPARKATVMKIPPPTTPRQVREFLGTAGFCRLWIPGFASLAAPLYPLTKPSIPFIWTEEHQKAFDRIKEALLSAPALALPDLTKPFTLYVDERAGVARGVLTQTLGPWRRPVAYLSKKLDPVASGWPTCLKAVAAVALLLKDADKLTLGQNVTVIASHSLESIVRQPPDRWMTNARMTHYQSLLLNERVSFAPPAVLNPATLLPVESEATPVHRCSEILAEETGTRRDLKDQPLPGVPAWYTDGSSFIAEGKRRAGAAIVDGKRTVWASSLPEGTSAQKAELVALTQALRLAEGKDINIYTDSRYAFATAHIHGAIYKQRGWLTSAGKDIKNKEEILALLEAIHLPKRVAIIHCPGHQKGNDPVATGNRRADEAAKQAALSTRVLAETTKPAGKRTADGSEFEKRTADGSEFESPKKKAKVE

SEQ ID NO: 6199 - protein, 2110 aa, synthetic construct
MPAAKRVKLDGGDKKYSIGLDIGTNSVGWAVITDEYKVPSKKFKVLGNTDRHSIKKNLIGALLFDSGETAEATRLKRTARRRYTRRKNRICYLQEIFSNEMAKVDDSFFHRLEESFLVEEDKKHERHPIFGNIVDEVAYHEKYPTIYHLRKKLVDSTDKADLRLIYLALAHMIKFRGHFLIEGDLNPDNSDVDKLFIQLVQTYNQLFEENPINASGVDAKAILSARLSKSRRLENLIAQLPGEKKNGLFGNLIALSLGLTPNFKSNFDLAEDAKLQLSKDTYDDDLDNLLAQIGDQYADLFLAAKNLSDAILLSDILRVNTEITKAPLSASMIKRYDEHHQDLTLLKALVRQQLPEKYKEIFFDQSKNGYAGYIDGGASQEEFYKFIKPILEKMDGTEELLVKLNREDLLRKQRTFDNGSIPHQIHLGELHAILRRQEDFYPFLKDNREKIEKILTFRIPYYVGPLARGNSRFAWMTRKSEETITPWNFEEVVDKGASAQSFIERMTNFDKNLPNEKVLPKHSLLYEYFTVYNELTKVKYVTEGMRKPAFLSGEQKKAIVDLLFKTNRKVTVKQLKEDYFKKIECFDSVEISGVEDRFNASLGTYHDLLKIIKDKDFLDNEENEDILEDIVLTLTLFEDREMIEERLKTYAHLFDDKVMKQLKRRRYTGWGRLSRKLINGIRDKQSGKTILDFLKSDGFANRNFMQLIHDDSLTFKEDIQKAQVSGQGDSLHEHIANLAGSPAIKKGILQTVKVVDELVKVMGRHKPENIVIEMARENQTTQKGQKNSRERMKRIEEGIKELGSQILKEHPVENTQLQNEKLYLYYLQNGRDMYVDQELDINRLSDYDVDHIVPQSFLKDDSIDNKVLTRSDKARGKSDNVPSEEVVKKMKNYWRQLLNAKLITQRKFDNLTKAERGGLSELDKAGFIKRQLVETRQITKHVAQILDSRMNTKYDENDKLIREVKVITLKSKLVSDFRKDFQFYKVREINNYHHAHDAYLNAVVGTALIKKYPKLESEFVYGDYKVYDVRKMIAKSEQEIGKATAKYFFYSNIMNFFKTEITLANGEIRKRPLIETNGETGEIVWDKGRDFATVRKVLSMPQVNIVKKTEVQTGGFSKESILPKRNSDKLIARKKDWDPKKYGGFDSPTVAYSVLVVAKVEKGKSKKLKSVKELLGITIMERSSFEKNPIDFLEAKGYKEVKKDLIIKLPKYSLFELENGRKRMLASAGELQKGNELALPSKYVNFLYLASHYEKLKGSPEDNEQKQLFVEQHKHYLDEIIEQISEFSKRVILADANLDKVLSAYNKHRDKPIREQAENIIHLFTLTNLGAPAAFKYFDTTIDRKRYTSTKEVLDATLIHQSITGLYETRIDLSQLGGDGGGGGGSGGGGSGGGGSGGGGSGGGGSGGTLNIEDEYRLHETSKEPDVPLGSTWLSDFPQAWAETGGMGLAVRQAPLIIPLKATSTPVSIKQYPMSQEARLGIKPHIQRLLDQGILVPCQSPWNTPLLPVKKPGTNDYRPVQDLREVNKRVEDIHPTVPNPYNLLSGLPPSHQWYTVLDLKDAFFCLRLHPTSQPLFAFEWRDPEMGISGQLTWTRLPQGFKNSPTLFNEALHRDLADFRIQHPDLILLQYVDDLLLAATSEQDCQRGTRALLQTLGNLGYRASAKKAQICQKQVKYLGYLLKEGQRWLTEARKETVMGQPTPKTPRQLREFLGTAGFCRLWIPGFAEMAAPLYPLTKPGTLFNWGPDQQKAYQEIKQALLTAPALGLPDLTKPFELFVDEKQGYAKGVLTQKLGPWRRPVAYLSKKLDPVAAGWPPCLRMVAAIAVLTKDAGKLTMGQPLVILAPHAVEALVKQPPDRWLSNARMTHYQAMLLDTDRVQFGPVVALNPATLLPLPEKEAPHDCLEILAETHGTRPDLTDQPIPDADYTWYTDGSSFLQEGQRRAGAAVTTETEVIWARALPAGTSAQRAELIALTQALKMAEGKKLNVYTDSRYAFATAHVHGEIYRRRGWLTSEGREIKNKNEILALLKALFLPKRLSIIHCPGHQKGNSAEARGNRMADQAAREAAMKAVLETSTLLAGKRTADGSEFEKRTADGSEFESPKKKAKVE

SEQ ID NO: 6200 - protein, 2117 aa, synthetic construct
MPAAKRVKLDGGDKKYSIGLDIGTNSVGWAVITDEYKVPSKKFKVLGNTDRHSIKKNLIGALLFDSGETAEATRLKRTARRRYTRRKNRICYLQEIFSNEMAKVDDSFFHRLEESFLVEEDKKHERHPIFGNIVDEVAYHEKYPTIYHLRKKLVDSTDKADLRLIYLALAHMIKFRGHFLIEGDLNPDNSDVDKLFIQLVQTYNQLFEENPINASGVDAKAILSARLSKSRRLENLIAQLPGEKKNGLFGNLIALSLGLTPNFKSNFDLAEDAKLQLSKDTYDDDLDNLLAQIGDQYADLFLAAKNLSDAILLSDILRVNTEITKAPLSASMIKRYDEHHQDLTLLKALVRQQLPEKYKEIFFDQSKNGYAGYIDGGASQEEFYKFIKPILEKMDGTEELLVKLNREDLLRKQRTFDNGSIPHQIHLGELHAILRRQEDFYPFLKDNREKIEKILTFRIPYYVGPLARGNSRFAWMTRKSEETITPWNFEEVVDKGASAQSFIERMTNFDKNLPNEKVLPKHSLLYEYFTVYNELTKVKYVTEGMRKPAFLSGEQKKAIVDLLFKTNRKVTVKQLKEDYFKKIECFDSVEISGVEDRFNASLGTYHDLLKIIKDKDFLDNEENEDILEDIVLTLTLFEDREMIEERLKTYAHLFDDKVMKQLKRRRYTGWGRLSRKLINGIRDKQSGKTILDFLKSDGFANRNFMQLIHDDSLTFKEDIQKAQVSGQGDSLHEHIANLAGSPAIKKGILQTVKVVDELVKVMGRHKPENIVIEMARENQTTQKGQKNSRERMKRIEEGIKELGSQILKEHPVENTQLQNEKLYLYYLQNGRDMYVDQELDINRLSDYDVDHIVPQSFLKDDSIDNKVLTRSDKARGKSDNVPSEEVVKKMKNYWRQLLNAKLITQRKFDNLTKAERGGLSELDKAGFIKRQLVETRQITKHVAQILDSRMNTKYDENDKLIREVKVITLKSKLVSDFRKDFQFYKVREINNYHHAHDAYLNAVVGTALIKKYPKLESEFVYGDYKVYDVRKMIAKSEQEIGKATAKYFFYSNIMNFFKTEITLANGEIRKRPLIETNGETGEIVWDKGRDFATVRKVLSMPQVNIVKKTEVQTGGFSKESILPKRNSDKLIARKKDWDPKKYGGFDSPTVAYSVLVVAKVEKGKSKKLKSVKELLGITIMERSSFEKNPIDFLEAKGYKEVKKDLIIKLPKYSLFELENGRKRMLASAGELQKGNELALPSKYVNFLYLASHYEKLKGSPEDNEQKQLFVEQHKHYLDEIIEQISEFSKRVILADANLDKVLSAYNKHRDKPIREQAENIIHLFTLTNLGAPAAFKYFDTTIDRKRYTSTKEVLDATLIHQSITGLYETRIDLSQLGGDGGGGGGSGGGGSGGGGSGGGGSGGGGSGGGGSGGTAPLEEEYRLFLEAPIQNVTLLEQWKREIPKVWAEINPPGLASTQAPIHVQLLSTALPVRVRQYPITLEAKRSLRETIRKFRAAGILRPVHSPWNTPLLPVRKSGTSEYRMVQDLREVNKRVETIHPTVPNPYTLLSLLPPDRIWYSVLDLKDAFFCIPLAPESQLIFAFEWADAEEGESGQLTWTRLPQGFKNSPTLFDEALNRDLQGFRLDHPSVSLLQYVDDLLIAADTQAACLSATRDLLMTLAELGYRVSGKKAQLCQEEVTYLGFKIHKGSRSLSNSRTQAILQIPVPKTKRQVREFLGTIGYCRLWIPGFAELAQPLYAATRGGNDPLVWGEKEEEAFQSLKLALTQPPALALPSLDKPFQLFVEETSGAAKGVLTQALGPWKRPVAYLSKRLDPVAAGWPRCLRAIAAAALLTREASKLTFGQDIEITSSHNLESLLRSPPDKWLTNARITQYQVLLLDPPRVRFKQTAALNPATLLPETDDTLPIHHCLDTLDSLTSTRPDLTDQPLAQAEATLFTDGSSYIRDGKRYAGAAVVTLDSVIWAEPLPIGTSAQKAELIALTKALEWSKDKSVNIYTDSRYAFATLHVHGMIYRERGLLTAGGKAIKNAPEILALLTAVWLPKRVAVMHCKGHQKDDAPTSTGNRRADEVAREVAIRPLSTQATISAGKRTADGSEFEKRTADGSEFESPKKKAKVE

SEQ ID NO: 6201 - protein, 2117 aa, synthetic construct
MPAAKRVKLDGGDKKYSIGLDIGTNSVGWAVITDEYKVPSKKFKVLGNTDRHSIKKNLIGALLFDSGETAEATRLKRTARRRYTRRKNRICYLQEIFSNEMAKVDDSFFHRLEESFLVEEDKKHERHPIFGNIVDEVAYHEKYPTIYHLRKKLVDSTDKADLRLIYLALAHMIKFRGHFLIEGDLNPDNSDVDKLFIQLVQTYNQLFEENPINASGVDAKAILSARLSKSRRLENLIAQLPGEKKNGLFGNLIALSLGLTPNFKSNFDLAEDAKLQLSKDTYDDDLDNLLAQIGDQYADLFLAAKNLSDAILLSDILRVNTEITKAPLSASMIKRYDEHHQDLTLLKALVRQQLPEKYKEIFFDQSKNGYAGYIDGGASQEEFYKFIKPILEKMDGTEELLVKLNREDLLRKQRTFDNGSIPHQIHLGELHAILRRQEDFYPFLKDNREKIEKILTFRIPYYVGPLARGNSRFAWMTRKSEETITPWNFEEVVDKGASAQSFIERMTNFDKNLPNEKVLPKHSLLYEYFTVYNELTKVKYVTEGMRKPAFLSGEQKKAIVDLLFKTNRKVTVKQLKEDYFKKIECFDSVEISGVEDRFNASLGTYHDLLKIIKDKDFLDNEENEDILEDIVLTLTLFEDREMIEERLKTYAHLFDDKVMKQLKRRRYTGWGRLSRKLINGIRDKQSGKTILDFLKSDGFANRNFMQLIHDDSLTFKEDIQKAQVSGQGDSLHEHIANLAGSPAIKKGILQTVKVVDELVKVMGRHKPENIVIEMARENQTTQKGQKNSRERMKRIEEGIKELGSQILKEHPVENTQLQNEKLYLYYLQNGRDMYVDQELDINRLSDYDVDHIVPQSFLKDDSIDNKVLTRSDKARGKSDNVPSEEVVKKMKNYWRQLLNAKLITQRKFDNLTKAERGGLSELDKAGFIKRQLVETRQITKHVAQILDSRMNTKYDENDKLIREVKVITLKSKLVSDFRKDFQFYKVREINNYHHAHDAYLNAVVGTALIKKYPKLESEFVYGDYKVYDVRKMIAKSEQEIGKATAKYFFYSNIMNFFKTEITLANGEIRKRPLIETNGETGEIVWDKGRDFATVRKVLSMPQVNIVKKTEVQTGGFSKESILPKRNSDKLIARKKDWDPKKYGGFDSPTVAYSVLVVAKVEKGKSKKLKSVKELLGITIMERSSFEKNPIDFLEAKGYKEVKKDLIIKLPKYSLFELENGRKRMLASAGELQKGNELALPSKYVNFLYLASHYEKLKGSPEDNEQKQLFVEQHKHYLDEIIEQISEFSKRVILADANLDKVLSAYNKHRDKPIREQAENIIHLFTLTNLGAPAAFKYFDTTIDRKRYTSTKEVLDATLIHQSITGLYETRIDLSQLGGDGGGGGGSGGGGSGGGGSGGGGSGGGGSGGGGSGGTAPLEEEYRLFLEAPIQNVTLLEQWKREIPKVWAEINPPGLASTQAPIHVQLLSTALPVRVRQYPITLEAKRSLRETIRKFRAAGILRPVHSPWNTPLLPVRKSGTSEYRMVQDLREVNKRVETIHPTVPNPYTLLSLLPPDRIWYSVLDLKDAFFCIPLAPESQLIFAFEWADAEEGESGQLTWTRLPQGFKNSPTLFNEALNRDLQGFRLDHPSVSLLQYVDDLLIAADTQAACLSATRDLLMTLAELGYRVSGKKAQLCQEEVTYLGFKIHKGSRSLSNSRTQAILQIPVPKTKRQVREFLGTIGYCRLWIPGFAELAQPLYAATRPGNDPLVWGEKEEEAFQSLKLALTQPPALALPSLDKPFQLFVEETSGAAKGVLTQALGPWKRPVAYLSKRLDPVAAGWPRCLRAIAAAALLTREASKLTFGQDIEITSSHNLESLLRSPPDKWLTNARITQYQVLLLDPPRVRFKQTAALNPATLLPETDDTLPIHHCLDTLDSLTSTRPDLTDQPLAQAEATLFTDGSSYIRDGKRYAGAAVVTLDSVIWAEPLPIGTSAQKAELIALTKALEWSKDKSVNIYTDSRYAFATLHVHGMIYRERGWLTAGGKAIKNAPEILALLTAVWLPKRVAVMHCKGHQKDDAPTSTGNRRADEVAREVAIRPLSTQATISAGKRTADGSEFEKRTADGSEFESPKKKAKVE

SEQ ID NO: 6202 - protein, 2121 aa, synthetic construct
MPAAKRVKLDGGDKKYSIGLDIGTNSVGWAVITDEYKVPSKKFKVLGNTDRHSIKKNLIGALLFDSGETAEATRLKRTARRRYTRRKNRICYLQEIFSNEMAKVDDSFFHRLEESFLVEEDKKHERHPIFGNIVDEVAYHEKYPTIYHLRKKLVDSTDKADLRLIYLALAHMIKFRGHFLIEGDLNPDNSDVDKLFIQLVQTYNQLFEENPINASGVDAKAILSARLSKSRRLENLIAQLPGEKKNGLFGNLIALSLGLTPNFKSNFDLAEDAKLQLSKDTYDDDLDNLLAQIGDQYADLFLAAKNLSDAILLSDILRVNTEITKAPLSASMIKRYDEHHQDLTLLKALVRQQLPEKYKEIFFDQSKNGYAGYIDGGASQEEFYKFIKPILEKMDGTEELLVKLNREDLLRKQRTFDNGSIPHQIHLGELHAILRRQEDFYPFLKDNREKIEKILTFRIPYYVGPLARGNSRFAWMTRKSEETITPWNFEEVVDKGASAQSFIERMTNFDKNLPNEKVLPKHSLLYEYFTVYNELTKVKYVTEGMRKPAFLSGEQKKAIVDLLFKTNRKVTVKQLKEDYFKKIECFDSVEISGVEDRFNASLGTYHDLLKIIKDKDFLDNEENEDILEDIVLTLTLFEDREMIEERLKTYAHLFDDKVMKQLKRRRYTGWGRLSRKLINGIRDKQSGKTILDFLKSDGFANRNFMQLIHDDSLTFKEDIQKAQVSGQGDSLHEHIANLAGSPAIKKGILQTVKVVDELVKVMGRHKPENIVIEMARENQTTQKGQKNSRERMKRIEEGIKELGSQILKEHPVENTQLQNEKLYLYYLQNGRDMYVDQELDINRLSDYDVDHIVPQSFLKDDSIDNKVLTRSDKARGKSDNVPSEEVVKKMKNYWRQLLNAKLITQRKFDNLTKAERGGLSELDKAGFIKRQLVETRQITKHVAQILDSRMNTKYDENDKLIREVKVITLKSKLVSDFRKDFQFYKVREINNYHHAHDAYLNAVVGTALIKKYPKLESEFVYGDYKVYDVRKMIAKSEQEIGKATAKYFFYSNIMNFFKTEITLANGEIRKRPLIETNGETGEIVWDKGRDFATVRKVLSMPQVNIVKKTEVQTGGFSKESILPKRNSDKLIARKKDWDPKKYGGFDSPTVAYSVLVVAKVEKGKSKKLKSVKELLGITIMERSSFEKNPIDFLEAKGYKEVKKDLIIKLPKYSLFELENGRKRMLASAGELQKGNELALPSKYVNFLYLASHYEKLKGSPEDNEQKQLFVEQHKHYLDEIIEQISEFSKRVILADANLDKVLSAYNKHRDKPIREQAENIIHLFTLTNLGAPAAFKYFDTTIDRKRYTSTKEVLDATLIHQSITGLYETRIDLSQLGGDGGGGGGSGGGGSGGGGSGGGGSGGGGSGGGGSGGTVSLQDEHRLFDIPVTTSLPDVWLQDFPQAWAETGGLGRAKCQAPIIIDLKPTAVPVSIKQYPMSLEAHMGIRQHIIKFLELGVLRPCRSPWNTPLLPVKKPGTQDYRPVQDLREINKRTVDIHPTVPNPYNLLSTLKPDYSWYTVLDLKDAFFCLPLAPQSQELFAFEWKDPERGISGQLTWTRLPQGFKNSPTLFDEALHRDLTDFRTQHPEVTLLQYVDDLLLAAPTKKACTQGTRHLLQELGEKGYRASAKKAQICQTKVTYLGYILSEGKRWLTPGRIETVARIPPPRNPREVREFLGTAGFCRLWIPGFAELAAPLYALTKESTPFTWQTEHQLAFEALKKALLSAPALGLPDTSKPFTLFLDERQGIAKGVLTQKLGPWKRPVAYLSKKLDPVAAGWPPCLRIMAATAMLVKDSAKLTLGQPLTVITPHTLEAIVRQPPDRWITNARLTHYQALLLDTDRVQFGPPVTLNPATLLPVPENQPSPHDCRQVLAETHGTREDLKDQELPDADHTWYTDGSSYLDSGTRRAGAAVVDGHNTIWAQSLPPGTSAQKAELIALTKALELSKGKKANIYTDSRYAFATAHTHGSIYERRGLLTSEGKEIKNKAEIIALLKALFLPQEVAIIHCPGHQKGQDPVAVGNRQADRVARQAAMAEVLTLATEPDNTSHITAGKRTADGSEFEKRTADGSEFESPKKKAKVE

SEQ ID NO: 6203 - protein, 2121 aa, synthetic construct
MPAAKRVKLDGGDKKYSIGLDIGTNSVGWAVITDEYKVPSKKFKVLGNTDRHSIKKNLIGALLFDSGETAEATRLKRTARRRYTRRKNRICYLQEIFSNEMAKVDDSFFHRLEESFLVEEDKKHERHPIFGNIVDEVAYHEKYPTIYHLRKKLVDSTDKADLRLIYLALAHMIKFRGHFLIEGDLNPDNSDVDKLFIQLVQTYNQLFEENPINASGVDAKAILSARLSKSRRLENLIAQLPGEKKNGLFGNLIALSLGLTPNFKSNFDLAEDAKLQLSKDTYDDDLDNLLAQIGDQYADLFLAAKNLSDAILLSDILRVNTEITKAPLSASMIKRYDEHHQDLTLLKALVRQQLPEKYKEIFFDQSKNGYAGYIDGGASQEEFYKFIKPILEKMDGTEELLVKLNREDLLRKQRTFDNGSIPHQIHLGELHAILRRQEDFYPFLKDNREKIEKILTFRIPYYVGPLARGNSRFAWMTRKSEETITPWNFEEVVDKGASAQSFIERMTNFDKNLPNEKVLPKHSLLYEYFTVYNELTKVKYVTEGMRKPAFLSGEQKKAIVDLLFKTNRKVTVKQLKEDYFKKIECFDSVEISGVEDRFNASLGTYHDLLKIIKDKDFLDNEENEDILEDIVLTLTLFEDREMIEERLKTYAHLFDDKVMKQLKRRRYTGWGRLSRKLINGIRDKQSGKTILDFLKSDGFANRNFMQLIHDDSLTFKEDIQKAQVSGQGDSLHEHIANLAGSPAIKKGILQTVKVVDELVKVMGRHKPENIVIEMARENQTTQKGQKNSRERMKRIEEGIKELGSQILKEHPVENTQLQNEKLYLYYLQNGRDMYVDQELDINRLSDYDVDHIVPQSFLKDDSIDNKVLTRSDKARGKSDNVPSEEVVKKMKNYWRQLLNAKLITQRKFDNLTKAERGGLSELDKAGFIKRQLVETRQITKHVAQILDSRMNTKYDENDKLIREVKVITLKSKLVSDFRKDFQFYKVREINNYHHAHDAYLNAVVGTALIKKYPKLESEFVYGDYKVYDVRKMIAKSEQEIGKATAKYFFYSNIMNFFKTEITLANGEIRKRPLIETNGETGEIVWDKGRDFATVRKVLSMPQVNIVKKTEVQTGGFSKESILPKRNSDKLIARKKDWDPKKYGGFDSPTVAYSVLVVAKVEKGKSKKLKSVKELLGITIMERSSFEKNPIDFLEAKGYKEVKKDLIIKLPKYSLFELENGRKRMLASAGELQKGNELALPSKYVNFLYLASHYEKLKGSPEDNEQKQLFVEQHKHYLDEIIEQISEFSKRVILADANLDKVLSAYNKHRDKPIREQAENIIHLFTLTNLGAPAAFKYFDTTIDRKRYTSTKEVLDATLIHQSITGLYETRIDLSQLGGDGGGGGGSGGGGSGGGGSGGGGSGGGGSGGGGSGGTVSLQDEHRLFDIPVTTSLPDVWLQDFPQAWAETGGLGRAKCQAPIIIDLKPTAVPVSIKQYPMSLEAHMGIRQHIIKFLELGVLRPCRSPWNTPLLPVKKPGTQDYRPVQDLREINKRTVDIHPTVPNPYNLLSTLKPDYSWYTVLDLKDAFFCLPLAPQSQELFAFEWKDPERGISGQLTWTRLPQGFKNSPTLFNEALHRDLTDFRTQHPEVTLLQYVDDLLLAAPTKKACTQGTRHLLQELGEKGYRASAKKAQICQTKVTYLGYILSEGKRWLTPGRIETVARIPPPRNPREVREFLGTAGFCRLWIPGFAELAAPLYALTKPSTPFTWQTEHQLAFEALKKALLSAPALGLPDTSKPFTLFLDERQGIAKGVLTQKLGPWKRPVAYLSKKLDPVAAGWPPCLRIMAATAMLVKDSAKLTLGQPLTVITPHTLEAIVRQPPDRWITNARLTHYQALLLDTDRVQFGPPVTLNPATLLPVPENQPSPHDCRQVLAETHGTREDLKDQELPDADHTWYTDGSSYLDSGTRRAGAAVVDGHNTIWAQSLPPGTSAQKAELIALTKALELSKGKKANIYTDSRYAFATAHTHGSIYERRGWLTSEGKEIKNKAEIIALLKALFLPQEVAIIHCPGHQKGQDPVAVGNRQADRVARQAAMAEVLTLATEPDNTSHITAGKRTADGSEFEKRTADGSEFESPKKKAKVE

SEQ ID NO: 6204 - protein, 2106 aa, synthetic construct
MPAAKRVKLDGGDKKYSIGLDIGTNSVGWAVITDEYKVPSKKFKVLGNTDRHSIKKNLIGALLFDSGETAEATRLKRTARRRYTRRKNRICYLQEIFSNEMAKVDDSFFHRLEESFLVEEDKKHERHPIFGNIVDEVAYHEKYPTIYHLRKKLVDSTDKADLRLIYLALAHMIKFRGHFLIEGDLNPDNSDVDKLFIQLVQTYNQLFEENPINASGVDAKAILSARLSKSRRLENLIAQLPGEKKNGLFGNLIALSLGLTPNFKSNFDLAEDAKLQLSKDTYDDDLDNLLAQIGDQYADLFLAAKNLSDAILLSDILRVNTEITKAPLSASMIKRYDEHHQDLTLLKALVRQQLPEKYKEIFFDQSKNGYAGYIDGGASQEEFYKFIKPILEKMDGTEELLVKLNREDLLRKQRTFDNGSIPHQIHLGELHAILRRQEDFYPFLKDNREKIEKILTFRIPYYVGPLARGNSRFAWMTRKSEETITPWNFEEVVDKGASAQSFIERMTNFDKNLPNEKVLPKHSLLYEYFTVYNELTKVKYVTEGMRKPAFLSGEQKKAIVDLLFKTNRKVTVKQLKEDYFKKIECFDSVEISGVEDRFNASLGTYHDLLKIIKDKDFLDNEENEDILEDIVLTLTLFEDREMIEERLKTYAHLFDDKVMKQLKRRRYTGWGRLSRKLINGIRDKQSGKTILDFLKSDGFANRNFMQLIHDDSLTFKEDIQKAQVSGQGDSLHEHIANLAGSPAIKKGILQTVKVVDELVKVMGRHKPENIVIEMARENQTTQKGQKNSRERMKRIEEGIKELGSQILKEHPVENTQLQNEKLYLYYLQNGRDMYVDQELDINRLSDYDVDHIVPQSFLKDDSIDNKVLTRSDKARGKSDNVPSEEVVKKMKNYWRQLLNAKLITQRKFDNLTKAERGGLSELDKAGFIKRQLVETRQITKHVAQILDSRMNTKYDENDKLIREVKVITLKSKLVSDFRKDFQFYKVREINNYHHAHDAYLNAVVGTALIKKYPKLESEFVYGDYKVYDVRKMIAKSEQEIGKATAKYFFYSNIMNFFKTEITLANGEIRKRPLIETNGETGEIVWDKGRDFATVRKVLSMPQVNIVKKTEVQTGGFSKESILPKRNSDKLIARKKDWDPKKYGGFDSPTVAYSVLVVAKVEKGKSKKLKSVKELLGITIMERSSFEKNPIDFLEAKGYKEVKKDLIIKLPKYSLFELENGRKRMLASAGELQKGNELALPSKYVNFLYLASHYEKLKGSPEDNEQKQLFVEQHKHYLDEIIEQISEFSKRVILADANLDKVLSAYNKHRDKPIREQAENIIHLFTLTNLGAPAAFKYFDTTIDRKRYTSTKEVLDATLIHQSITGLYETRIDLSQLGGDGGGGGGSGGGGSGGGGSGGGGSGGGGSGGGGSGGVPWILKKPLELTIKLDLEEQQGTLLNNSILSKKGKEELKQLFEKYSALWQSWENQVGHRRIRPHKIATGTVKPTPQKQYHINPKAKPDIQIVINDLLKQGVLIQKESTMNTPVYPVPKPNGRWRMVLDYRAVNKVTPLIAVQNQHSYGILGSLFKGRYKTTIDLSNGFWAHPIVPEDYWITAFTWQGKQYCWTVLPQGFLNSPGLFNGDVVDLLQGIPNVEVYVDDVYISHDSEKEHLEYLDILFNRLKEAGYIISLKKSNIANSIVDFLGFQITNEGRGLTDTFKEKLENITAPTTLKQLQSILGLLNFARNFIPDFTELIAPLYALIPKSPKNYVPWQIEHSTTLETLITKLNGAEYLQGRKGDKTLIMKVNASYTTGYIRYYNEGEKKPISYVSIVFSKTELKFTELEKLLTTVHKGLLKALDLSMGQNIHVYSPIVSMQNIQKTPQTAKKALASRWLSWLSYLEDPRIRFFYDPQMPALKDLPAVDTGKDNKKHPSNFQHIFYTDGSAITSPTKEGHLNAGMGIVYFINKDGNLQKQQEWSISLGNHTAQFAEIAAFEFALKKCLPLGGNILVVTDSNYVAKAYNEELDVWASNGFVNNRKKPLKHISKWKSVADLKRLRPDVVVTHEPGHQKLDSSPHAYGNNLADQLATQASFKVHAGKRTADGSEFEKRTADGSEFESPKKKAKVE

SEQ ID NO: 6205 - protein, 2114 aa, synthetic construct
MPAAKRVKLDGGDKKYSIGLDIGTNSVGWAVITDEYKVPSKKFKVLGNTDRHSIKKNLIGALLFDSGETAEATRLKRTARRRYTRRKNRICYLQEIFSNEMAKVDDSFFHRLEESFLVEEDKKHERHPIFGNIVDEVAYHEKYPTIYHLRKKLVDSTDKADLRLIYLALAHMIKFRGHFLIEGDLNPDNSDVDKLFIQLVQTYNQLFEENPINASGVDAKAILSARLSKSRRLENLIAQLPGEKKNGLFGNLIALSLGLTPNFKSNFDLAEDAKLQLSKDTYDDDLDNLLAQIGDQYADLFLAAKNLSDAILLSDILRVNTEITKAPLSASMIKRYDEHHQDLTLLKALVRQQLPEKYKEIFFDQSKNGYAGYIDGGASQEEFYKFIKPILEKMDGTEELLVKLNREDLLRKQRTFDNGSIPHQIHLGELHAILRRQEDFYPFLKDNREKIEKILTFRIPYYVGPLARGNSRFAWMTRKSEETITPWNFEEVVDKGASAQSFIERMTNFDKNLPNEKVLPKHSLLYEYFTVYNELTKVKYVTEGMRKPAFLSGEQKKAIVDLLFKTNRKVTVKQLKEDYFKKIECFDSVEISGVEDRFNASLGTYHDLLKIIKDKDFLDNEENEDILEDIVLTLTLFEDREMIEERLKTYAHLFDDKVMKQLKRRRYTGWGRLSRKLINGIRDKQSGKTILDFLKSDGFANRNFMQLIHDDSLTFKEDIQKAQVSGQGDSLHEHIANLAGSPAIKKGILQTVKVVDELVKVMGRHKPENIVIEMARENQTTQKGQKNSRERMKRIEEGIKELGSQILKEHPVENTQLQNEKLYLYYLQNGRDMYVDQELDINRLSDYDVDHIVPQSFLKDDSIDNKVLTRSDKARGKSDNVPSEEVVKKMKNYWRQLLNAKLITQRKFDNLTKAERGGLSELDKAGFIKRQLVETRQITKHVAQILDSRMNTKYDENDKLIREVKVITLKSKLVSDFRKDFQFYKVREINNYHHAHDAYLNAVVGTALIKKYPKLESEFVYGDYKVYDVRKMIAKSEQEIGKATAKYFFYSNIMNFFKTEITLANGEIRKRPLIETNGETGEIVWDKGRDFATVRKVLSMPQVNIVKKTEVQTGGFSKESILPKRNSDKLIARKKDWDPKKYGGFDSPTVAYSVLVVAKVEKGKSKKLKSVKELLGITIMERSSFEKNPIDFLEAKGYKEVKKDLIIKLPKYSLFELENGRKRMLASAGELQKGNELALPSKYVNFLYLASHYEKLKGSPEDNEQKQLFVEQHKHYLDEIIEQISEFSKRVILADANLDKVLSAYNKHRDKPIREQAENIIHLFTLTNLGAPAAFKYFDTTIDRKRYTSTKEVLDATLIHQSITGLYETRIDLSQLGGDGGGGGGSGGGGSGGGGSGGGGSGGGGSGGGGSGGTLQLEEEYRLFEPESTQKQEMDIWLKNFPQAWAETGGMGTAHCQAPVLIQLKATATPISIRQYPMPHEAYQGIKPHIRRMLDQGILKPCQSPWNTPLLPVKKPGTEDYRPVQDLREVNKRVEDIHPTVPNPYNLLSTLPPSHPWYTVLDLKDAFFCLRLHSESQLLFAFEWRDPEIGLSGQLTWTRLPQGFKNSPTLFNEALHSDLADFRVRYPALVLLQYVDDLLLAAATRTECLEGTKALLETLGNKGYRASAKKAQICLQEVTYLGYSLKDGQRWLTKARKEAILSIPVPKNSRQVREFLGTAGYCRLWIPGFAELAAPLYPLTRPGTLFQWGTEQQLAFEDIKKALLSSPALGLPDITKPFELFIDENSGFAKGVLVQKLGPWKRPVAYLSKKLDTVASGWPPCLRMVAAIAILVKDAGKLTLGQPLTILTSHPVEALVRQPPNKWLSNARMTHYQAMLLDAERVHFGPTVSLNPATLLPLPSGGNHHDCLQILAETHGTRPDLTDQPLPDADLTWYTDGSSFIRNGEREAGAAVTTESEVIWAAPLPPGTSAQRAELIALTQALKMAEGKKLTVYTDSRYAFATTHVHGEIYRRRGWLTSEGKEIKNKNEILALLEALFLPKRLSIIHCPGHQKGDSPQAKGNRLADDTAKKAATETHSSLTVLPAGKRTADGSEFEKRTADGSEFESPKKKAKVE

SEQ ID NO: 6206 - protein, 2106 aa, synthetic construct
MPAAKRVKLDGGDKKYSIGLDIGTNSVGWAVITDEYKVPSKKFKVLGNTDRHSIKKNLIGALLFDSGETAEATRLKRTARRRYTRRKNRICYLQEIFSNEMAKVDDSFFHRLEESFLVEEDKKHERHPIFGNIVDEVAYHEKYPTIYHLRKKLVDSTDKADLRLIYLALAHMIKFRGHFLIEGDLNPDNSDVDKLFIQLVQTYNQLFEENPINASGVDAKAILSARLSKSRRLENLIAQLPGEKKNGLFGNLIALSLGLTPNFKSNFDLAEDAKLQLSKDTYDDDLDNLLAQIGDQYADLFLAAKNLSDAILLSDILRVNTEITKAPLSASMIKRYDEHHQDLTLLKALVRQQLPEKYKEIFFDQSKNGYAGYIDGGASQEEFYKFIKPILEKMDGTEELLVKLNREDLLRKQRTFDNGSIPHQIHLGELHAILRRQEDFYPFLKDNREKIEKILTFRIPYYVGPLARGNSRFAWMTRKSEETITPWNFEEVVDKGASAQSFIERMTNFDKNLPNEKVLPKHSLLYEYFTVYNELTKVKYVTEGMRKPAFLSGEQKKAIVDLLFKTNRKVTVKQLKEDYFKKIECFDSVEISGVEDRFNASLGTYHDLLKIIKDKDFLDNEENEDILEDIVLTLTLFEDREMIEERLKTYAHLFDDKVMKQLKRRRYTGWGRLSRKLINGIRDKQSGKTILDFLKSDGFANRNFMQLIHDDSLTFKEDIQKAQVSGQGDSLHEHIANLAGSPAIKKGILQTVKVVDELVKVMGRHKPENIVIEMARENQTTQKGQKNSRERMKRIEEGIKELGSQILKEHPVENTQLQNEKLYLYYLQNGRDMYVDQELDINRLSDYDVDHIVPQSFLKDDSIDNKVLTRSDKARGKSDNVPSEEVVKKMKNYWRQLLNAKLITQRKFDNLTKAERGGLSELDKAGFIKRQLVETRQITKHVAQILDSRMNTKYDENDKLIREVKVITLKSKLVSDFRKDFQFYKVREINNYHHAHDAYLNAVVGTALIKKYPKLESEFVYGDYKVYDVRKMIAKSEQEIGKATAKYFFYSNIMNFFKTEITLANGEIRKRPLIETNGETGEIVWDKGRDFATVRKVLSMPQVNIVKKTEVQTGGFSKESILPKRNSDKLIARKKDWDPKKYGGFDSPTVAYSVLVVAKVEKGKSKKLKSVKELLGITIMERSSFEKNPIDFLEAKGYKEVKKDLIIKLPKYSLFELENGRKRMLASAGELQKGNELALPSKYVNFLYLASHYEKLKGSPEDNEQKQLFVEQHKHYLDEIIEQISEFSKRVILADANLDKVLSAYNKHRDKPIREQAENIIHLFTLTNLGAPAAFKYFDTTIDRKRYTSTKEVLDATLIHQSITGLYETRIDLSQLGGDGGGGGGSGGGGSGGGGSGGGGSGGGGSGGGGSGGVPWLTQQPLQLTILVPLQEYQEKILSKTALPEDQKQQLKTLFVKYDNLWQHWENQVGHRKIRPHNIATGDYPPRPQKQYPINPKAKPSIQIVIDDLLKQGVLTPQNSTMNTPVYPVPKPDGRWRMVLDYREVNKTIPLTAAQNQHSAGILATIVRQKYKTTLDLANGFWAHPITPESYWLTAFTWQGKQYCWTRLPQGFLNSPALFNADVVDLLKEIPNVQVYVDDIYLSHDDPKEHVQQLEKVFQILLQAGYVVSLKKSEIGQKTVEFLGFNITKEGRGLTDTFKTKLLNITPPKDLKQLQSILGLLNFARNFIPNFAELVQPLYNLIAPAKGKYIEWSEENTKQLNMVIEALNTASNLEERLPEQRLVIKVNTSPSAGYVRYYNETGKKPIMYLNYVFSKAELKFSMLEKLLTTMHKALIKAMDLAMGQEILVYSPIVSMTKIQKTPLPERKALPIRWITWMTYLEDPRIQFHYDKTLPELKHIPDVYTSSQSPVKHPSQYEGVFYTDGSAIKSPDPTKSNNAGMGIVHATYKPEYQVLNQWSIPLGNHTAQMAEIAAVEFACKKALKIPGPVLVITDSFYVAESANKELPYWKSNGFVNNKKKPLKHISKWKSIAECLSMKPDITIQHEKGISLQIPVFILKGNALADKLATQGSYVVNAGKRTADGSEFEKRTADGSEFESPKKKAKVE

SEQ ID NO: 6207 - protein, 2106 aa, synthetic construct
MPAAKRVKLDGGDKKYSIGLDIGTNSVGWAVITDEYKVPSKKFKVLGNTDRHSIKKNLIGALLFDSGETAEATRLKRTARRRYTRRKNRICYLQEIFSNEMAKVDDSFFHRLEESFLVEEDKKHERHPIFGNIVDEVAYHEKYPTIYHLRKKLVDSTDKADLRLIYLALAHMIKFRGHFLIEGDLNPDNSDVDKLFIQLVQTYNQLFEENPINASGVDAKAILSARLSKSRRLENLIAQLPGEKKNGLFGNLIALSLGLTPNFKSNFDLAEDAKLQLSKDTYDDDLDNLLAQIGDQYADLFLAAKNLSDAILLSDILRVNTEITKAPLSASMIKRYDEHHQDLTLLKALVRQQLPEKYKEIFFDQSKNGYAGYIDGGASQEEFYKFIKPILEKMDGTEELLVKLNREDLLRKQRTFDNGSIPHQIHLGELHAILRRQEDFYPFLKDNREKIEKILTFRIPYYVGPLARGNSRFAWMTRKSEETITPWNFEEVVDKGASAQSFIERMTNFDKNLPNEKVLPKHSLLYEYFTVYNELTKVKYVTEGMRKPAFLSGEQKKAIVDLLFKTNRKVTVKQLKEDYFKKIECFDSVEISGVEDRFNASLGTYHDLLKIIKDKDFLDNEENEDILEDIVLTLTLFEDREMIEERLKTYAHLFDDKVMKQLKRRRYTGWGRLSRKLINGIRDKQSGKTILDFLKSDGFANRNFMQLIHDDSLTFKEDIQKAQVSGQGDSLHEHIANLAGSPAIKKGILQTVKVVDELVKVMGRHKPENIVIEMARENQTTQKGQKNSRERMKRIEEGIKELGSQILKEHPVENTQLQNEKLYLYYLQNGRDMYVDQELDINRLSDYDVDHIVPQSFLKDDSIDNKVLTRSDKARGKSDNVPSEEVVKKMKNYWRQLLNAKLITQRKFDNLTKAERGGLSELDKAGFIKRQLVETRQITKHVAQILDSRMNTKYDENDKLIREVKVITLKSKLVSDFRKDFQFYKVREINNYHHAHDAYLNAVVGTALIKKYPKLESEFVYGDYKVYDVRKMIAKSEQEIGKATAKYFFYSNIMNFFKTEITLANGEIRKRPLIETNGETGEIVWDKGRDFATVRKVLSMPQVNIVKKTEVQTGGFSKESILPKRNSDKLIARKKDWDPKKYGGFDSPTVAYSVLVVAKVEKGKSKKLKSVKELLGITIMERSSFEKNPIDFLEAKGYKEVKKDLIIKLPKYSLFELENGRKRMLASAGELQKGNELALPSKYVNFLYLASHYEKLKGSPEDNEQKQLFVEQHKHYLDEIIEQISEFSKRVILADANLDKVLSAYNKHRDKPIREQAENIIHLFTLTNLGAPAAFKYFDTTIDRKRYTSTKEVLDATLIHQSITGLYETRIDLSQLGGDGGGGGGSGGGGSGGGGSGGGGSGGGGSGGGGSGGVPWLTQQPLQLTILVPLQEYQEKILSKTALPEDQKQQLKTLFVKYDNLWQHWENQVGHRKIRPHNIATGDYPPRPQKQYPINPKAKPSIQIVIDDLLKQGVLTPQNSTMNTPVYPVPKPDGRWRMVLDYREVNKTIPLTAAQNQHSAGILATIVRQKYKTTLDLANGFWAHPITPESYWLTAFTWQGKQYCWTRLPQGFLNSPALFNADVVDLLKEIPNVQVYVDDIYLSHDDPKEHVQQLEKVFQILLQAGYVVSLKKSEIGQKTVEFLGFNITKEGRGLTDTFKTKLLNITPPKDLKQLQSILGKLNFARNFIPNFAELVQPLYNLIAPAKGKYIEWSEENTKQLNMVIEALNTASNLEERLPEQRLVIKVNTSPSAGYVRYYNETGKKPIMYLNYVFSKAELKFSMLEKLLTTMHKALIKAMDLAMGQEILVYSPIVSMTKIQKTPLPERKALPIRWITWMTYLEDPRIQFHYDKTLPELKHIPDVYTSSQSPVKHPSQYEGVFYTDGSAIKSPDPTKSNNAGMGIVHATYKPEYQVLNQWSIPLGNHTAQMAEIAAVEFACKKALKIPGPVLVITDSFYVAESANKELPYWKSNGFVNNKKKPLKHISKWKSIAECLSMKPDITIQHEKGISLQIPVFILKGNALADKLATQGSYVVNAGKRTADGSEFEKRTADGSEFESPKKKAKVE

SEQ ID NO: 6208 - protein, 2195 aa, synthetic construct
MPAAKRVKLDGGDKKYSIGLDIGTNSVGWAVITDEYKVPSKKFKVLGNTDRHSIKKNLIGALLFDSGETAEATRLKRTARRRYTRRKNRICYLQEIFSNEMAKVDDSFFHRLEESFLVEEDKKHERHPIFGNIVDEVAYHEKYPTIYHLRKKLVDSTDKADLRLIYLALAHMIKFRGHFLIEGDLNPDNSDVDKLFIQLVQTYNQLFEENPINASGVDAKAILSARLSKSRRLENLIAQLPGEKKNGLFGNLIALSLGLTPNFKSNFDLAEDAKLQLSKDTYDDDLDNLLAQIGDQYADLFLAAKNLSDAILLSDILRVNTEITKAPLSASMIKRYDEHHQDLTLLKALVRQQLPEKYKEIFFDQSKNGYAGYIDGGASQEEFYKFIKPILEKMDGTEELLVKLNREDLLRKQRTFDNGSIPHQIHLGELHAILRRQEDFYPFLKDNREKIEKILTFRIPYYVGPLARGNSRFAWMTRKSEETITPWNFEEVVDKGASAQSFIERMTNFDKNLPNEKVLPKHSLLYEYFTVYNELTKVKYVTEGMRKPAFLSGEQKKAIVDLLFKTNRKVTVKQLKEDYFKKIECFDSVEISGVEDRFNASLGTYHDLLKIIKDKDFLDNEENEDILEDIVLTLTLFEDREMIEERLKTYAHLFDDKVMKQLKRRRYTGWGRLSRKLINGIRDKQSGKTILDFLKSDGFANRNFMQLIHDDSLTFKEDIQKAQVSGQGDSLHEHIANLAGSPAIKKGILQTVKVVDELVKVMGRHKPENIVIEMARENQTTQKGQKNSRERMKRIEEGIKELGSQILKEHPVENTQLQNEKLYLYYLQNGRDMYVDQELDINRLSDYDVDHIVPQSFLKDDSIDNKVLTRSDKARGKSDNVPSEEVVKKMKNYWRQLLNAKLITQRKFDNLTKAERGGLSELDKAGFIKRQLVETRQITKHVAQILDSRMNTKYDENDKLIREVKVITLKSKLVSDFRKDFQFYKVREINNYHHAHDAYLNAVVGTALIKKYPKLESEFVYGDYKVYDVRKMIAKSEQEIGKATAKYFFYSNIMNFFKTEITLANGEIRKRPLIETNGETGEIVWDKGRDFATVRKVLSMPQVNIVKKTEVQTGGFSKESILPKRNSDKLIARKKDWDPKKYGGFDSPTVAYSVLVVAKVEKGKSKKLKSVKELLGITIMERSSFEKNPIDFLEAKGYKEVKKDLIIKLPKYSLFELENGRKRMLASAGELQKGNELALPSKYVNFLYLASHYEKLKGSPEDNEQKQLFVEQHKHYLDEIIEQISEFSKRVILADANLDKVLSAYNKHRDKPIREQAENIIHLFTLTNLGAPAAFKYFDTTIDRKRYTSTKEVLDATLIHQSITGLYETRIDLSQLGGDGGGGGGSGGGGSGGGGSGGGGSGGGGSGGGGSGGMNPLQLLQPLPAEIKGTKLLAHWNSGATITCIPESFLEDEQPIKKTLIKTIHGEKQQNVYYVTFKVKGRKVEAEVIASPYEYILLSPTDVPWLTQQPLQLTILVPLQEYQEKILSKTALPEDQKQQLKTLFVKYDNLWQHWENQVGHRKIRPHNIATGDYPPRPQKQYPINPKAKPSIQIVIDDLLKQGVLTPQNSTMNTPVYPVPKPDGRWRMVLDYREVNKTIPLTAAQNQHSAGILATIVRQKYKTTLDLANGFWAHPITPESYWLTAFTWQGKQYCWTRLPQGFLNSPALFNADVVDLLKEIPNVQVYVDDIYLSHDDPKEHVQQLEKVFQILLQAGYVVSLKKSEIGQKTVEFLGFNITKEGRGLTDTFKTKLLNITPPKDLKQLQSILGLLNFARNFIPNFAELVQPLYNLIAPAKGKYIEWSEENTKQLNMVIEALNTASNLEERLPEQRLVIKVNTSPSAGYVRYYNETGKKPIMYLNYVFSKAELKFSMLEKLLTTMHKALIKAMDLAMGQEILVYSPIVSMTKIQKTPLPERKALPIRWITWMTYLEDPRIQFHYDKTLPELKHIPDVYTSSQSPVKHPSQYEGVFYTDGSAIKSPDPTKSNNAGMGIVHATYKPEYQVLNQWSIPLGNHTAQMAEIAAVEFACKKALKIPGPVLVITDSFYVAESANKELPYWKSNGFVNNKKKPLKHISKWKSIAECLSMKPDITIQHEKGISLQIPVFILKGNALADKLATQGSYVVNAGKRTADGSEFEKRTADGSEFESPKKKAKVE

SEQ ID NO: 6209 - protein, 2195 aa, synthetic construct
MPAAKRVKLDGGDKKYSIGLDIGTNSVGWAVITDEYKVPSKKFKVLGNTDRHSIKKNLIGALLFDSGETAEATRLKRTARRRYTRRKNRICYLQEIFSNEMAKVDDSFFHRLEESFLVEEDKKHERHPIFGNIVDEVAYHEKYPTIYHLRKKLVDSTDKADLRLIYLALAHMIKFRGHFLIEGDLNPDNSDVDKLFIQLVQTYNQLFEENPINASGVDAKAILSARLSKSRRLENLIAQLPGEKKNGLFGNLIALSLGLTPNFKSNFDLAEDAKLQLSKDTYDDDLDNLLAQIGDQYADLFLAAKNLSDAILLSDILRVNTEITKAPLSASMIKRYDEHHQDLTLLKALVRQQLPEKYKEIFFDQSKNGYAGYIDGGASQEEFYKFIKPILEKMDGTEELLVKLNREDLLRKQRTFDNGSIPHQIHLGELHAILRRQEDFYPFLKDNREKIEKILTFRIPYYVGPLARGNSRFAWMTRKSEETITPWNFEEVVDKGASAQSFIERMTNFDKNLPNEKVLPKHSLLYEYFTVYNELTKVKYVTEGMRKPAFLSGEQKKAIVDLLFKTNRKVTVKQLKEDYFKKIECFDSVEISGVEDRFNASLGTYHDLLKIIKDKDFLDNEENEDILEDIVLTLTLFEDREMIEERLKTYAHLFDDKVMKQLKRRRYTGWGRLSRKLINGIRDKQSGKTILDFLKSDGFANRNFMQLIHDDSLTFKEDIQKAQVSGQGDSLHEHIANLAGSPAIKKGILQTVKVVDELVKVMGRHKPENIVIEMARENQTTQKGQKNSRERMKRIEEGIKELGSQILKEHPVENTQLQNEKLYLYYLQNGRDMYVDQELDINRLSDYDVDHIVPQSFLKDDSIDNKVLTRSDKARGKSDNVPSEEVVKKMKNYWRQLLNAKLITQRKFDNLTKAERGGLSELDKAGFIKRQLVETRQITKHVAQILDSRMNTKYDENDKLIREVKVITLKSKLVSDFRKDFQFYKVREINNYHHAHDAYLNAVVGTALIKKYPKLESEFVYGDYKVYDVRKMIAKSEQEIGKATAKYFFYSNIMNFFKTEITLANGEIRKRPLIETNGETGEIVWDKGRDFATVRKVLSMPQVNIVKKTEVQTGGFSKESILPKRNSDKLIARKKDWDPKKYGGFDSPTVAYSVLVVAKVEKGKSKKLKSVKELLGITIMERSSFEKNPIDFLEAKGYKEVKKDLIIKLPKYSLFELENGRKRMLASAGELQKGNELALPSKYVNFLYLASHYEKLKGSPEDNEQKQLFVEQHKHYLDEIIEQISEFSKRVILADANLDKVLSAYNKHRDKPIREQAENIIHLFTLTNLGAPAAFKYFDTTIDRKRYTSTKEVLDATLIHQSITGLYETRIDLSQLGGDGGGGGGSGGGGSGGGGSGGGGSGGGGSGGGGSGGMNPLQLLQPLPAEIKGTKLLAHWNSGATITCIPESFLEDEQPIKKTLIKTIHGEKQQNVYYVTFKVKGRKVEAEVIASPYEYILLSPTDVPWLTQQPLQLTILVPLQEYQEKILSKTALPEDQKQQLKTLFVKYDNLWQHWENQVGHRKIRPHNIATGDYPPRPQKQYPINPKAKPSIQIVIDDLLKQGVLTPQNSTMNTPVYPVPKPDGRWRMVLDYREVNKTIPLTAAQNQHSAGILATIVRQKYKTTLDLANGFWAHPITPESYWLTAFTWQGKQYCWTRLPQGFLNSPALFNADVVDLLKEIPNVQVYVDDIYLSHDDPKEHVQQLEKVFQILLQAGYVVSLKKSEIGQKTVEFLGFNITKEGRGLTDTFKTKLLNITPPKDLKQLQSILGKLNFARNFIPNFAELVQPLYNLIAPAKGKYIEWSEENTKQLNMVIEALNTASNLEERLPEQRLVIKVNTSPSAGYVRYYNETGKKPIMYLNYVFSKAELKFSMLEKLLTTMHKALIKAMDLAMGQEILVYSPIVSMTKIQKTPLPERKALPIRWITWMTYLEDPRIQFHYDKTLPELKHIPDVYTSSQSPVKHPSQYEGVFYTDGSAIKSPDPTKSNNAGMGIVHATYKPEYQVLNQWSIPLGNHTAQMAEIAAVEFACKKALKIPGPVLVITDSFYVAESANKELPYWKSNGFVNNKKKPLKHISKWKSIAECLSMKPDITIQHEKGISLQIPVFILKGNALADKLATQGSYVVNAGKRTADGSEFEKRTADGSEFESPKKKAKVE

SEQ ID NO: 6210 - protein, 2113 aa, synthetic construct
MPAAKRVKLDGGDKKYSIGLDIGTNSVGWAVITDEYKVPSKKFKVLGNTDRHSIKKNLIGALLFDSGETAEATRLKRTARRRYTRRKNRICYLQEIFSNEMAKVDDSFFHRLEESFLVEEDKKHERHPIFGNIVDEVAYHEKYPTIYHLRKKLVDSTDKADLRLIYLALAHMIKFRGHFLIEGDLNPDNSDVDKLFIQLVQTYNQLFEENPINASGVDAKAILSARLSKSRRLENLIAQLPGEKKNGLFGNLIALSLGLTPNFKSNFDLAEDAKLQLSKDTYDDDLDNLLAQIGDQYADLFLAAKNLSDAILLSDILRVNTEITKAPLSASMIKRYDEHHQDLTLLKALVRQQLPEKYKEIFFDQSKNGYAGYIDGGASQEEFYKFIKPILEKMDGTEELLVKLNREDLLRKQRTFDNGSIPHQIHLGELHAILRRQEDFYPFLKDNREKIEKILTFRIPYYVGPLARGNSRFAWMTRKSEETITPWNFEEVVDKGASAQSFIERMTNFDKNLPNEKVLPKHSLLYEYFTVYNELTKVKYVTEGMRKPAFLSGEQKKAIVDLLFKTNRKVTVKQLKEDYFKKIECFDSVEISGVEDRFNASLGTYHDLLKIIKDKDFLDNEENEDILEDIVLTLTLFEDREMIEERLKTYAHLFDDKVMKQLKRRRYTGWGRLSRKLINGIRDKQSGKTILDFLKSDGFANRNFMQLIHDDSLTFKEDIQKAQVSGQGDSLHEHIANLAGSPAIKKGILQTVKVVDELVKVMGRHKPENIVIEMARENQTTQKGQKNSRERMKRIEEGIKELGSQILKEHPVENTQLQNEKLYLYYLQNGRDMYVDQELDINRLSDYDVDHIVPQSFLKDDSIDNKVLTRSDKARGKSDNVPSEEVVKKMKNYWRQLLNAKLITQRKFDNLTKAERGGLSELDKAGFIKRQLVETRQITKHVAQILDSRMNTKYDENDKLIREVKVITLKSKLVSDFRKDFQFYKVREINNYHHAHDAYLNAVVGTALIKKYPKLESEFVYGDYKVYDVRKMIAKSEQEIGKATAKYFFYSNIMNFFKTEITLANGEIRKRPLIETNGETGEIVWDKGRDFATVRKVLSMPQVNIVKKTEVQTGGFSKESILPKRNSDKLIARKKDWDPKKYGGFDSPTVAYSVLVVAKVEKGKSKKLKSVKELLGITIMERSSFEKNPIDFLEAKGYKEVKKDLIIKLPKYSLFELENGRKRMLASAGELQKGNELALPSKYVNFLYLASHYEKLKGSPEDNEQKQLFVEQHKHYLDEIIEQISEFSKRVILADANLDKVLSAYNKHRDKPIREQAENIIHLFTLTNLGAPAAFKYFDTTIDRKRYTSTKEVLDATLIHQSITGLYETRIDLSQLGGDGGGGGGSGGGGSGGGGSGGGGSGGGGSGGGGSGGVLNLEEEYRLHEKPVPSSIDPSWLQLFPTVWAERAGMGLANQVPPVVVELRSGASPVAVRQYPMSKEAREGIRPHIQKFLDLGVLVPCRSPWNTPLLPVKKPGTNDYRPVQDLREINKRVQDIHPTVPNPYNLLSSLPPSYTWYSVLDLKDAFFCLRLHPNSQPLFAFEWKDPEKGNTGQLTWTRLPQGFKNSPTLFDEALHRDLAPFRALNPQVVLLQYVDDLLVAAPTYEDCKKGTQKLLQELSKLGYRVSAKKAQLCQREVTYLGYLLKEGKRWLTPARKATVMKIPVPTTPRQVREFLGTAGFCRLWIPGFASLAAPLYPLTKESIPFIWTEEHQQAFDHIKKALLSAPALALPDLTKPFTLYIDERAGVARGVLTQTLGPWRRPVAYLSKKLDPVASGWPTCLKAVAAVALLLKDADKLTLGQNVTVIASHSLESIVRQPPDRWMTNARMTHYQSLLLNERVSFAPPAVLNPATLLPVESEATPVHRCSEILAEETGTRRDLEDQPLPGVPTWYTDGSSFITEGKRRAGAPIVDGKRTVWASSLPEGTSAQKAELVALTQALRLAEGKNINIYTDSRYAFATAHIHGAIYKQRGLLTSAGKDIKNKEEILALLEAIHLPRRVAIIHCPGHQRGSNPVATGNRRADEAAKQAALSTRVLAGTTKPAGKRTADGSEFEKRTADGSEFESPKKKAKVE

SEQ ID NO: 6211 - protein, 2113 aa, synthetic construct
MPAAKRVKLDGGDKKYSIGLDIGTNSVGWAVITDEYKVPSKKFKVLGNTDRHSIKKNLIGALLFDSGETAEATRLKRTARRRYTRRKNRICYLQEIFSNEMAKVDDSFFHRLEESFLVEEDKKHERHPIFGNIVDEVAYHEKYPTIYHLRKKLVDSTDKADLRLIYLALAHMIKFRGHFLIEGDLNPDNSDVDKLFIQLVQTYNQLFEENPINASGVDAKAILSARLSKSRRLENLIAQLPGEKKNGLFGNLIALSLGLTPNFKSNFDLAEDAKLQLSKDTYDDDLDNLLAQIGDQYADLFLAAKNLSDAILLSDILRVNTEITKAPLSASMIKRYDEHHQDLTLLKALVRQQLPEKYKEIFFDQSKNGYAGYIDGGASQEEFYKFIKPILEKMDGTEELLVKLNREDLLRKQRTFDNGSIPHQIHLGELHAILRRQEDFYPFLKDNREKIEKILTFRIPYYVGPLARGNSRFAWMTRKSEETITPWNFEEVVDKGASAQSFIERMTNFDKNLPNEKVLPKHSLLYEYFTVYNELTKVKYVTEGMRKPAFLSGEQKKAIVDLLFKTNRKVTVKQLKEDYFKKIECFDSVEISGVEDRFNASLGTYHDLLKIIKDKDFLDNEENEDILEDIVLTLTLFEDREMIEERLKTYAHLFDDKVMKQLKRRRYTGWGRLSRKLINGIRDKQSGKTILDFLKSDGFANRNFMQLIHDDSLTFKEDIQKAQVSGQGDSLHEHIANLAGSPAIKKGILQTVKVVDELVKVMGRHKPENIVIEMARENQTTQKGQKNSRERMKRIEEGIKELGSQILKEHPVENTQLQNEKLYLYYLQNGRDMYVDQELDINRLSDYDVDHIVPQSFLKDDSIDNKVLTRSDKARGKSDNVPSEEVVKKMKNYWRQLLNAKLITQRKFDNLTKAERGGLSELDKAGFIKRQLVETRQITKHVAQILDSRMNTKYDENDKLIREVKVITLKSKLVSDFRKDFQFYKVREINNYHHAHDAYLNAVVGTALIKKYPKLESEFVYGDYKVYDVRKMIAKSEQEIGKATAKYFFYSNIMNFFKTEITLANGEIRKRPLIETNGETGEIVWDKGRDFATVRKVLSMPQVNIVKKTEVQTGGFSKESILPKRNSDKLIARKKDWDPKKYGGFDSPTVAYSVLVVAKVEKGKSKKLKSVKELLGITIMERSSFEKNPIDFLEAKGYKEVKKDLIIKLPKYSLFELENGRKRMLASAGELQKGNELALPSKYVNFLYLASHYEKLKGSPEDNEQKQLFVEQHKHYLDEIIEQISEFSKRVILADANLDKVLSAYNKHRDKPIREQAENIIHLFTLTNLGAPAAFKYFDTTIDRKRYTSTKEVLDATLIHQSITGLYETRIDLSQLGGDGGGGGGSGGGGSGGGGSGGGGSGGGGSGGGGSGGVLNLEEEYRLHEKPVPSSIDPSWLQLFPTVWAERAGMGLANQVPPVVVELRSGASPVAVRQYPMSKEAREGIRPHIQKFLDLGVLVPCRSPWNTPLLPVKKPGTNDYRPVQDLREINKRVQDIHPTVPNPYNLLSSLPPSYTWYSVLDLKDAFFCLRLHPNSQPLFAFEWKDPEKGNTGQLTWTRLPQGFKNSPTLFNEALHRDLAPFRALNPQVVLLQYVDDLLVAAPTYEDCKKGTQKLLQELSKLGYRVSAKKAQLCQREVTYLGYLLKEGKRWLTPARKATVMKIPVPTTPRQVREFLGKAGFCRLFIPGFASLAAPLYPLTKPSIPFIWTEEHQQAFDHIKKALLSAPALALPDLTKPFTLYIDERAGVARGVLTQTLGPWRRPVAYLSKKLDPVASGWPTCLKAVAAVALLLKDADKLTLGQNVTVIASHSLESIVRQPPDRWMTNARMTHYQSLLLNERVSFAPPAVLNPATLLPVESEATPVHRCSEILAEETGTRRDLEDQPLPGVPTWYTDGSSFITEGKRRAGAPIVDGKRTVWASSLPEGTSAQKAELVALTQALRLAEGKNINIYTDSRYAFATAHIHGAIYKQRGWLTSAGKDIKNKEEILALLEAIHLPRRVAIIHCPGHQRGSNPVATGNRRADEAAKQAALSTRVLAGTTKPAGKRTADGSEFEKRTADGSEFESPKKKAKVE

SEQ ID NO: 6212 - protein, 2146 aa, synthetic construct
MPAAKRVKLDGGDKKYSIGLDIGTNSVGWAVITDEYKVPSKKFKVLGNTDRHSIKKNLIGALLFDSGETAEATRLKRTARRRYTRRKNRICYLQEIFSNEMAKVDDSFFHRLEESFLVEEDKKHERHPIFGNIVDEVAYHEKYPTIYHLRKKLVDSTDKADLRLIYLALAHMIKFRGHFLIEGDLNPDNSDVDKLFIQLVQTYNQLFEENPINASGVDAKAILSARLSKSRRLENLIAQLPGEKKNGLFGNLIALSLGLTPNFKSNFDLAEDAKLQLSKDTYDDDLDNLLAQIGDQYADLFLAAKNLSDAILLSDILRVNTEITKAPLSASMIKRYDEHHQDLTLLKALVRQQLPEKYKEIFFDQSKNGYAGYIDGGASQEEFYKFIKPILEKMDGTEELLVKLNREDLLRKQRTFDNGSIPHQIHLGELHAILRRQEDFYPFLKDNREKIEKILTFRIPYYVGPLARGNSRFAWMTRKSEETITPWNFEEVVDKGASAQSFIERMTNFDKNLPNEKVLPKHSLLYEYFTVYNELTKVKYVTEGMRKPAFLSGEQKKAIVDLLFKTNRKVTVKQLKEDYFKKIECFDSVEISGVEDRFNASLGTYHDLLKIIKDKDFLDNEENEDILEDIVLTLTLFEDREMIEERLKTYAHLFDDKVMKQLKRRRYTGWGRLSRKLINGIRDKQSGKTILDFLKSDGFANRNFMQLIHDDSLTFKEDIQKAQVSGQGDSLHEHIANLAGSPAIKKGILQTVKVVDELVKVMGRHKPENIVIEMARENQTTQKGQKNSRERMKRIEEGIKELGSQILKEHPVENTQLQNEKLYLYYLQNGRDMYVDQELDINRLSDYDVDHIVPQSFLKDDSIDNKVLTRSDKARGKSDNVPSEEVVKKMKNYWRQLLNAKLITQRKFDNLTKAERGGLSELDKAGFIKRQLVETRQITKHVAQILDSRMNTKYDENDKLIREVKVITLKSKLVSDFRKDFQFYKVREINNYHHAHDAYLNAVVGTALIKKYPKLESEFVYGDYKVYDVRKMIAKSEQEIGKATAKYFFYSNIMNFFKTEITLANGEIRKRPLIETNGETGEIVWDKGRDFATVRKVLSMPQVNIVKKTEVQTGGFSKESILPKRNSDKLIARKKDWDPKKYGGFDSPTVAYSVLVVAKVEKGKSKKLKSVKELLGITIMERSSFEKNPIDFLEAKGYKEVKKDLIIKLPKYSLFELENGRKRMLASAGELQKGNELALPSKYVNFLYLASHYEKLKGSPEDNEQKQLFVEQHKHYLDEIIEQISEFSKRVILADANLDKVLSAYNKHRDKPIREQAENIIHLFTLTNLGAPAAFKYFDTTIDRKRYTSTKEVLDATLIHQSITGLYETRIDLSQLGGDGGGGGGSGGGGSGGGGSGGGGSGGGGSGGGGSGGLLGRDLLTKLKAQIQFSTEGPQVTWEDRPAMCLVLNLEEEYRLHEKPVPPSIDPSWLQLFPMVWAEKAGMGLANQVPPVVVELKSDASPVAVRQYPMSKEAREGIRPHIQRFLDLGILVPCQSPWNTPLLPVKKPGTNDYRPVQDLREVNKRVQDIHPTVPNPYNLLSSLPPSHTWYSVLDLKDAFFCLKLHPNSQPLFAFEWRDPEKGNTGQLTWTRLPQGFKNSPTLFNEALHRDLASFRALNPQVVMLQYVDDLLVAAPTYRDCKEGTRRLLQELSKLGYRVSAKKAQLCREEVTYLGYLLKGGKRWLTPARKATVMKIPTPTTPRQVREFLGTAGFCRLWIPGFASLAAPLYPLTRPKVPFTWTEAHQEAFGRIKEALLSAPALALPDLTKPFALYVDEKEGVARGVLTQTLGPWRRPVAYLSKKLDPVASGWPTCLKAIAAVALLLKDADKLTLGQNVLVIAPHNLESIVRQPPDRWMTNARMTHYQSLLLNERVSFAPPAILNPATLLPVESDDTPIHICSEILAEETGTRPDLRDQPLPGVPAWYTDGSSFIMDGRRQAGAAIVDNKRTVWASNLPEGTSAQKAELIALTQALRLAEGKSINIYTDSRYAFATAHVHGAIYKQRGWLTSAGKDIKNKEEILALLEAIHLPKRVAIIHCPGHQRGTDPVATGNRKADEAAKQAAQSTRILTETTKNAGKRTADGSEFEKRTADGSEFESPKKKAKVE

SEQ ID NO: 6213 - protein, 2115 aa, synthetic construct
MPAAKRVKLDGGDKKYSIGLDIGTNSVGWAVITDEYKVPSKKFKVLGNTDRHSIKKNLIGALLFDSGETAEATRLKRTARRRYTRRKNRICYLQEIFSNEMAKVDDSFFHRLEESFLVEEDKKHERHPIFGNIVDEVAYHEKYPTIYHLRKKLVDSTDKADLRLIYLALAHMIKFRGHFLIEGDLNPDNSDVDKLFIQLVQTYNQLFEENPINASGVDAKAILSARLSKSRRLENLIAQLPGEKKNGLFGNLIALSLGLTPNFKSNFDLAEDAKLQLSKDTYDDDLDNLLAQIGDQYADLFLAAKNLSDAILLSDILRVNTEITKAPLSASMIKRYDEHHQDLTLLKALVRQQLPEKYKEIFFDQSKNGYAGYIDGGASQEEFYKFIKPILEKMDGTEELLVKLNREDLLRKQRTFDNGSIPHQIHLGELHAILRRQEDFYPFLKDNREKIEKILTFRIPYYVGPLARGNSRFAWMTRKSEETITPWNFEEVVDKGASAQSFIERMTNFDKNLPNEKVLPKHSLLYEYFTVYNELTKVKYVTEGMRKPAFLSGEQKKAIVDLLFKTNRKVTVKQLKEDYFKKIECFDSVEISGVEDRFNASLGTYHDLLKIIKDKDFLDNEENEDILEDIVLTLTLFEDREMIEERLKTYAHLFDDKVMKQLKRRRYTGWGRLSRKLINGIRDKQSGKTILDFLKSDGFANRNFMQLIHDDSLTFKEDIQKAQVSGQGDSLHEHIANLAGSPAIKKGILQTVKVVDELVKVMGRHKPENIVIEMARENQTTQKGQKNSRERMKRIEEGIKELGSQILKEHPVENTQLQNEKLYLYYLQNGRDMYVDQELDINRLSDYDVDHIVPQSFLKDDSIDNKVLTRSDKARGKSDNVPSEEVVKKMKNYWRQLLNAKLITQRKFDNLTKAERGGLSELDKAGFIKRQLVETRQITKHVAQILDSRMNTKYDENDKLIREVKVITLKSKLVSDFRKDFQFYKVREINNYHHAHDAYLNAVVGTALIKKYPKLESEFVYGDYKVYDVRKMIAKSEQEIGKATAKYFFYSNIMNFFKTEITLANGEIRKRPLIETNGETGEIVWDKGRDFATVRKVLSMPQVNIVKKTEVQTGGFSKESILPKRNSDKLIARKKDWDPKKYGGFDSPTVAYSVLVVAKVEKGKSKKLKSVKELLGITIMERSSFEKNPIDFLEAKGYKEVKKDLIIKLPKYSLFELENGRKRMLASAGELQKGNELALPSKYVNFLYLASHYEKLKGSPEDNEQKQLFVEQHKHYLDEIIEQISEFSKRVILADANLDKVLSAYNKHRDKPIREQAENIIHLFTLTNLGAPAAFKYFDTTIDRKRYTSTKEVLDATLIHQSITGLYETRIDLSQLGGDGGGGGGSGGGGSGGGGSGGGGSGGGGSGGGGSGGTLNLEDEYRLYETSAEPEVSPGSTWLSDFPQAWAETGGMGLAVRQAPLIIPLKATSTPVSIKQYPMSQEAKLGIKPHIQRLLDQGILVPCQSPWNTPLLPVKKPGTNDYRPVQDLREVNKRVEDIHPTVPNPYNLLSGLPPSHRWYTVLDLKDAFFCLRLHPTSQPLFAFEWRDPGMGISGQLTWTRLPQGFKNSPTLFNEALHRDLADFRIQHPDLILLQYVDDILLAATSELDCQQGTRALLLTLGNLGYRASAKKAQLCQKQVKYLGYLLKEGQRWLTEARKETVMGQPTPKTPRQLREFLGKAGFCRLFIPGFAEMAAPLYPLTKPGTLFNWGPDQQKAYQEIKQALLTAPALGLPDLTKPFELFVDEKQGYAKGVLTQKLGPWRRPVAYLSKKLDPVAAGWPPCLRMVAAIAVLRKDAGKLTMGQPLVILAPHAVEALVKQPPDRWLSNARMTHYQAMLLDTDRVQFGPVVALNPATLLPLPEEGAPHDCLEILAETHGTRPDLTDQPIPDADHTWYTDGSSFLQEGQRKAGAAVTTETEVIWARALPAGTSAQRAELIALTQALKMAEGKRLNVYTDSRYAFATAHIHGEIYRRRGWLTSEGREIKNKSEILALLKALFLPKRLSIIHCLGHQKGDSAEARGNRLADQAAREAAIKTPPDTSTLLAGKRTADGSEFEKRTADGSEFESPKKKAKVE

SEQ ID NO: 6214 - protein, 2115 aa, synthetic construct
MPAAKRVKLDGGDKKYSIGLDIGTNSVGWAVITDEYKVPSKKFKVLGNTDRHSIKKNLIGALLFDSGETAEATRLKRTARRRYTRRKNRICYLQEIFSNEMAKVDDSFFHRLEESFLVEEDKKHERHPIFGNIVDEVAYHEKYPTIYHLRKKLVDSTDKADLRLIYLALAHMIKFRGHFLIEGDLNPDNSDVDKLFIQLVQTYNQLFEENPINASGVDAKAILSARLSKSRRLENLIAQLPGEKKNGLFGNLIALSLGLTPNFKSNFDLAEDAKLQLSKDTYDDDLDNLLAQIGDQYADLFLAAKNLSDAILLSDILRVNTEITKAPLSASMIKRYDEHHQDLTLLKALVRQQLPEKYKEIFFDQSKNGYAGYIDGGASQEEFYKFIKPILEKMDGTEELLVKLNREDLLRKQRTFDNGSIPHQIHLGELHAILRRQEDFYPFLKDNREKIEKILTFRIPYYVGPLARGNSRFAWMTRKSEETITPWNFEEVVDKGASAQSFIERMTNFDKNLPNEKVLPKHSLLYEYFTVYNELTKVKYVTEGMRKPAFLSGEQKKAIVDLLFKTNRKVTVKQLKEDYFKKIECFDSVEISGVEDRFNASLGTYHDLLKIIKDKDFLDNEENEDILEDIVLTLTLFEDREMIEERLKTYAHLFDDKVMKQLKRRRYTGWGRLSRKLINGIRDKQSGKTILDFLKSDGFANRNFMQLIHDDSLTFKEDIQKAQVSGQGDSLHEHIANLAGSPAIKKGILQTVKVVDELVKVMGRHKPENIVIEMARENQTTQKGQKNSRERMKRIEEGIKELGSQILKEHPVENTQLQNEKLYLYYLQNGRDMYVDQELDINRLSDYDVDHIVPQSFLKDDSIDNKVLTRSDKARGKSDNVPSEEVVKKMKNYWRQLLNAKLITQRKFDNLTKAERGGLSELDKAGFIKRQLVETRQITKHVAQILDSRMNTKYDENDKLIREVKVITLKSKLVSDFRKDFQFYKVREINNYHHAHDAYLNAVVGTALIKKYPKLESEFVYGDYKVYDVRKMIAKSEQEIGKATAKYFFYSNIMNFFKTEITLANGEIRKRPLIETNGETGEIVWDKGRDFATVRKVLSMPQVNIVKKTEVQTGGFSKESILPKRNSDKLIARKKDWDPKKYGGFDSPTVAYSVLVVAKVEKGKSKKLKSVKELLGITIMERSSFEKNPIDFLEAKGYKEVKKDLIIKLPKYSLFELENGRKRMLASAGELQKGNELALPSKYVNFLYLASHYEKLKGSPEDNEQKQLFVEQHKHYLDEIIEQISEFSKRVILADANLDKVLSAYNKHRDKPIREQAENIIHLFTLTNLGAPAAFKYFDTTIDRKRYTSTKEVLDATLIHQSITGLYETRIDLSQLGGDGGGGGGSGGGGSGGGGSGGGGSGGGGSGGGGSGGTLNIEDEYRLHETSKGPDVPLGSTWLSDFPQAWAETGGMGLAVRQAPLIIPLKATSTPVSIKQYPMSQEARLGIKPHIQRLLDQGILVPCQSPWNTPLLPVKKPGTNDYRPVQDLREVNKRVEDIHPTVPNPYNLLSGLPPSHQWYTVLDLKDAFFCLRLHPTSQSLFAFEWRDPEMGISGQLTWTRLPQGFKNSPTLFNEALHRDLADFRIQHPDLILLQYVDDLLLAATSELDCQQGTRALLQTLGDLGYRASAKKAQICQKQVKYLGYLLKEGQRWLTEARKETVMGQPTPKTPRQLREFLGTAGFCRLWIPGFAEMAAPLYPLTKPGTLFEWGPDQQKAYQEIKQALLTAPALGLPDLTKPFELFVDEKQGYAKGVLTQKLGPWRRPVAYLSKKLDPVAAGWPPCLRMVAAIAVLTKDAGKLTMGQPLVILAPHAVEALVKQPPDRWLSNARMTHYQALLLDTDRVQFGPIVALNPATLLPLPEEGLQHDCLDILAEAHGTRPDLTDQPLPDADHTWYTDGSSFLQEGQRKAGAAVTTETEVVWAKALPAGTSAQRAELIALTQALKMAEGKKLNVYTDSRYAFATAHIHGEIYRRRGWLTSEGKEIKNKDEILALLKALFLPKRLSIIHCPGHQKGNRAEARGNRMADQAAREVATRETPETSTLLAGKRTADGSEFEKRTADGSEFESPKKKAKVE

SEQ ID NO: 6215 - protein, 2115 aa, synthetic construct
MPAAKRVKLDGGDKKYSIGLDIGTNSVGWAVITDEYKVPSKKFKVLGNTDRHSIKKNLIGALLFDSGETAEATRLKRTARRRYTRRKNRICYLQEIFSNEMAKVDDSFFHRLEESFLVEEDKKHERHPIFGNIVDEVAYHEKYPTIYHLRKKLVDSTDKADLRLIYLALAHMIKFRGHFLIEGDLNPDNSDVDKLFIQLVQTYNQLFEENPINASGVDAKAILSARLSKSRRLENLIAQLPGEKKNGLFGNLIALSLGLTPNFKSNFDLAEDAKLQLSKDTYDDDLDNLLAQIGDQYADLFLAAKNLSDAILLSDILRVNTEITKAPLSASMIKRYDEHHQDLTLLKALVRQQLPEKYKEIFFDQSKNGYAGYIDGGASQEEFYKFIKPILEKMDGTEELLVKLNREDLLRKQRTFDNGSIPHQIHLGELHAILRRQEDFYPFLKDNREKIEKILTFRIPYYVGPLARGNSRFAWMTRKSEETITPWNFEEVVDKGASAQSFIERMTNFDKNLPNEKVLPKHSLLYEYFTVYNELTKVKYVTEGMRKPAFLSGEQKKAIVDLLFKTNRKVTVKQLKEDYFKKIECFDSVEISGVEDRFNASLGTYHDLLKIIKDKDFLDNEENEDILEDIVLTLTLFEDREMIEERLKTYAHLFDDKVMKQLKRRRYTGWGRLSRKLINGIRDKQSGKTILDFLKSDGFANRNFMQLIHDDSLTFKEDIQKAQVSGQGDSLHEHIANLAGSPAIKKGILQTVKVVDELVKVMGRHKPENIVIEMARENQTTQKGQKNSRERMKRIEEGIKELGSQILKEHPVENTQLQNEKLYLYYLQNGRDMYVDQELDINRLSDYDVDHIVPQSFLKDDSIDNKVLTRSDKARGKSDNVPSEEVVKKMKNYWRQLLNAKLITQRKFDNLTKAERGGLSELDKAGFIKRQLVETRQITKHVAQILDSRMNTKYDENDKLIREVKVITLKSKLVSDFRKDFQFYKVREINNYHHAHDAYLNAVVGTALIKKYPKLESEFVYGDYKVYDVRKMIAKSEQEIGKATAKYFFYSNIMNFFKTEITLANGEIRKRPLIETNGETGEIVWDKGRDFATVRKVLSMPQVNIVKKTEVQTGGFSKESILPKRNSDKLIARKKDWDPKKYGGFDSPTVAYSVLVVAKVEKGKSKKLKSVKELLGITIMERSSFEKNPIDFLEAKGYKEVKKDLIIKLPKYSLFELENGRKRMLASAGELQKGNELALPSKYVNFLYLASHYEKLKGSPEDNEQKQLFVEQHKHYLDEIIEQISEFSKRVILADANLDKVLSAYNKHRDKPIREQAENIIHLFTLTNLGAPAAFKYFDTTIDRKRYTSTKEVLDATLIHQSITGLYETRIDLSQLGGDGGGGGGSGGGGSGGGGSGGGGSGGGGSGGGGSGGTLNIEDEHRLHETSKEPDVSLGSTWLSDFPQAWAETGGMGLAVRQAPLIIPLKATSTPVSIKQYPMSQEARLGIKPHIQRLLDQGILVPCQSPWNTPLLPVKKPGTNDYRPVQDLREVNKRVEDIHPTVPNPYNLLSGLPPSHQWYTVLDLKDAFFCLRLHPTSQPLFAFEWRDPEMGISGQLTWTRLPQGFKNSPTLFDEALHRDLADFRIQHPDLILLQYVDDLLLAATSELDCQQGTRALLQTLGNLGYRASAKKAQICQKQVKYLGYLLKEGQRWLTEARKETVMGQPTPKTPRQLREFLGTAGFCRLWIPGFAEMAAPLYPLTKTGTLFNWGPDQQKAYQEIKQALLTAPALGLPDLTKPFELFVDEKQGYAKGVLTQKLGPWRRPVAYLSKKLDPVAAGWPPCLRMVAAIAVLTKDAGKLTMGQPLVILAPHAVEALVKQPPDRWLSNARMTHYQALLLDTDRVQFGPVVALNPATLLPLPEEGLQHNCLDILAEAHGTRPDLTDQPLPDADHTWYTDGSSLLQEGQRKAGAAVTTETEVIWAKALPAGTSAQRAELIALTQALKMAEGKKLNVYTDSRYAFATAHIHGEIYRRRGLLTSEGKEIKNKDEILALLKALFLPKRLSIIHCPGHQKGHSAEARGNRMADQAARKAAITETPDTSTLLAGKRTADGSEFEKRTADGSEFESPKKKAKVE

SEQ ID NO: 6216 - protein, 2115 aa, synthetic construct; identical to SEQ ID NO: 6215

SEQ ID NO: 6217 - protein, 2115 aa, synthetic construct
MPAAKRVKLDGGDKKYSIGLDIGTNSVGWAVITDEYKVPSKKFKVLGNTDRHSIKKNLIGALLFDSGETAEATRLKRTARRRYTRRKNRICYLQEIFSNEMAKVDDSFFHRLEESFLVEEDKKHERHPIFGNIVDEVAYHEKYPTIYHLRKKLVDSTDKADLRLIYLALAHMIKFRGHFLIEGDLNPDNSDVDKLFIQLVQTYNQLFEENPINASGVDAKAILSARLSKSRRLENLIAQLPGEKKNGLFGNLIALSLGLTPNFKSNFDLAEDAKLQLSKDTYDDDLDNLLAQIGDQYADLFLAAKNLSDAILLSDILRVNTEITKAPLSASMIKRYDEHHQDLTLLKALVRQQLPEKYKEIFFDQSKNGYAGYIDGGASQEEFYKFIKPILEKMDGTEELLVKLNREDLLRKQRTFDNGSIPHQIHLGELHAILRRQEDFYPFLKDNREKIEKILTFRIPYYVGPLARGNSRFAWMTRKSEETITPWNFEEVVDKGASAQSFIERMTNFDKNLPNEKVLPKHSLLYEYFTVYNELTKVKYVTEGMRKPAFLSGEQKKAIVDLLFKTNRKVTVKQLKEDYFKKIECFDSVEISGVEDRFNASLGTYHDLLKIIKDKDFLDNEENEDILEDIVLTLTLFEDREMIEERLKTYAHLFDDKVMKQLKRRRYTGWGRLSRKLINGIRDKQSGKTILDFLKSDGFANRNFMQLIHDDSLTFKEDIQKAQVSGQGDSLHEHIANLAGSPAIKKGILQTVKVVDELVKVMGRHKPENIVIEMARENQTTQKGQKNSRERMKRIEEGIKELGSQILKEHPVENTQLQNEKLYLYYLQNGRDMYVDQELDINRLSDYDVDHIVPQSFLKDDSIDNKVLTRSDKARGKSDNVPSEEVVKKMKNYWRQLLNAKLITQRKFDNLTKAERGGLSELDKAGFIKRQLVETRQITKHVAQILDSRMNTKYDENDKLIREVKVITLKSKLVSDFRKDFQFYKVREINNYHHAHDAYLNAVVGTALIKKYPKLESEFVYGDYKVYDVRKMIAKSEQEIGKATAKYFFYSNIMNFFKTEITLANGEIRKRPLIETNGETGEIVWDKGRDFATVRKVLSMPQVNIVKKTEVQTGGFSKESILPKRNSDKLIARKKDWDPKKYGGFDSPTVAYSVLVVAKVEKGKSKKLKSVKELLGITIMERSSFEKNPIDFLEAKGYKEVKKDLIIKLPKYSLFELENGRKRMLASAGELQKGNELALPSKYVNFLYLASHYEKLKGSPEDNEQKQLFVEQHKHYLDEIIEQISEFSKRVILADANLDKVLSAYNKHRDKPIREQAENIIHLFTLTNLGAPAAFKYFDTTIDRKRYTSTKEVLDATLIHQSITGLYETRIDLSQLGGDGGGGGGSGGGGSGGGGSGGGGSGGGGSGGGGSGGTLNIEDEYRLHEISTEPDVSPGSTWLSDFPQAWAETGGMGLAVRQAPLIIPLKATSTPVSIKQYPMSQEAKLGIKPHIQRLLDQGILVPCQSPWNTPLLPVKKPGTNDYRPVQGLREVNKRVEDIHPTVPNPYNLLSGLPTSHRWYTVLDLKDAFFCLRLHPTSQPLFASEWRDPGMGISGQLTWTRLPQGFKNSPTLFNEALHRGLADFRIQHPDLILLQYVDDLLLAATSELDCQQGTRALLKTLGNLGYRASAKKAQICQKQVKYLGYLLREGQRWLTEARKETVMGQPTPKTPRQLREFLGTAGFCRLWIPRFAEMAAPLYPLTKPGTLFNWGPDQQKAYHEIKQALLTAPALGLPDLTKPFELFVDEKQGYAKGVLTQKLGPWRRPVAYLSKKLDPVAAGWPPCLRMVAAIAVLTKDAGKLTMGQPLVILAPHAVEALVKQPPDRWLSNARMTHYQAMLLDTDRVQFGPVVALNPATLLPLPEEGAPHDCLEILAETHGTEPDLTDQPIPDADHTWYTDGSSFLQEGQRKAGAAVTTETEVIWARALPAGTSAQRAELIALTQALKMAEGKRLNVYTDSRYAFATAHIHGEIYKRRGWLTSEGREIKNKSEILALLKALFLPKRLSIIHCLGHQKGDSAEARGNRLADQAAREAAIKTPPDTSTLLAGKRTADGSEFEKRTADGSEFESPKKKAKVE

SEQ ID NO: 6218 - protein, 2109 aa, synthetic construct
MPAAKRVKLDGGDKKYSIGLDIGTNSVGWAVITDEYKVPSKKFKVLGNTDRHSIKKNLIGALLFDSGETAEATRLKRTARRRYTRRKNRICYLQEIFSNEMAKVDDSFFHRLEESFLVEEDKKHERHPIFGNIVDEVAYHEKYPTIYHLRKKLVDSTDKADLRLIYLALAHMIKFRGHFLIEGDLNPDNSDVDKLFIQLVQTYNQLFEENPINASGVDAKAILSARLSKSRRLENLIAQLPGEKKNGLFGNLIALSLGLTPNFKSNFDLAEDAKLQLSKDTYDDDLDNLLAQIGDQYADLFLAAKNLSDAILLSDILRVNTEITKAPLSASMIKRYDEHHQDLTLLKALVRQQLPEKYKEIFFDQSKNGYAGYIDGGASQEEFYKFIKPILEKMDGTEELLVKLNREDLLRKQRTFDNGSIPHQIHLGELHAILRRQEDFYPFLKDNREKIEKILTFRIPYYVGPLARGNSRFAWMTRKSEETITPWNFEEVVDKGASAQSFIERMTNFDKNLPNEKVLPKHSLLYEYFTVYNELTKVKYVTEGMRKPAFLSGEQKKAIVDLLFKTNRKVTVKQLKEDYFKKIECFDSVEISGVEDRFNASLGTYHDLLKIIKDKDFLDNEENEDILEDIVLTLTLFEDREMIEERLKTYAHLFDDKVMKQLKRRRYTGWGRLSRKLINGIRDKQSGKTILDFLKSDGFANRNFMQLIHDDSLTFKEDIQKAQVSGQGDSLHEHIANLAGSPAIKKGILQTVKVVDELVKVMGRHKPENIVIEMARENQTTQKGQKNSRERMKRIEEGIKELGSQILKEHPVENTQLQNEKLYLYYLQNGRDMYVDQELDINRLSDYDVDHIVPQSFLKDDSIDNKVLTRSDKARGKSDNVPSEEVVKKMKNYWRQLLNAKLITQRKFDNLTKAERGGLSELDKAGFIKRQLVETRQITKHVAQILDSRMNTKYDENDKLIREVKVITLKSKLVSDFRKDFQFYKVREINNYHHAHDAYLNAVVGTALIKKYPKLESEFVYGDYKVYDVRKMIAKSEQEIGKATAKYFFYSNIMNFFKTEITLANGEIRKRPLIETNGETGEIVWDKGRDFATVRKVLSMPQVNIVKKTEVQTGGFSKESILPKRNSDKLIARKKDWDPKKYGGFDSPTVAYSVLVVAKVEKGKSKKLKSVKELLGITIMERSSFEKNPIDFLEAKGYKEVKKDLIIKLPKYSLFELENGRKRMLASAGELQKGNELALPSKYVNFLYLASHYEKLKGSPEDNEQKQLFVEQHKHYLDEIIEQISEFSKRVILADANLDKVLSAYNKHRDKPIREQAENIIHLFTLTNLGAPAAFKYFDTTIDRKRYTSTKEVLDATLIHQSITGLYETRIDLSQLGGDGGGGGGSGGGGSGGGGSGGGGSGGGGSGGGGSGGTLQLDDEYRLYSPLVKPDQNIQFWLEQFPQAWAETAGMGLAKQVPPQVIQLKASATPVSVRQYPLSKEAQEGIRPHVQRLIQQGILVPVQSPWNTPLLPVRKPGTNDYRPVQDLREVNKRVQDIHPTVPNPYNLLCALPPQRSWYTVLDLKDAFFCLRLHPTSQPLFAFEWRDPGTGRTGQLTWTRLPQGFKNSPTIFDEALHRDLANFRIQHPQVTLLQYVDDLLLAGATKQDCLEGTKALLLELSDLGYRASAKKAQICRREVTYLGYSLRDGQRWLTEARKKTVVQIPAPTTAKQVREFLGTAGFCRLWIPGFATLAAPLYPLTKEKGEFSWAPEHQKAFDAIKKALLSAPALALPDVTKPFTLYVDERKGVARGVLTQTLGPWRRPVAYLSKKLDPVASGWPVCLKAIAAVAILVKDADKLTLGQNITVIAPHALENIVRQPPDRWMTNARMTHYQSLLLTERVTFAPPAALNPATLLPEETDEPVTHDCHQLLIEETGVRKDLTDIPLTGEVLTWFTDGSSYVVEGKRMAGAAVVDGTRTIWASSLPEGTSAQKAELMALTQALRLAEGKSINIYTDSRYAFATAHVHGAIYKQRGLLTSAGREIKNKEEILSLLEALHLPKRLAIIHCPGHQKAKDPISRGNQMADRVAKQAAQGVNLLAGKRTADGSEFEKRTADGSEFESPKKKAKVE

SEQ ID NO: 6219 - protein, 2109 aa, synthetic construct
MPAAKRVKLDGGDKKYSIGLDIGTNSVGWAVITDEYKVPSKKFKVLGNTDRHSIKKNLIGALLFDSGETAEATRLKRTARRRYTRRKNRICYLQEIFSNEMAKVDDSFFHRLEESFLVEEDKKHERHPIFGNIVDEVAYHEKYPTIYHLRKKLVDSTDKADLRLIYLALAHMIKFRGHFLIEGDLNPDNSDVDKLFIQLVQTYNQLFEENPINASGVDAKAILSARLSKSRRLENLIAQLPGEKKNGLFGNLIALSLGLTPNFKSNFDLAEDAKLQLSKDTYDDDLDNLLAQIGDQYADLFLAAKNLSDAILLSDILRVNTEITKAPLSASMIKRYDEHHQDLTLLKALVRQQLPEKYKEIFFDQSKNGYAGYIDGGASQEEFYKFIKPILEKMDGTEELLVKLNREDLLRKQRTFDNGSIPHQIHLGELHAILRRQEDFYPFLKDNREKIEKILTFRIPYYVGPLARGNSRFAWMTRKSEETITPWNFEEVVDKGASAQSFIERMTNFDKNLPNEKVLPKHSLLYEYFTVYNELTKVKYVTEGMRKPAFLSGEQKKAIVDLLFKTNRKVTVKQLKEDYFKKIECFDSVEISGVEDRFNASLGTYHDLLKIIKDKDFLDNEENEDILEDIVLTLTLFEDREMIEERLKTYAHLFDDKVMKQLKRRRYTGWGRLSRKLINGIRDKQSGKTILDFLKSDGFANRNFMQLIHDDSLTFKEDIQKAQVSGQGDSLHEHIANLAGSPAIKKGILQTVKVVDELVKVMGRHKPENIVIEMARENQTTQKGQKNSRERMKRIEEGIKELGSQILKEHPVENTQLQNEKLYLYYLQNGRDMYVDQELDINRLSDYDVDHIVPQSFLKDDSIDNKVLTRSDKARGKSDNVPSEEVVKKMKNYWRQLLNAKLITQRKFDNLTKAERGGLSELDKAGFIKRQLVETRQITKHVAQILDSRMNTKYDENDKLIREVKVITLKSKLVSDFRKDFQFYKVREINNYHHAHDAYLNAVVGTALIKKYPKLESEFVYGDYKVYDVRKMIAKSEQEIGKATAKYFFYSNIMNFFKTEITLANGEIRKRPLIETNGETGEIVWDKGRDFATVRKVLSMPQVNIVKKTEVQTGGFSKESILPKRNSDKLIARKKDWDPKKYGGFDSPTVAYSVLVVAKVEKGKSKKLKSVKELLGITIMERSSFEKNPIDFLEAKGYKEVKKDLIIKLPKYSLFELENGRKRMLASAGELQKGNELALPSKYVNFLYLASHYEKLKGSPEDNEQKQLFVEQHKHYLDEIIEQISEFSKRVILADANLDKVLSAYNKHRDKPIREQAENIIHLFTLTNLGAPAAFKYFDTTIDRKRYTSTKEVLDATLIHQSITGLYETRIDLSQLGGDGGGGGGSGGGGSGGGGSGGGGSGGGGSGGGGSGGTLQLDDEYRLYSPLVKPDQNIQFWLEQFPQAWAETAGMGLAKQVPPQVIQLKASATPVSVRQYPLSKEAQEGIRPHVQRLIQQGILVPVQSPWNTPLLPVRKPGTNDYRPVQDLREVNKRVQDIHPTVPNPYNLLCALPPQRSWYTVLDLKDAFFCLRLHPTSQPLFAFEWRDPGTGRTGQLTWTRLPQGFKNSPTIFNEALHRDLANFRIQHPQVTLLQYVDDLLLAGATKQDCLEGTKALLLELSDLGYRASAKKAQICRREVTYLGYSLRDGQRWLTEARKKTVVQIPAPTTAKQVREFLGTAGFCRLWIPGFATLAAPLYPLTKPKGEFSWAPEHQKAFDAIKKALLSAPALALPDVTKPFTLYVDERKGVARGVLTQTLGPWRRPVAYLSKKLDPVASGWPVCLKAIAAVAILVKDADKLTLGQNITVIAPHALENIVRQPPDRWMTNARMTHYQSLLLTERVTFAPPAALNPATLLPEETDEPVTHDCHQLLIEETGVRKDLTDIPLTGEVLTWFTDGSSYVVEGKRMAGAAVVDGTRTIWASSLPEGTSAQKAELMALTQALRLAEGKSINIYTDSRYAFATAHVHGAIYKQRGWLTSAGREIKNKEEILSLLEALHLPKRLAIIHCPGHQKAKDPISRGNQMADRVAKQAAQGVNLLAGKRTADGSEFEKRTADGSEFESPKKKAKVE

SEQ ID NO: 6220 - protein, 2106 aa, synthetic construct
MPAAKRVKLDGGDKKYSIGLDIGTNSVGWAVITDEYKVPSKKFKVLGNTDRHSIKKNLIGALLFDSGETAEATRLKRTARRRYTRRKNRICYLQEIFSNEMAKVDDSFFHRLEESFLVEEDKKHERHPIFGNIVDEVAYHEKYPTIYHLRKKLVDSTDKADLRLIYLALAHMIKFRGHFLIEGDLNPDNSDVDKLFIQLVQTYNQLFEENPINASGVDAKAILSARLSKSRRLENLIAQLPGEKKNGLFGNLIALSLGLTPNFKSNFDLAEDAKLQLSKDTYDDDLDNLLAQIGDQYADLFLAAKNLSDAILLSDILRVNTEITKAPLSASMIKRYDEHHQDLTLLKALVRQQLPEKYKEIFFDQSKNGYAGYIDGGASQEEFYKFIKPILEKMDGTEELLVKLNREDLLRKQRTFDNGSIPHQIHLGELHAILRRQEDFYPFLKDNREKIEKILTFRIPYYVGPLARGNSRFAWMTRKSEETITPWNFEEVVDKGASAQSFIERMTNFDKNLPNEKVLPKHSLLYEYFTVYNELTKVKYVTEGMRKPAFLSGEQKKAIVDLLFKTNRKVTVKQLKEDYFKKIECFDSVEISGVEDRFNASLGTYHDLLKIIKDKDFLDNEENEDILEDIVLTLTLFEDREMIEERLKTYAHLFDDKVMKQLKRRRYTGWGRLSRKLINGIRDKQSGKTILDFLKSDGFANRNFMQLIHDDSLTFKEDIQKAQVSGQGDSLHEHIANLAGSPAIKKGILQTVKVVDELVKVMGRHKPENIVIEMARENQTTQKGQKNSRERMKRIEEGIKELGSQILKEHPVENTQLQNEKLYLYYLQNGRDMYVDQELDINRLSDYDVDHIVPQSFLKDDSIDNKVLTRSDKARGKSDNVPSEEVVKKMKNYWRQLLNAKLITQRKFDNLTKAERGGLSELDKAGFIKRQLVETRQITKHVAQILDSRMNTKYDENDKLIREVKVITLKSKLVSDFRKDFQFYKVREINNYHHAHDAYLNAVVGTALIKKYPKLESEFVYGDYKVYDVRKMIAKSEQEIGKATAKYFFYSNIMNFFKTEITLANGEIRKRPLIETNGETGEIVWDKGRDFATVRKVLSMPQVNIVKKTEVQTGGFSKESILPKRNSDKLIARKKDWDPKKYGGFDSPTVAYSVLVVAKVEKGKSKKLKSVKELLGITIMERSSFEKNPIDFLEAKGYKEVKKDLIIKLPKYSLFELENGRKRMLASAGELQKGNELALPSKYVNFLYLASHYEKLKGSPEDNEQKQLFVEQHKHYLDEIIEQISEFSKRVILADANLDKVLSAYNKHRDKPIREQAENIIHLFTLTNLGAPAAFKYFDTTIDRKRYTSTKEVLDATLIHQSITGLYETRIDLSQLGGDGGGGGGSGGGGSGGGGSGGGGSGGGGSGGGGSGGVPWLMKKPLQLTVLVPLHEYQERLLQQTALPKEQKELLQKLFLKYDALWQHWENQVGHRRIKPHNIATGTLAPRPQKQYPINPKAKPSIQIVIDDLLKQGVLIQQNSTMNTPVYPVPKPDGKWRMVLDYREVNKTIPLIAAQNQHSAGILSSIYRGKYKTTLDLTNGFWAHPITPESYWLTAFTWQGKQYCWTRLPQGFLNSPALFNADVVDLLKEIPNVQAYVDDIYISHDDPQEHLEQLEKIFSILLNAGYVVSLKKSEIAQREVEFLGFNITKEGRGLTDTFKQKLLNITPPKDLKQLQSILGKLNFARNFIPNYSELVKPLYTIVAPANGKFISWTEDNSNQLQHIISVLNQADNLEERNPETRLIIKVNSSPSAGYIRYYNEGSKRPIMYVNYIFSKAEAKFTQTEKLLTTMHKGLIKAMDLAMGQEILVYSPIVSMTKIQRTPLPERKALPVRWITWMTYLEDPRIQFHYDKSLPELQQIPNVTEDVIAKTKHPSEFAMVFYTDGSAIKHPDVNKSHSAGMGIAQVQFIPEYKIVHQWSIPLGDHTAQLAEIAAVEFACKKALKISGPVLIVTDSFYVAESANKELPYWKSNGFLNNKKKPLRHVSKWKSIAECLQLKPDIIIMHEKGHQQPMTTLHTEGNNLADKLATQGSYVVHAGKRTADGSEFEKRTADGSEFESPKKKAKVE

SEQ ID NO: 6221 - protein, 2195 aa, synthetic construct
MPAAKRVKLDGGDKKYSIGLDIGTNSVGWAVITDEYKVPSKKFKVLGNTDRHSIKKNLIGALLFDSGETAEATRLKRTARRRYTRRKNRICYLQEIFSNEMAKVDDSFFHRLEESFLVEEDKKHERHPIFGNIVDEVAYHEKYPTIYHLRKKLVDSTDKADLRLIYLALAHMIKFRGHFLIEGDLNPDNSDVDKLFIQLVQTYNQLFEENPINASGVDAKAILSARLSKSRRLENLIAQLPGEKKNGLFGNLIALSLGLTPNFKSNFDLAEDAKLQLSKDTYDDDLDNLLAQIGDQYADLFLAAKNLSDAILLSDILRVNTEITKAPLSASMIKRYDEHHQDLTLLKALVRQQLPEKYKEIFFDQSKNGYAGYIDGGASQEEFYKFIKPILEKMDGTEELLVKLNREDLLRKQRTFDNGSIPHQIHLGELHAILRRQEDFYPFLKDNREKIEKILTFRIPYYVGPLARGNSRFAWMTRKSEETITPWNFEEVVDKGASAQSFIERMTNFDKNLPNEKVLPKHSLLYEYFTVYNELTKVKYVTEGMRKPAFLSGEQKKAIVDLLFKTNRKVTVKQLKEDYFKKIECFDSVEISGVEDRFNASLGTYHDLLKIIKDKDFLDNEENEDILEDIVLTLTLFEDREMIEERLKTYAHLFDDKVMKQLKRRRYTGWGRLSRKLINGIRDKQSGKTILDFLKSDGFANRNFMQLIHDDSLTFKEDIQKAQVSGQGDSLHEHIANLAGSPAIKKGILQTVKVVDELVKVMGRHKPENIVIEMARENQTTQKGQKNSRERMKRIEEGIKELGSQILKEHPVENTQLQNEKLYLYYLQNGRDMYVDQELDINRLSDYDVDHIVPQSFLKDDSIDNKVLTRSDKARGKSDNVPSEEVVKKMKNYWRQLLNAKLITQRKFDNLTKAERGGLSELDKAGFIKRQLVETRQITKHVAQILDSRMNTKYDENDKLIREVKVITLKSKLVSDFRKDFQFYKVREINNYHHAHDAYLNAVVGTALIKKYPKLESEFVYGDYKVYDVRKMIAKSEQEIGKATAKYFFYSNIMNFFKTEITLANGEIRKRPLIETNGETGEIVWDKGRDFATVRKVLSMPQVNIVKKTEVQTGGFSKESILPKRNSDKLIARKKDWDPKKYGGFDSPTVAYSVLVVAKVEKGKSKKLKSVKELLGITIMERSSFEKNPIDFLEAKGYKEVKKDLIIKLPKYSLFELENGRKRMLASAGELQKGNELALPSKYVNFLYLASHYEKLKGSPEDNEQKQLFVEQHKHYLDEIIEQISEFSKRVILADANLDKVLSAYNKHRDKPIREQAENIIHLFTLTNLGAPAAFKYFDTTIDRKRYTSTKEVLDATLIHQSITGLYETRIDLSQLGGDGGGGGGSGGGGSGGGGSGGGGSGGGGSGGGGSGGMDPLQLLQPLEAEIKGTKLKAHWNSGATITCVPEAFLEDERPIQTMLIKTIHGEKQQDVYYLTFKVQGRKVEAEVLASPYDYILLNPSDVPWLMKKPLQLTVLVPLHEYQERLLQQTALPKEQKELLQKLFLKYDALWQHWENQVGHRRIKPHNIATGTLAPRPQKQYPINPKAKPSIQIVIDDLLKQGVLIQQNSTMNTPVYPVPKPDGKWRMVLDYREVNKTIPLIAAQNQHSAGILSSIYRGKYKTTLDLTNGFWAHPITPESYWLTAFTWQGKQYCWTRLPQGFLNSPALFNADVVDLLKEIPNVQAYVDDIYISHDDPQEHLEQLEKIFSILLNAGYVVSLKKSEIAQREVEFLGFNITKEGRGLTDTFKQKLLNITPPKDLKQLQSILGLLNFARNFIPNYSELVKPLYTIVAPANGKFISWTEDNSNQLQHIISVLNQADNLEERNPETRLIIKVNSSPSAGYIRYYNEGSKRPIMYVNYIFSKAEAKFTQTEKLLTTMHKGLIKAMDLAMGQEILVYSPIVSMTKIQRTPLPERKALPVRWITWMTYLEDPRIQFHYDKSLPELQQIPNVTEDVIAKTKHPSEFAMVFYTDGSAIKHPDVNKSHSAGMGIAQVQFIPEYKIVHQWSIPLGDHTAQLAEIAAVEFACKKALKISGPVLIVTDSFYVAESANKELPYWKSNGFLNNKKKPLRHVSKWKSIAECLQLKPDIIIMHEKGHQQPMTTLHTEGNNLADKLATQGSYVVHAGKRTADGSEFEKRTADGSEFESPKKKAKVE

SEQ ID NO: 6222 - protein, 2195 aa, synthetic construct
MPAAKRVKLDGGDKKYSIGLDIGTNSVGWAVITDEYKVPSKKFKVLGNTDRHSIKKNLIGALLFDSGETAEATRLKRTARRRYTRRKNRICYLQEIFSNEMAKVDDSFFHRLEESFLVEEDKKHERHPIFGNIVDEVAYHEKYPTIYHLRKKLVDSTDKADLRLIYLALAHMIKFRGHFLIEGDLNPDNSDVDKLFIQLVQTYNQLFEENPINASGVDAKAILSARLSKSRRLENLIAQLPGEKKNGLFGNLIALSLGLTPNFKSNFDLAEDAKLQLSKDTYDDDLDNLLAQIGDQYADLFLAAKNLSDAILLSDILRVNTEITKAPLSASMIKRYDEHHQDLTLLKALVRQQLPEKYKEIFFDQSKNGYAGYIDGGASQEEFYKFIKPILEKMDGTEELLVKLNREDLLRKQRTFDNGSIPHQIHLGELHAILRRQEDFYPFLKDNREKIEKILTFRIPYYVGPLARGNSRFAWMTRKSEETITPWNFEEVVDKGASAQSFIERMTNFDKNLPNEKVLPKHSLLYEYFTVYNELTKVKYVTEGMRKPAFLSGEQKKAIVDLLFKTNRKVTVKQLKEDYFKKIECFDSVEISGVEDRFNASLGTYHDLLKIIKDKDFLDNEENEDILEDIVLTLTLFEDREMIEERLKTYAHLFDDKVMKQLKRRRYTGWGRLSRKLINGIRDKQSGKTILDFLKSDGFANRNFMQLIHDDSLTFKEDIQKAQVSGQGDSLHEHIANLAGSPAIKKGILQTVKVVDELVKVMGRHKPENIVIEMARENQTTQKGQKNSRERMKRIEEGIKELGSQILKEHPVENTQLQNEKLYLYYLQNGRDMYVDQELDINRLSDYDVDHIVPQSFLKDDSIDNKVLTRSDKARGKSDNVPSEEVVKKMKNYWRQLLNAKLITQRKFDNLTKAERGGLSELDKAGFIKRQLVETRQITKHVAQILDSRMNTKYDENDKLIREVKVITLKSKLVSDFRKDFQFYKVREINNYHHAHDAYLNAVVGTALIKKYPKLESEFVYGDYKVYDVRKMIAKSEQEIGKATAKYFFYSNIMNFFKTEITLANGEIRKRPLIETNGETGEIVWDKGRDFATVRKVLSMPQVNIVKKTEVQTGGFSKESILPKRNSDKLIARKKDWDPKKYGGFDSPTVAYSVLVVAKVEKGKSKKLKSVKELLGITIMERSSFEKNPIDFLEAKGYKEVKKDLIIKLPKYSLFELENGRKRMLASAGELQKGNELALPSKYVNFLYLASHYEKLKGSPEDNEQKQLFVEQHKHYLDEIIEQISEFSKRVILADANLDKVLSAYNKHRDKPIREQAENIIHLFTLTNLGAPAAFKYFDTTIDRKRYTSTKEVLDATLIHQSITGLYETRIDLSQLGGDGGGGGGSGGGGSGGGGSGGGGSGGGGSGGGGSGGMDPLQLLQPLEAEIKGTKLKAHWNSGATITCVPQAFLEEEVPIKNIWIKTIHGEKEQPVYYLTFKIQGRKVEAEVISSPYDYILVSPSDIPWLMKKPLQLTTLVPLQEYEERLLKQTMLTGSYKEKLQSLFLKYDALWQHWENQVGHRRIKPHHIATGTVNPRPQKQYPINPKAKASIQTVINDLLKQGVLIQQNSIMNTPVYPVPKPDGKWRMVLDYREVNKTIPLIAAQNQHSAGILSSIFRGKYKTTLDLSNGFWAHSITPESYWLTAFTWLGQQYCWTRLPQGFLNSPALFTADVVDLLKEVPNVQVYVDDIYISHDDPREHLEQLEKVFSLLLNAGYVVSLKKSEIAQHEVEFLGFNITKEGRGLTETFKQKLLNITPPRDLKQLQSILGLLNFARNFIPNFSELVKPLYNIIATANGKYITWTTDNSQQLQNIISMLNSAENLEERNPEVRLIMKVNTSPSAGYIRFYNEFAKRPIMYLNYVYTKAEVKFTNTEKLLTTIHKGLIKALDLGMGQEILVYSPIVSMTKIQKTPLPERKALPIRWITWMSYLEDPRIQFHYDKTLPELQQVPTVTDDIIAKIKHPSEFSMVFYTDGSAIKHPNVNKSHNAGMGIAQVQFKPEFTVINTWSIPLGDHTAQLAEVAAVEFACKKALKIDGPVLIVTDSFYVAESVNKELPYWQSNGFFNNKKKPLKHVSKWKSIADCIQLKPDIIIIHEKGHQPTASTFHTEGNNLADKLATQGSYVVNAGKRTADGSEFEKRTADGSEFESPKKKAKVE

SEQ ID NO: 6223 - protein, 2106 aa, synthetic construct
MPAAKRVKLDGGDKKYSIGLDIGTNSVGWAVITDEYKVPSKKFKVLGNTDRHSIKKNLIGALLFDSGETAEATRLKRTARRRYTRRKNRICYLQEIFSNEMAKVDDSFFHRLEESFLVEEDKKHERHPIFGNIVDEVAYHEKYPTIYHLRKKLVDSTDKADLRLIYLALAHMIKFRGHFLIEGDLNPDNSDVDKLFIQLVQTYNQLFEENPINASGVDAKAILSARLSKSRRLENLIAQLPGEKKNGLFGNLIALSLGLTPNFKSNFDLAEDAKLQLSKDTYDDDLDNLLAQIGDQYADLFLAAKNLSDAILLSDILRVNTEITKAPLSASMIKRYDEHHQDLTLLKALVRQQLPEKYKEIFFDQSKNGYAGYIDGGASQEEFYKFIKPILEKMDGTEELLVKLNREDLLRKQRTFDNGSIPHQIHLGELHAILRRQEDFYPFLKDNREKIEKILTFRIPYYVGPLARGNSRFAWMTRKSEETITPWNFEEVVDKGASAQSFIERMTNFDKNLPNEKVLPKHSLLYEYFTVYNELTKVKYVTEGMRKPAFLSGEQKKAIVDLLFKTNRKVTVKQLKEDYFKKIECFDSVEISGVEDRFNASLGTYHDLLKIIKDKDFLDNEENEDILEDIVLTLTLFEDREMIEERLKTYAHLFDDKVMKQLKRRRYTGWGRLSRKLINGIRDKQSGKTILDFLKSDGFANRNFMQLIHDDSLTFKEDIQKAQVSGQGDSLHEHIANLAGSPAIKKGILQTVKVVDELVKVMGRHKPENIVIEMARENQTTQKGQKNSRERMKRIEEGIKELGSQILKEHPVENTQLQNEKLYLYYLQNGRDMYVDQELDINRLSDYDVDHIVPQSFLKDDSIDNKVLTRSDKARGKSDNVPSEEVVKKMKNYWRQLLNAKLITQRKFDNLTKAERGGLSELDKAGFIKRQLVETRQITKHVAQILDSRMNTKYDENDKLIREVKVITLKSKLVSDFRKDFQFYKVREINNYHHAHDAYLNAVVGTALIKKYPKLESEFVYGDYKVYDVRKMIAKSEQEIGKATAKYFFYSNIMNFFKTEITLANGEIRKRPLIETNGETGEIVWDKGRDFATVRKVLSMPQVNIVKKTEVQTGGFSKESILPKRNSDKLIARKKDWDPKKYGGFDSPTVAYSVLVVAKVEKGKSKKLKSVKELLGITIMERSSFEKNPIDFLEAKGYKEVKKDLIIKLPKYSLFELENGRKRMLASAGELQKGNELALPSKYVNFLYLASHYEKLKGSPEDNEQKQLFVEQHKHYLDEIIEQISEFSKRVILADANLDKVLSAYNKHRDKPIREQAENIIHLFTLTNLGAPAAFKYFDTTIDRKRYTSTKEVLDATLIHQSITGLYETRIDLSQLGGDGGGGGGSGGGGSGGGGSGGGGSGGGGSGGGGSGGIPWLMKKPLQLTTLVPLQEYEERLLKQTMLTGSYKEKLQSLFLKYDALWQHWENQVGHRRIKPHHIATGTVNPRPQKQYPINPKAKASIQTVINDLLKQGVLIQQNSIMNTPVYPVPKPDGKWRMVLDYREVNKTIPLIAAQNQHSAGILSSIFRGKYKTTLDLSNGFWAHSITPESYWLTAFTWLGQQYCWTRLPQGFLNSPALFNADVVDLLKEVPNVQVYVDDIYISHDDPREHLEQLEKVFSLLLNAGYVVSLKKSEIAQHEVEFLGFNITKEGRGLTETFKQKLLNITPPRDLKQLQSILGKLNFARNFIPNFSELVKPLYNIIATAPGKYITWTTDNSQQLQNIISMLNSAENLEERNPEVRLIMKVNTSPSAGYIRFYNEFAKRPIMYLNYVYTKAEVKFTNTEKLLTTIHKGLIKALDLGMGQEILVYSPIVSMTKIQKTPLPERKALPIRWITWMSYLEDPRIQFHYDKTLPELQQVPTVTDDIIAKIKHPSEFSMVFYTDGSAIKHPNVNKSHNAGMGIAQVQFKPEFTVINTWSIPLGDHTAQLAEVAAVEFACKKALKIDGPVLIVTDSFYVAESVNKELPYWQSNGFFNNKKKPLKHVSKWKSIADCIQLKPDIIIIHEKGHQPTASTFHTEGNNLADKLATQGSYVVNAGKRTADGSEFEKRTADGSEFESPKKKAKVE

SEQ ID NO: 6224 - protein, 2106 aa, synthetic construct
MPAAKRVKLDGGDKKYSIGLDIGTNSVGWAVITDEYKVPSKKFKVLGNTDRHSIKKNLIGALLFDSGETAEATRLKRTARRRYTRRKNRICYLQEIFSNEMAKVDDSFFHRLEESFLVEEDKKHERHPIFGNIVDEVAYHEKYPTIYHLRKKLVDSTDKADLRLIYLALAHMIKFRGHFLIEGDLNPDNSDVDKLFIQLVQTYNQLFEENPINASGVDAKAILSARLSKSRRLENLIAQLPGEKKNGLFGNLIALSLGLTPNFKSNFDLAEDAKLQLSKDTYDDDLDNLLAQIGDQYADLFLAAKNLSDAILLSDILRVNTEITKAPLSASMIKRYDEHHQDLTLLKALVRQQLPEKYKEIFFDQSKNGYAGYIDGGASQEEFYKFIKPILEKMDGTEELLVKLNREDLLRKQRTFDNGSIPHQIHLGELHAILRRQEDFYPFLKDNREKIEKILTFRIPYYVGPLARGNSRFAWMTRKSEETITPWNFEEVVDKGASAQSFIERMTNFDKNLPNEKVLPKHSLLYEYFTVYNELTKVKYVTEGMRKPAFLSGEQKKAIVDLLFKTNRKVTVKQLKEDYFKKIECFDSVEISGVEDRFNASLGTYHDLLKIIKDKDFLDNEENEDILEDIVLTLTLFEDREMIEERLKTYAHLFDDKVMKQLKRRRYTGWGRLSRKLINGIRDKQSGKTILDFLKSDGFANRNFMQLIHDDSLTFKEDIQKAQVSGQGDSLHEHIANLAGSPAIKKGILQTVKVVDELVKVMGRHKPENIVIEMARENQTTQKGQKNSRERMKRIEEGIKELGSQILKEHPVENTQLQNEKLYLYYLQNGRDMYVDQELDINRLSDYDVDHIVPQSFLKDDSIDNKVLTRSDKARGKSDNVPSEEVVKKMKNYWRQLLNAKLITQRKFDNLTKAERGGLSELDKAGFIKRQLVETRQITKHVAQILDSRMNTKYDENDKLIREVKVITLKSKLVSDFRKDFQFYKVREINNYHHAHDAYLNAVVGTALIKKYPKLESEFVYGDYKVYDVRKMIAKSEQEIGKATAKYFFYSNIMNFFKTEITLANGEIRKRPLIETNGETGEIVWDKGRDFATVRKVLSMPQVNIVKKTEVQTGGFSKESILPKRNSDKLIARKKDWDPKKYGGFDSPTVAYSVLVVAKVEKGKSKKLKSVKELLGITIMERSSFEKNPIDFLEAKGYKEVKKDLIIKLPKYSLFELENGRKRMLASAGELQKGNELALPSKYVNFLYLASHYEKLKGSPEDNEQKQLFVEQHKHYLDEIIEQISEFSKRVILADANLDKVLSAYNKHRDKPIREQAENIIHLFTLTNLGAPAAFKYFDTTIDRKRYTSTKEVLDATLIHQSITGLYETRIDLSQLGGDGGGGGGSGGGGSGGGGSGGGGSGGGGSGGGGSGGVPWLTQQPLQLTILVPLQEYQDRILNKTALPEEQKQQLKALFTKYDNLWQHWENQVGHRKIRPHNIATGDYPPRPQKQYPINPKAKPSIQIVIDDLLKQGVLTPQNSTMNTPVYPVPKPDGRWRMVLDYREVNKTIPLTAAQNQHSAGILATIVRQKYKTTLDLANGFWAHPITPDSYWLTAFTWQGKQYCWTRLPQGFLNSPALFNADAVDLLKEVPNVQVYVDDIYLSHDNPHEHIQQLEKVFQILLQAGYVVSLKKSEIGQRTVEFLGFNITKEGRGLTDTFKTKLLNVTPPKDLKQLQSILGKLNFARNFIPNFAELVQTLYNLIASSPGKYIEWTEDNTKQLNKVIEALNTASNLEERLPDQRLVIKVNTSPSAGYVRYYNESGKKPIMYLNYVFSKAELKFSMLEKLLTTMHKALIKAMDLAMGQEILVYSPIVSMTKIQKTPLPERKALPIRWITWMTYLEDPRIQFHYDKTLPELKHIPDVYTSSIPPLKHPSQYEGVFCTDGSAIKSPDPTKSNNAGMGIVHAIYNPEYKILNQWSIPLGHHTAQMAEIAAVEFACKKALKVPGPVLVITDSFYVAESANKELPYWKSNGFVNNKKEPLKHISKWKSIAECLSIKPDITIQHEKGHQPINTSIHTEGNALADKLATQGSYVVNAGKRTADGSEFEKRTADGSEFESPKKKAKVE

SEQ ID NO: 6225 - protein, 2113 aa, synthetic construct
MPAAKRVKLDGGDKKYSIGLDIGTNSVGWAVITDEYKVPSKKFKVLGNTDRHSIKKNLIGALLFDSGETAEATRLKRTARRRYTRRKNRICYLQEIFSNEMAKVDDSFFHRLEESFLVEEDKKHERHPIFGNIVDEVAYHEKYPTIYHLRKKLVDSTDKADLRLIYLALAHMIKFRGHFLIEGDLNPDNSDVDKLFIQLVQTYNQLFEENPINASGVDAKAILSARLSKSRRLENLIAQLPGEKKNGLFGNLIALSLGLTPNFKSNFDLAEDAKLQLSKDTYDDDLDNLLAQIGDQYADLFLAAKNLSDAILLSDILRVNTEITKAPLSASMIKRYDEHHQDLTLLKALVRQQLPEKYKEIFFDQSKNGYAGYIDGGASQEEFYKFIKPILEKMDGTEELLVKLNREDLLRKQRTFDNGSIPHQIHLGELHAILRRQEDFYPFLKDNREKIEKILTFRIPYYVGPLARGNSRFAWMTRKSEETITPWNFEEVVDKGASAQSFIERMTNFDKNLPNEKVLPKHSLLYEYFTVYNELTKVKYVTEGMRKPAFLSGEQKKAIVDLLFKTNRKVTVKQLKEDYFKKIECFDSVEISGVEDRFNASLGTYHDLLKIIKDKDFLDNEENEDILEDIVLTLTLFEDREMIEERLKTYAHLFDDKVMKQLKRRRYTGWGRLSRKLINGIRDKQSGKTILDFLKSDGFANRNFMQLIHDDSLTFKEDIQKAQVSGQGDSLHEHIANLAGSPAIKKGILQTVKVVDELVKVMGRHKPENIVIEMARENQTTQKGQKNSRERMKRIEEGIKELGSQILKEHPVENTQLQNEKLYLYYLQNGRDMYVDQELDINRLSDYDVDHIVPQSFLKDDSIDNKVLTRSDKARGKSDNVPSEEVVKKMKNYWRQLLNAKLITQRKFDNLTKAERGGLSELDKAGFIKRQLVETRQITKHVAQILDSRMNTKYDENDKLIREVKVITLKSKLVSDFRKDFQFYKVREINNYHHAHDAYLNAVVGTALIKKYPKLESEFVYGDYKVYDVRKMIAKSEQEIGKATAKYFFYSNIMNFFKTEITLANGEIRKRPLIETNGETGEIVWDKGRDFATVRKVLSMPQVNIVKKTEVQTGGFSKESILPKRNSDKLIARKKDWDPKKYGGFDSPTVAYSVLVVAKVEKGKSKKLKSVKELLGITIMERSSFEKNPIDFLEAKGYKEVKKDLIIKLPKYSLFELENGRKRMLASAGELQKGNELALPSKYVNFLYLASHYEKLKGSPEDNEQKQLFVEQHKHYLDEIIEQISEFSKRVILADANLDKVLSAYNKHRDKPIREQAENIIHLFTLTNLGAPAAFKYFDTTIDRKRYTSTKEVLDATLIHQSITGLYETRIDLSQLGGDGGGGGGSGGGGSGGGGSGGGGSGGGGSGGGGSGGVLNLEEEYRLHEKPVPSSIDPSWLQLFPTVWAERAGMGLANQVPPVVVELRSGASPVAVRQYPMSKEAREGIRPHIQRFLDLGVLVPCQSPWNTPLLPVKKPGTNDYRPVQDLREINKRVQDIHPTVPNPYNLLSSLPPSHTWYSVLDLKDAFFCLKLHPNSQPLFAFEWRDPEKGNTGQLTWTRLPQGFKNSPTLFNEALHRDLAPFRALNPQVVLLQYVDDLLVAAPTYRDCKEGTQKLLQELSKLGYRVSAKKAQLCQKEVTYLGYLLKEGKRWLTPARKATVMKIPPPTTPRQVREFLGTAGFCRLWIPGFASLAAPLYPLTKPSIPFIWTEEHQKAFDRIKEALLSAPALALPDLTKPFTLYVDERAGVARGVLTQTLGPWRRPVAYLSKKLDPVASGWPTCLKAVAAVALLLKDADKLTLGQNVTVIASHSLESIVRQPPDRWMTNARMTHYQSLLLNERVSFAPPAVLNPATLLPVESEATPVHRCSEILAEETGTRRDLKDQPLPGVPAWYTDGSSFIAEGKRRAGAAIVDGKRTVWASSLPEGTSAQKAELVALTQALRLAEGKDINIYTDSRYAFATAHIHGAIYKQRGWLTSAGKDIKNKEEILALLEAIHLPKRVAIIHCPGHQKGNDPVATGNRRADEAAKQAALSTRVLAETTKPAGKRTADGSEFEKRTADGSEFESPKKKAKVE

SEQ ID NO: 6226 - protein, 2113 aa, synthetic construct
MPAAKRVKLDGGDKKYSIGLDIGTNSVGWAVITDEYKVPSKKFKVLGNTDRHSIKKNLIGALLFDSGETAEATRLKRTARRRYTRRKNRICYLQEIFSNEMAKVDDSFFHRLEESFLVEEDKKHERHPIFGNIVDEVAYHEKYPTIYHLRKKLVDSTDKADLRLIYLALAHMIKFRGHFLIEGDLNPDNSDVDKLFIQLVQTYNQLFEENPINASGVDAKAILSARLSKSRRLENLIAQLPGEKKNGLFGNLIALSLGLTPNFKSNFDLAEDAKLQLSKDTYDDDLDNLLAQIGDQYADLFLAAKNLSDAILLSDILRVNTEITKAPLSASMIKRYDEHHQDLTLLKALVRQQLPEKYKEIFFDQSKNGYAGYIDGGASQEEFYKFIKPILEKMDGTEELLVKLNREDLLRKQRTFDNGSIPHQIHLGELHAILRRQEDFYPFLKDNREKIEKILTFRIPYYVGPLARGNSRFAWMTRKSEETITPWNFEEVVDKGASAQSFIERMTNFDKNLPNEKVLPKHSLLYEYFTVYNELTKVKYVTEGMRKPAFLSGEQKKAIVDLLFKTNRKVTVKQLKEDYFKKIECFDSVEISGVEDRFNASLGTYHDLLKIIKDKDFLDNEENEDILEDIVLTLTLFEDREMIEERLKTYAHLFDDKVMKQLKRRRYTGWGRLSRKLINGIRDKQSGKTILDFLKSDGFANRNFMQLIHDDSLTFKEDIQKAQVSGQGDSLHEHIANLAGSPAIKKGILQTVKVVDELVKVMGRHKPENIVIEMARENQTTQKGQKNSRERMKRIEEGIKELGSQILKEHPVENTQLQNEKLYLYYLQNGRDMYVDQELDINRLSDYDVDHIVPQSFLKDDSIDNKVLTRSDKARGKSDNVPSEEVVKKMKNYWRQLLNAKLITQRKFDNLTKAERGGLSELDKAGFIKRQLVETRQITKHVAQILDSRMNTKYDENDKLIREVKVITLKSKLVSDFRKDFQFYKVREINNYHHAHDAYLNAVVGTALIKKYPKLESEFVYGDYKVYDVRKMIAKSEQEIGKATAKYFFYSNIMNFFKTEITLANGEIRKRPLIETNGETGEIVWDKGRDFATVRKVLSMPQVNIVKKTEVQTGGFSKESILPKRNSDKLIARKKDWDPKKYGGFDSPTVAYSVLVVAKVEKGKSKKLKSVKELLGITIMERSSFEKNPIDFLEAKGYKEVKKDLIIKLPKYSLFELENGRKRMLASAGELQKGNELALPSKYVNFLYLASHYEKLKGSPEDNEQKQLFVEQHKHYLDEIIEQISEFSKRVILADANLDKVLSAYNKHRDKPIREQAENIIHLFTLTNLGAPAAFKYFDTTIDRKRYTSTKEVLDATLIHQSITGLYETRIDLSQLGGDGGGGGGSGGGGSGGGGSGGGGSGGGGSGGGGSGGVLNLEEEYRLHEKPVPSSIDPSWLQLFPTVWAERAGMGLANQVPPVVVELRSGASPVAVRQYPMSKEAREGIRPHIQRFLDLGVLVPCQSPWNTPLLPVKKPGTNDYRPVQDLREINKRVQDIHPTVPNPYNLLSSLPPSHTWYSVLDLKDAFFCLKLHPNSQPLFAFEWRDPEKGNTGQLTWTRLPQGFKNSPTLFNEALHRDLAPFRALNPQVVLLQYVDDLLVAAPTYRDCKEGTQKLLQELSKLGYRVSAKKAQLCQKEVTYLGYLLKEGKRWLTPARKATVMKIPPPTTPRQVREFLGKAGFCRLFIPGFASLAAPLYPLTKPSIPFIWTEEHQKAFDRIKEALLSAPALALPDLTKPFTLYVDERAGVARGVLTQTLGPWRRPVAYLSKKLDPVASGWPTCLKAVAAVALLLKDADKLTLGQNVTVIASHSLESIVRQPPDRWMTNARMTHYQSLLLNERVSFAPPAVLNPATLLPVESEATPVHRCSEILAEETGTRRDLKDQPLPGVPAWYTDGSSFIAEGKRRAGAAIVDGKRTVWASSLPEGTSAQKAELVALTQALRLAEGKDINIYTDSRYAFATAHIHGAIYKQRGWLTSAGKDIKNKEEILALLEAIHLPKRVAIIHCPGHQKGNDPVATGNRRADEAAKQAALSTRVLAETTKPAGKRTADGSEFEKRTADGSEFESPKKKAKVE

SEQ ID NO: 6227 - protein, 2090 aa, synthetic construct
MPAAKRVKLDGGDKKYSIGLDIGTNSVGWAVITDEYKVPSKKFKVLGNTDRHSIKKNLIGALLFDSGETAEATRLKRTARRRYTRRKNRICYLQEIFSNEMAKVDDSFFHRLEESFLVEEDKKHERHPIFGNIVDEVAYHEKYPTIYHLRKKLVDSTDKADLRLIYLALAHMIKFRGHFLIEGDLNPDNSDVDKLFIQLVQTYNQLFEENPINASGVDAKAILSARLSKSRRLENLIAQLPGEKKNGLFGNLIALSLGLTPNFKSNFDLAEDAKLQLSKDTYDDDLDNLLAQIGDQYADLFLAAKNLSDAILLSDILRVNTEITKAPLSASMIKRYDEHHQDLTLLKALVRQQLPEKYKEIFFDQSKNGYAGYIDGGASQEEFYKFIKPILEKMDGTEELLVKLNREDLLRKQRTFDNGSIPHQIHLGELHAILRRQEDFYPFLKDNREKIEKILTFRIPYYVGPLARGNSRFAWMTRKSEETITPWNFEEVVDKGASAQSFIERMTNFDKNLPNEKVLPKHSLLYEYFTVYNELTKVKYVTEGMRKPAFLSGEQKKAIVDLLFKTNRKVTVKQLKEDYFKKIECFDSVEISGVEDRFNASLGTYHDLLKIIKDKDFLDNEENEDILEDIVLTLTLFEDREMIEERLKTYAHLFDDKVMKQLKRRRYTGWGRLSRKLINGIRDKQSGKTILDFLKSDGFANRNFMQLIHDDSLTFKEDIQKAQVSGQGDSLHEHIANLAGSPAIKKGILQTVKVVDELVKVMGRHKPENIVIEMARENQTTQKGQKNSRERMKRIEEGIKELGSQILKEHPVENTQLQNEKLYLYYLQNGRDMYVDQELDINRLSDYDVDHIVPQSFLKDDSIDNKVLTRSDKARGKSDNVPSEEVVKKMKNYWRQLLNAKLITQRKFDNLTKAERGGLSELDKAGFIKRQLVETRQITKHVAQILDSRMNTKYDENDKLIREVKVITLKSKLVSDFRKDFQFYKVREINNYHHAHDAYLNAVVGTALIKKYPKLESEFVYGDYKVYDVRKMIAKSEQEIGKATAKYFFYSNIMNFFKTEITLANGEIRKRPLIETNGETGEIVWDKGRDFATVRKVLSMPQVNIVKKTEVQTGGFSKESILPKRNSDKLIARKKDWDPKKYGGFDSPTVAYSVLVVAKVEKGKSKKLKSVKELLGITIMERSSFEKNPIDFLEAKGYKEVKKDLIIKLPKYSLFELENGRKRMLASAGELQKGNELALPSKYVNFLYLASHYEKLKGSPEDNEQKQLFVEQHKHYLDEIIEQISEFSKRVILADANLDKVLSAYNKHRDKPIREQAENIIHLFTLTNLGAPAAFKYFDTTIDRKRYTSTKEVLDATLIHQSITGLYETRIDLSQLGGDGGGGGGGTAPLEEEYRLFLEAPIQNVTLLEQWKREIPKVWAEINPPGLASTQAPIHVQLLSTALPVRVRQYPITLEAKRSLRETIRKFRAAGILRPVHSPWNTPLLPVRKSGTSEYRMVQDLREVNKRVETIHPTVPNPYTLLSLLPPDRIWYSVLDLKDAFFCIPLAPESQLIFAFEWADAEEGESGQLTWTRLPQGFKNSPTLFNEALNRDLQGFRLDHPSVSLLQYVDDLLIAADTQAACLSATRDLLMTLAELGYRVSGKKAQLCQEEVTYLGFKIHKGSRSLSNSRTQAILQIPVPKTKRQVREFLGTIGYCRLWIPGFAELAQPLYAATRPGNDPLVWGEKEEEAFQSLKLALTQPPALALPSLDKPFQLFVEETSGAAKGVLTQALGPWKRPVAYLSKRLDPVAAGWPRCLRAIAAAALLTREASKLTFGQDIEITSSHNLESLLRSPPDKWLTNARITQYQVLLLDPPRVRFKQTAALNPATLLPETDDTLPIHHCLDTLDSLTSTRPDLTDQPLAQAEATLFTDGSSYIRDGKRYAGAAVVTLDSVIWAEPLPIGTSAQKAELIALTKALEWSKDKSVNIYTDSRYAFATLHVHGMIYRERGWLTAGGKAIKNAPEILALLTAVWLPKRVAVMHCKGHQKDDAPTSTGNRRADEVAREVAIRPLSTQATISAGKRTADGSEFEKRTADGSEFESPKKKAKVE

SEQ ID NO: 6228 - protein, 2094 aa, synthetic construct
MPAAKRVKLDGGDKKYSIGLDIGTNSVGWAVITDEYKVPSKKFKVLGNTDRHSIKKNLIGALLFDSGETAEATRLKRTARRRYTRRKNRICYLQEIFSNEMAKVDDSFFHRLEESFLVEEDKKHERHPIFGNIVDEVAYHEKYPTIYHLRKKLVDSTDKADLRLIYLALAHMIKFRGHFLIEGDLNPDNSDVDKLFIQLVQTYNQLFEENPINASGVDAKAILSARLSKSRRLENLIAQLPGEKKNGLFGNLIALSLGLTPNFKSNFDLAEDAKLQLSKDTYDDDLDNLLAQIGDQYADLFLAAKNLSDAILLSDILRVNTEITKAPLSASMIKRYDEHHQDLTLLKALVRQQLPEKYKEIFFDQSKNGYAGYIDGGASQEEFYKFIKPILEKMDGTEELLVKLNREDLLRKQRTFDNGSIPHQIHLGELHAILRRQEDFYPFLKDNREKIEKILTFRIPYYVGPLARGNSRFAWMTRKSEETITPWNFEEVVDKGASAQSFIERMTNFDKNLPNEKVLPKHSLLYEYFTVYNELTKVKYVTEGMRKPAFLSGEQKKAIVDLLFKTNRKVTVKQLKEDYFKKIECFDSVEISGVEDRFNASLGTYHDLLKIIKDKDFLDNEENEDILEDIVLTLTLFEDREMIEERLKTYAHLFDDKVMKQLKRRRYTGWGRLSRKLINGIRDKQSGKTILDFLKSDGFANRNFMQLIHDDSLTFKEDIQKAQVSGQGDSLHEHIANLAGSPAIKKGILQTVKVVDELVKVMGRHKPENIVIEMARENQTTQKGQKNSRERMKRIEEGIKELGSQILKEHPVENTQLQNEKLYLYYLQNGRDMYVDQELDINRLSDYDVDHIVPQSFLKDDSIDNKVLTRSDKARGKSDNVPSEEVVKKMKNYWRQLLNAKLITQRKFDNLTKAERGGLSELDKAGFIKRQLVETRQITKHVAQILDSRMNTKYDENDKLIREVKVITLKSKLVSDFRKDFQFYKVREINNYHHAHDAYLNAVVGTALIKKYPKLESEFVYGDYKVYDVRKMIAKSEQEIGKATAKYFFYSNIMNFFKTEITLANGEIRKRPLIETNGETGEIVWDKGRDFATVRKVLSMPQVNIVKKTEVQTGGFSKESILPKRNSDKLIARKKDWDPKKYGGFDSPTVAYSVLVVAKVEKGKSKKLKSVKELLGITIMERSSFEKNPIDFLEAKGYKEVKKDLIIKLPKYSLFELENGRKRMLASAGELQKGNELALPSKYVNFLYLASHYEKLKGSPEDNEQKQLFVEQHKHYLDEIIEQISEFSKRVILADANLDKVLSAYNKHRDKPIREQAENIIHLFTLTNLGAPAAFKYFDTTIDRKRYTSTKEVLDATLIHQSITGLYETRIDLSQLGGDGGGGGGGTVSLQDEHRLFDIPVTTSLPDVWLQDFPQAWAETGGLGRAKCQAPIIIDLKPTAVPVSIKQYPMSLEAHMGIRQHIIKFLELGVLRPCRSPWNTPLLPVKKPGTQDYRPVQDLREINKRTVDIHPTVPNPYNLLSTLKPDYSWYTVLDLKDAFFCLPLAPQSQELFAFEWKDPERGISGQLTWTRLPQGFKNSPTLFNEALHRDLTDFRTQHPEVTLLQYVDDLLLAAPTKKACTQGTRHLLQELGEKGYRASAKKAQICQTKVTYLGYILSEGKRWLTPGRIETVARIPPPRNPREVREFLGTAGFCRLWIPGFAELAAPLYALTKPSTPFTWQTEHQLAFEALKKALLSAPALGLPDTSKPFTLFLDERQGIAKGVLTQKLGPWKRPVAYLSKKLDPVAAGWPPCLRIMAATAMLVKDSAKLTLGQPLTVITPHTLEAIVRQPPDRWITNARLTHYQALLLDTDRVQFGPPVTLNPATLLPVPENQPSPHDCRQVLAETHGTREDLKDQELPDADHTWYTDGSSYLDSGTRRAGAAVVDGHNTIWAQSLPPGTSAQKAELIALTKALELSKGKKANIYTDSRYAFATAHTHGSIYERRGWLTSEGKEIKNKAEIIALLKALFLPQEVAIIHCPGHQKGQDPVAVGNRQADRVARQAAMAEVLTLATEPDNTSHITAGKRTADGSEFEKRTADGSEFESPKKKAKVE

SEQ ID NO: 6229 - protein, 2094 aa, synthetic construct
MPAAKRVKLDGGDKKYSIGLDIGTNSVGWAVITDEYKVPSKKFKVLGNTDRHSIKKNLIGALLFDSGETAEATRLKRTARRRYTRRKNRICYLQEIFSNEMAKVDDSFFHRLEESFLVEEDKKHERHPIFGNIVDEVAYHEKYPTIYHLRKKLVDSTDKADLRLIYLALAHMIKFRGHFLIEGDLNPDNSDVDKLFIQLVQTYNQLFEENPINASGVDAKAILSARLSKSRRLENLIAQLPGEKKNGLFGNLIALSLGLTPNFKSNFDLAEDAKLQLSKDTYDDDLDNLLAQIGDQYADLFLAAKNLSDAILLSDILRVNTEITKAPLSASMIKRYDEHHQDLTLLKALVRQQLPEKYKEIFFDQSKNGYAGYIDGGASQEEFYKFIKPILEKMDGTEELLVKLNREDLLRKQRTFDNGSIPHQIHLGELHAILRRQEDFYPFLKDNREKIEKILTFRIPYYVGPLARGNSRFAWMTRKSEETITPWNFEEVVDKGASAQSFIERMTNFDKNLPNEKVLPKHSLLYEYFTVYNELTKVKYVTEGMRKPAFLSGEQKKAIVDLLFKTNRKVTVKQLKEDYFKKIECFDSVEISGVEDRFNASLGTYHDLLKIIKDKDFLDNEENEDILEDIVLTLTLFEDREMIEERLKTYAHLFDDKVMKQLKRRRYTGWGRLSRKLINGIRDKQSGKTILDFLKSDGFANRNFMQLIHDDSLTFKEDIQKAQVSGQGDSLHEHIANLAGSPAIKKGILQTVKVVDELVKVMGRHKPENIVIEMARENQTTQKGQKNSRERMKRIEEGIKELGSQILKEHPVENTQLQNEKLYLYYLQNGRDMYVDQELDINRLSDYDVDHIVPQSFLKDDSIDNKVLTRSDKARGKSDNVPSEEVVKKMKNYWRQLLNAKLITQRKFDNLTKAERGGLSELDKAGFIKRQLVETRQITKHVAQILDSRMNTKYDENDKLIREVKVITLKSKLVSDFRKDFQFYKVREINNYHHAHDAYLNAVVGTALIKKYPKLESEFVYGDYKVYDVRKMIAKSEQEIGKATAKYFFYSNIMNFFKTEITLANGEIRKRPLIETNGETGEIVWDKGRDFATVRKVLSMPQVNIVKKTEVQTGGFSKESILPKRNSDKLIARKKDWDPKKYGGFDSPTVAYSVLVVAKVEKGKSKKLKSVKELLGITIMERSSFEKNPIDFLEAKGYKEVKKDLIIKLPKYSLFELENGRKRMLASAGELQKGNELALPSKYVNFLYLASHYEKLKGSPEDNEQKQLFVEQHKHYLDEIIEQISEFSKRVILADANLDKVLSAYNKHRDKPIREQAENIIHLFTLTNLGAPAAFKYFDTTIDRKRYTSTKEVLDATLIHQSITGLYETRIDLSQLGGDGGGGGGGTVSLQDEHRLFDIPVTTSLPDVWLQDFPQAWAETGGLGRAKCQAPIIIDLKPTAVPVSIKQYPMSLEAHMGIRQHIIKFLELGVLRPCRSPWNTPLLPVKKPGTQDYRPVQDLREINKRTVDIHPTVPNPYNLLSTLKPDYSWYTVLDLKDAFFCLPLAPQSQELFAFEWKDPERGISGQLTWTRLPQGFKNSPTLFNEALHRDLTDFRTQHPEVTLLQYVDDLLLAAPTKKACTQGTRHLLQELGEKGYRASAKKAQICQTKVTYLGYILSEGKRWLTPGRIETVARIPPPRNPREVREFLGKAGFCRLFIPGFAELAAPLYALTKPSTPFTWQTEHQLAFEALKKALLSAPALGLPDTSKPFTLFLDERQGIAKGVLTQKLGPWKRPVAYLSKKLDPVAAGWPPCLRIMAATAMLVKDSAKLTLGQPLTVITPHTLEAIVRQPPDRWITNARLTHYQALLLDTDRVQFGPPVTLNPATLLPVPENQPSPHDCRQVLAETHGTREDLKDQELPDADHTWYTDGSSYLDSGTRRAGAAVVDGHNTIWAQSLPPGTSAQKAELIALTKALELSKGKKANIYTDSRYAFATAHTHGSIYERRGWLTSEGKEIKNKAEIIALLKALFLPQEVAIIHCPGHQKGQDPVAVGNRQADRVARQAAMAEVLTLATEPDNTSHITAGKRTADGSEFEKRTADGSEFESPKKKAKVE

SEQ ID NO: 6230 - protein, 2165 aa, synthetic construct
MPAAKRVKLDGGDKKYSIGLDIGTNSVGWAVITDEYKVPSKKFKVLGNTDRHSIKKNLIGALLFDSGETAEATRLKRTARRRYTRRKNRICYLQEIFSNEMAKVDDSFFHRLEESFLVEEDKKHERHPIFGNIVDEVAYHEKYPTIYHLRKKLVDSTDKADLRLIYLALAHMIKFRGHFLIEGDLNPDNSDVDKLFIQLVQTYNQLFEENPINASGVDAKAILSARLSKSRRLENLIAQLPGEKKNGLFGNLIALSLGLTPNFKSNFDLAEDAKLQLSKDTYDDDLDNLLAQIGDQYADLFLAAKNLSDAILLSDILRVNTEITKAPLSASMIKRYDEHHQDLTLLKALVRQQLPEKYKEIFFDQSKNGYAGYIDGGASQEEFYKFIKPILEKMDGTEELLVKLNREDLLRKQRTFDNGSIPHQIHLGELHAILRRQEDFYPFLKDNREKIEKILTFRIPYYVGPLARGNSRFAWMTRKSEETITPWNFEEVVDKGASAQSFIERMTNFDKNLPNEKVLPKHSLLYEYFTVYNELTKVKYVTEGMRKPAFLSGEQKKAIVDLLFKTNRKVTVKQLKEDYFKKIECFDSVEISGVEDRFNASLGTYHDLLKIIKDKDFLDNEENEDILEDIVLTLTLFEDREMIEERLKTYAHLFDDKVMKQLKRRRYTGWGRLSRKLINGIRDKQSGKTILDFLKSDGFANRNFMQLIHDDSLTFKEDIQKAQVSGQGDSLHEHIANLAGSPAIKKGILQTVKVVDELVKVMGRHKPENIVIEMARENQTTQKGQKNSRERMKRIEEGIKELGSQILKEHPVENTQLQNEKLYLYYLQNGRDMYVDQELDINRLSDYDVDHIVPQSFLKDDSIDNKVLTRSDKARGKSDNVPSEEVVKKMKNYWRQLLNAKLITQRKFDNLTKAERGGLSELDKAGFIKRQLVETRQITKHVAQILDSRMNTKYDENDKLIREVKVITLKSKLVSDFRKDFQFYKVREINNYHHAHDAYLNAVVGTALIKKYPKLESEFVYGDYKVYDVRKMIAKSEQEIGKATAKYFFYSNIMNFFKTEITLANGEIRKRPLIETNGETGEIVWDKGRDFATVRKVLSMPQVNIVKKTEVQTGGFSKESILPKRNSDKLIARKKDWDPKKYGGFDSPTVAYSVLVVAKVEKGKSKKLKSVKELLGITIMERSSFEKNPIDFLEAKGYKEVKKDLIIKLPKYSLFELENGRKRMLASAGELQKGNELALPSKYVNFLYLASHYEKLKGSPEDNEQKQLFVEQHKHYLDEIIEQISEFSKRVILADANLDKVLSAYNKHRDKPIREQAENIIHLFTLTNLGAPAAFKYFDTTIDRKRYTSTKEVLDATLIHQSITGLYETRIDLSQLGGDGGGGGGGMDLLKPLTVERKGVKIKGYWNSQADITCVPKDLLQGEEPVRQQNVTTIHGTQEGDVYYVNLKIDGRRINTEVIGTTLDYAIITPGDVPWILKKPLELTIKLDLEEQQGTLLNNSILSKKGKEELKQLFEKYSALWQSWENQVGHRRIRPHKIATGTVKPTPQKQYHINPKAKPDIQIVINDLLKQGVLIQKESTMNTPVYPVPKPNGRWRMVLDYRAVNKVTPLIAVQNQHSYGILGSLFKGRYKTTIDLSNGFWAHPIVPEDYWITAFTWQGKQYCWTVLPQGFLNSPGLFNGDVVDLLQGIPNVEVYVDDVYISHDSEKEHLEYLDILFNRLKEAGYIISLKKSNIANSIVDFLGFQITNEGRGLTDTFKEKLENITAPTTLKQLQSILGLLNFARNFIPDFTELIAPLYALIPKSPKNYVPWQIEHSTTLETLITKLNGAEYLQGRKGDKTLIMKVNASYTTGYIRYYNEGEKKPISYVSIVFSKTELKFTELEKLLTTVHKGLLKALDLSMGQNIHVYSPIVSMQNIQKTPQTAKKALASRWLSWLSYLEDPRIRFFYDPQMPALKDLPAVDTGKDNKKHPSNFQHIFYTDGSAITSPTKEGHLNAGMGIVYFINKDGNLQKQQEWSISLGNHTAQFAEIAAFEFALKKCLPLGGNILVVTDSNYVAKAYNEELDVWASNGFVNNRKKPLKHISKWKSVADLKRLRPDVVVTHEPGHQKLDSSPHAYGNNLADQLATQASFKVHAGKRTADGSEFEKRTADGSEFESPKKKAKVE

SEQ ID NO: 6231 - protein, 2086 aa, synthetic construct
MPAAKRVKLDGGDKKYSIGLDIGTNSVGWAVITDEYKVPSKKFKVLGNTDRHSIKKNLIGALLFDSGETAEATRLKRTARRRYTRRKNRICYLQEIFSNEMAKVDDSFFHRLEESFLVEEDKKHERHPIFGNIVDEVAYHEKYPTIYHLRKKLVDSTDKADLRLIYLALAHMIKFRGHFLIEGDLNPDNSDVDKLFIQLVQTYNQLFEENPINASGVDAKAILSARLSKSRRLENLIAQLPGEKKNGLFGNLIALSLGLTPNFKSNFDLAEDAKLQLSKDTYDDDLDNLLAQIGDQYADLFLAAKNLSDAILLSDILRVNTEITKAPLSASMIKRYDEHHQDLTLLKALVRQQLPEKYKEIFFDQSKNGYAGYIDGGASQEEFYKFIKPILEKMDGTEELLVKLNREDLLRKQRTFDNGSIPHQIHLGELHAILRRQEDFYPFLKDNREKIEKILTFRIPYYVGPLARGNSRFAWMTRKSEETITPWNFEEVVDKGASAQSFIERMTNFDKNLPNEKVLPKHSLLYEYFTVYNELTKVKYVTEGMRKPAFLSGEQKKAIVDLLFKTNRKVTVKQLKEDYFKKIECFDSVEISGVEDRFNASLGTYHDLLKIIKDKDFLDNEENEDILEDIVLTLTLFEDREMIEERLKTYAHLFDDKVMKQLKRRRYTGWGRLSRKLINGIRDKQSGKTILDFLKSDGFANRNFMQLIHDDSLTFKEDIQKAQVSGQGDSLHEHIANLAGSPAIKKGILQTVKVVDELVKVMGRHKPENIVIEMARENQTTQKGQKNSRERMKRIEEGIKELGSQILKEHPVENTQLQNEKLYLYYLQNGRDMYVDQELDINRLSDYDVDHIVPQSFLKDDSIDNKVLTRSDKARGKSDNVPSEEVVKKMKNYWRQLLNAKLITQRKFDNLTKAERGGLSELDKAGFIKRQLVETRQITKHVAQILDSRMNTKYDENDKLIREVKVITLKSKLVSDFRKDFQFYKVREINNYHHAHDAYLNAVVGTALIKKYPKLESEFVYGDYKVYDVRKMIAKSEQEIGKATAKYFFYSNIMNFFKTEITLANGEIRKRPLIETNGETGEIVWDKGRDFATVRKVLSMPQVNIVKKTEVQTGGFSKESILPKRNSDKLIARKKDWDPKKYGGFDSPTVAYSVLVVAKVEKGKSKKLKSVKELLGITIMERSSFEKNPIDFLEAKGYKEVKKDLIIKLPKYSLFELENGRKRMLASAGELQKGNELALPSKYVNFLYLASHYEKLKGSPEDNEQKQLFVEQHKHYLDEIIEQISEFSKRVILADANLDKVLSAYNKHRDKPIREQAENIIHLFTLTNLGAPAAFKYFDTTIDRKRYTSTKEVLDATLIHQSITGLYETRIDLSQLGGDGGGGGGGVLNLEEEYRLHEKPVPSSIDPSWLQLFPTVWAERAGMGLANQVPPVVVELRSGASPVAVRQYPMSKEAREGIRPHIQKFLDLGVLVPCRSPWNTPLLPVKKPGTNDYRPVQDLREINKRVQDIHPTVPNPYNLLSSLPPSYTWYSVLDLKDAFFCLRLHPNSQPLFAFEWKDPEKGNTGQLTWTRLPQGFKNSPTLFNEALHRDLAPFRALNPQVVLLQYVDDLLVAAPTYEDCKKGTQKLLQELSKLGYRVSAKKAQLCQREVTYLGYLLKEGKRWLTPARKATVMKIPVPTTPRQVREFLGTAGFCRLWIPGFASLAAPLYPLTKPSIPFIWTEEHQQAFDHIKKALLSAPALALPDLTKPFTLYIDERAGVARGVLTQTLGPWRRPVAYLSKKLDPVASGWPTCLKAVAAVALLLKDADKLTLGQNVTVIASHSLESIVRQPPDRWMTNARMTHYQSLLLNERVSFAPPAVLNPATLLPVESEATPVHRCSEILAEETGTRRDLEDQPLPGVPTWYTDGSSFITEGKRRAGAPIVDGKRTVWASSLPEGTSAQKAELVALTQALRLAEGKNINIYTDSRYAFATAHIHGAIYKQRGWLTSAGKDIKNKEEILALLEAIHLPRRVAIIHCPGHQRGSNPVATGNRRADEAAKQAALSTRVLAGTTKPAGKRTADGSEFEKRTADGSEFESPKKKAKVE

SEQ ID NO: 6232 - protein, 2086 aa, synthetic construct
MPAAKRVKLDGGDKKYSIGLDIGTNSVGWAVITDEYKVPSKKFKVLGNTDRHSIKKNLIGALLFDSGETAEATRLKRTARRRYTRRKNRICYLQEIFSNEMAKVDDSFFHRLEESFLVEEDKKHERHPIFGNIVDEVAYHEKYPTIYHLRKKLVDSTDKADLRLIYLALAHMIKFRGHFLIEGDLNPDNSDVDKLFIQLVQTYNQLFEENPINASGVDAKAILSARLSKSRRLENLIAQLPGEKKNGLFGNLIALSLGLTPNFKSNFDLAEDAKLQLSKDTYDDDLDNLLAQIGDQYADLFLAAKNLSDAILLSDILRVNTEITKAPLSASMIKRYDEHHQDLTLLKALVRQQLPEKYKEIFFDQSKNGYAGYIDGGASQEEFYKFIKPILEKMDGTEELLVKLNREDLLRKQRTFDNGSIPHQIHLGELHAILRRQEDFYPFLKDNREKIEKILTFRIPYYVGPLARGNSRFAWMTRKSEETITPWNFEEVVDKGASAQSFIERMTNFDKNLPNEKVLPKHSLLYEYFTVYNELTKVKYVTEGMRKPAFLSGEQKKAIVDLLFKTNRKVTVKQLKEDYFKKIECFDSVEISGVEDRFNASLGTYHDLLKIIKDKDFLDNEENEDILEDIVLTLTLFEDREMIEERLKTYAHLFDDKVMKQLKRRRYTGWGRLSRKLINGIRDKQSGKTILDFLKSDGFANRNFMQLIHDDSLTFKEDIQKAQVSGQGDSLHEHIANLAGSPAIKKGILQTVKVVDELVKVMGRHKPENIVIEMARENQTTQKGQKNSRERMKRIEEGIKELGSQILKEHPVENTQLQNEKLYLYYLQNGRDMYVDQELDINRLSDYDVDHIVPQSFLKDDSIDNKVLTRSDKARGKSDNVPSEEVVKKMKNYWRQLLNAKLITQRKFDNLTKAERGGLSELDKAGFIKRQLVETRQITKHVAQILDSRMNTKYDENDKLIREVKVITLKSKLVSDFRKDFQFYKVREINNYHHAHDAYLNAVVGTALIKKYPKLESEFVYGDYKVYDVRKMIAKSEQEIGKATAKYFFYSNIMNFFKTEITLANGEIRKRPLIETNGETGEIVWDKGRDFATVRKVLSMPQVNIVKKTEVQTGGFSKESILPKRNSDKLIARKKDWDPKKYGGFDSPTVAYSVLVVAKVEKGKSKKLKSVKELLGITIMERSSFEKNPIDFLEAKGYKEVKKDLIIKLPKYSLFELENGRKRMLASAGELQKGNELALPSKYVNFLYLASHYEKLKGSPEDNEQKQLFVEQHKHYLDEIIEQISEFSKRVILADANLDKVLSAYNKHRDKPIREQAENIIHLFTLTNLGAPAAFKYFDTTIDRKRYTSTKEVLDATLIHQSITGLYETRIDLSQLGGDGGGGGGGVLNLEEEYRLHEKPVPSSIDPSWLQLFPTVWAERAGMGLANQVPPVVVELRSGASPVAVRQYPMSKEAREGIRPHIQKFLDLGVLVPCRSPWNTPLLPVKKPGTNDYRPVQDLREINKRVQDIHPTVPNPYNLLSSLPPSYTWYSVLDLKDAFFCLRLHPNSQPLFAFEWKDPEKGNTGQLTWTRLPQGFKNSPTLFNEALHRDLAPFRALNPQVVLLQYVDDLLVAAPTYEDCKKGTQKLLQELSKLGYRVSAKKAQLCQREVTYLGYLLKEGKRWLTPARKATVMKIPVPTTPRQVREFLGKAGFCRLFIPGFASLAAPLYPLTKPSIPFIWTEEHQQAFDHIKKALLSAPALALPDLTKPFTLYIDERAGVARGVLTQTLGPWRRPVAYLSKKLDPVASGWPTCLKAVAAVALLLKDADKLTLGQNVTVIASHSLESIVRQPPDRWMTNARMTHYQSLLLNERVSFAPPAVLNPATLLPVESEATPVHRCSEILAEETGTRRDLEDQPLPGVPTWYTDGSSFITEGKRRAGAPIVDGKRTVWASSLPEGTSAQKAELVALTQALRLAEGKNINIYTDSRYAFATAHIHGAIYKQRGWLTSAGKDIKNKEEILALLEAIHLPRRVAIIHCPGHQRGSNPVATGNRRADEAAKQAALSTRVLAGTTKPAGKRTADGSEFEKRTADGSEFESPKKKAKVE

SEQ ID NO: 6233 - protein, 2119 aa, synthetic construct
MPAAKRVKLDGGDKKYSIGLDIGTNSVGWAVITDEYKVPSKKFKVLGNTDRHSIKKNLIGALLFDSGETAEATRLKRTARRRYTRRKNRICYLQEIFSNEMAKVDDSFFHRLEESFLVEEDKKHERHPIFGNIVDEVAYHEKYPTIYHLRKKLVDSTDKADLRLIYLALAHMIKFRGHFLIEGDLNPDNSDVDKLFIQLVQTYNQLFEENPINASGVDAKAILSARLSKSRRLENLIAQLPGEKKNGLFGNLIALSLGLTPNFKSNFDLAEDAKLQLSKDTYDDDLDNLLAQIGDQYADLFLAAKNLSDAILLSDILRVNTEITKAPLSASMIKRYDEHHQDLTLLKALVRQQLPEKYKEIFFDQSKNGYAGYIDGGASQEEFYKFIKPILEKMDGTEELLVKLNREDLLRKQRTFDNGSIPHQIHLGELHAILRRQEDFYPFLKDNREKIEKILTFRIPYYVGPLARGNSRFAWMTRKSEETITPWNFEEVVDKGASAQSFIERMTNFDKNLPNEKVLPKHSLLYEYFTVYNELTKVKYVTEGMRKPAFLSGEQKKAIVDLLFKTNRKVTVKQLKEDYFKKIECFDSVEISGVEDRFNASLGTYHDLLKIIKDKDFLDNEENEDILEDIVLTLTLFEDREMIEERLKTYAHLFDDKVMKQLKRRRYTGWGRLSRKLINGIRDKQSGKTILDFLKSDGFANRNFMQLIHDDSLTFKEDIQKAQVSGQGDSLHEHIANLAGSPAIKKGILQTVKVVDELVKVMGRHKPENIVIEMARENQTTQKGQKNSRERMKRIEEGIKELGSQILKEHPVENTQLQNEKLYLYYLQNGRDMYVDQELDINRLSDYDVDHIVPQSFLKDDSIDNKVLTRSDKARGKSDNVPSEEVVKKMKNYWRQLLNAKLITQRKFDNLTKAERGGLSELDKAGFIKRQLVETRQITKHVAQILDSRMNTKYDENDKLIREVKVITLKSKLVSDFRKDFQFYKVREINNYHHAHDAYLNAVVGTALIKKYPKLESEFVYGDYKVYDVRKMIAKSEQEIGKATAKYFFYSNIMNFFKTEITLANGEIRKRPLIETNGETGEIVWDKGRDFATVRKVLSMPQVNIVKKTEVQTGGFSKESILPKRNSDKLIARKKDWDPKKYGGFDSPTVAYSVLVVAKVEKGKSKKLKSVKELLGITIMERSSFEKNPIDFLEAKGYKEVKKDLIIKLPKYSLFELENGRKRMLASAGELQKGNELALPSKYVNFLYLASHYEKLKGSPEDNEQKQLFVEQHKHYLDEIIEQISEFSKRVILADANLDKVLSAYNKHRDKPIREQAENIIHLFTLTNLGAPAAFKYFDTTIDRKRYTSTKEVLDATLIHQSITGLYETRIDLSQLGGDGGGGGGGLLGRDLLTKLKAQIQFSTEGPQVTWEDRPAMCLVLNLEEEYRLHEKPVPPSIDPSWLQLFPMVWAEKAGMGLANQVPPVVVELKSDASPVAVRQYPMSKEAREGIRPHIQRFLDLGILVPCQSPWNTPLLPVKKPGTNDYRPVQDLREVNKRVQDIHPTVPNPYNLLSSLPPSHTWYSVLDLKDAFFCLKLHPNSQPLFAFEWRDPEKGNTGQLTWTRLPQGFKNSPTLFNEALHRDLASFRALNPQVVMLQYVDDLLVAAPTYRDCKEGTRRLLQELSKLGYRVSAKKAQLCREEVTYLGYLLKGGKRWLTPARKATVMKIPTPTTPRQVREFLGKAGFCRLFIPGFASLAAPLYPLTRPKVPFTWTEAHQEAFGRIKEALLSAPALALPDLTKPFALYVDEKEGVARGVLTQTLGPWRRPVAYLSKKLDPVASGWPTCLKAIAAVALLLKDADKLTLGQNVLVIAPHNLESIVRQPPDRWMTNARMTHYQSLLLNERVSFAPPAILNPATLLPVESDDTPIHICSEILAEETGTRPDLRDQPLPGVPAWYTDGSSFIMDGRRQAGAAIVDNKRTVWASNLPEGTSAQKAELIALTQALRLAEGKSINIYTDSRYAFATAHVHGAIYKQRGWLTSAGKDIKNKEEILALLEAIHLPKRVAIIHCPGHQRGTDPVATGNRKADEAAKQAAQSTRILTETTKNAGKRTADGSEFEKRTADGSEFESPKKKAKVE

SEQ ID NO: 6234 - protein, 2210 aa, synthetic construct
MPAAKRVKLDGGDKKYSIGLDIGTNSVGWAVITDEYKVPSKKFKVLGNTDRHSIKKNLIGALLFDSGETAEATRLKRTARRRYTRRKNRICYLQEIFSNEMAKVDDSFFHRLEESFLVEEDKKHERHPIFGNIVDEVAYHEKYPTIYHLRKKLVDSTDKADLRLIYLALAHMIKFRGHFLIEGDLNPDNSDVDKLFIQLVQTYNQLFEENPINASGVDAKAILSARLSKSRRLENLIAQLPGEKKNGLFGNLIALSLGLTPNFKSNFDLAEDAKLQLSKDTYDDDLDNLLAQIGDQYADLFLAAKNLSDAILLSDILRVNTEITKAPLSASMIKRYDEHHQDLTLLKALVRQQLPEKYKEIFFDQSKNGYAGYIDGGASQEEFYKFIKPILEKMDGTEELLVKLNREDLLRKQRTFDNGSIPHQIHLGELHAILRRQEDFYPFLKDNREKIEKILTFRIPYYVGPLARGNSRFAWMTRKSEETITPWNFEEVVDKGASAQSFIERMTNFDKNLPNEKVLPKHSLLYEYFTVYNELTKVKYVTEGMRKPAFLSGEQKKAIVDLLFKTNRKVTVKQLKEDYFKKIECFDSVEISGVEDRFNASLGTYHDLLKIIKDKDFLDNEENEDILEDIVLTLTLFEDREMIEERLKTYAHLFDDKVMKQLKRRRYTGWGRLSRKLINGIRDKQSGKTILDFLKSDGFANRNFMQLIHDDSLTFKEDIQKAQVSGQGDSLHEHIANLAGSPAIKKGILQTVKVVDELVKVMGRHKPENIVIEMARENQTTQKGQKNSRERMKRIEEGIKELGSQILKEHPVENTQLQNEKLYLYYLQNGRDMYVDQELDINRLSDYDVDHIVPQSFLKDDSIDNKVLTRSDKARGKSDNVPSEEVVKKMKNYWRQLLNAKLITQRKFDNLTKAERGGLSELDKAGFIKRQLVETRQITKHVAQILDSRMNTKYDENDKLIREVKVITLKSKLVSDFRKDFQFYKVREINNYHHAHDAYLNAVVGTALIKKYPKLESEFVYGDYKVYDVRKMIAKSEQEIGKATAKYFFYSNIMNFFKTEITLANGEIRKRPLIETNGETGEIVWDKGRDFATVRKVLSMPQVNIVKKTEVQTGGFSKESILPKRNSDKLIARKKDWDPKKYGGFDSPTVAYSVLVVAKVEKGKSKKLKSVKELLGITIMERSSFEKNPIDFLEAKGYKEVKKDLIIKLPKYSLFELENGRKRMLASAGELQKGNELALPSKYVNFLYLASHYEKLKGSPEDNEQKQLFVEQHKHYLDEIIEQISEFSKRVILADANLDKVLSAYNKHRDKPIREQAENIIHLFTLTNLGAPAAFKYFDTTIDRKRYTSTKEVLDATLIHQSITGLYETRIDLSQLGGDGGGGGGGTLGDQGSRGSDPLPEPRVTLTVEGIPTEFLVNTGAEHSVLTKPMGKMGSKRTVVAGATGSKVYPWTTKRLLKIGQKQVTHSFLVIPECPAPLLGRDLLTKLKAQIQFSTEGPQVTWEDRPAMCLVLNLEEEYRLHEKPVPPSIDPSWLQLFPMVWAEKAGMGLANQVPPVVVELKSDASPVAVRQYPMSKEAREGIRPHIQRFLDLGILVPCQSPWNTPLLPVKKPGTNDYRPVQDLREVNKRVQDIHPTVPNPYNLLSSLPPSHTWYSVLDLKDAFFCLKLHPNSQPLFAFEWRDPEKGNTGQLTWTRLPQGFKNSPTLFNEALHRDLASFRALNPQVVMLQYVDDLLVAAPTYRDCKEGTRRLLQELSKLGYRVSAKKAQLCREEVTYLGYLLKGGKRWLTPARKATVMKIPTPTTPRQVREFLGTAGFCRLWIPGFASLAAPLYPLTRPKVPFTWTEAHQEAFGRIKEALLSAPALALPDLTKPFALYVDEKEGVARGVLTQTLGPWRRPVAYLSKKLDPVASGWPTCLKAIAAVALLLKDADKLTLGQNVLVIAPHNLESIVRQPPDRWMTNARMTHYQSLLLNERVSFAPPAILNPATLLPVESDDTPIHICSEILAEETGTRPDLRDQPLPGVPAWYTDGSSFIMDGRRQAGAAIVDNKRTVWASNLPEGTSAQKAELIALTQALRLAEGKSINIYTDSRYAFATAHVHGAIYKQRGWLTSAGKDIKNKEEILALLEAIHLPKRVAIIHCPGHQRGTDPVATGNRKADEAAKQAAQSTRILTETTKNAGKRTADGSEFEKRTADGSEFESPKKKAKVE

SEQ ID NO: 6235 - protein, 2088 aa, synthetic construct
MPAAKRVKLDGGDKKYSIGLDIGTNSVGWAVITDEYKVPSKKFKVLGNTDRHSIKKNLIGALLFDSGETAEATRLKRTARRRYTRRKNRICYLQEIFSNEMAKVDDSFFHRLEESFLVEEDKKHERHPIFGNIVDEVAYHEKYPTIYHLRKKLVDSTDKADLRLIYLALAHMIKFRGHFLIEGDLNPDNSDVDKLFIQLVQTYNQLFEENPINASGVDAKAILSARLSKSRRLENLIAQLPGEKKNGLFGNLIALSLGLTPNFKSNFDLAEDAKLQLSKDTYDDDLDNLLAQIGDQYADLFLAAKNLSDAILLSDILRVNTEITKAPLSASMIKRYDEHHQDLTLLKALVRQQLPEKYKEIFFDQSKNGYAGYIDGGASQEEFYKFIKPILEKMDGTEELLVKLNREDLLRKQRTFDNGSIPHQIHLGELHAILRRQEDFYPFLKDNREKIEKILTFRIPYYVGPLARGNSRFAWMTRKSEETITPWNFEEVVDKGASAQSFIERMTNFDKNLPNEKVLPKHSLLYEYFTVYNELTKVKYVTEGMRKPAFLSGEQKKAIVDLLFKTNRKVTVKQLKEDYFKKIECFDSVEISGVEDRFNASLGTYHDLLKIIKDKDFLDNEENEDILEDIVLTLTLFEDREMIEERLKTYAHLFDDKVMKQLKRRRYTGWGRLSRKLINGIRDKQSGKTILDFLKSDGFANRNFMQLIHDDSLTFKEDIQKAQVSGQGDSLHEHIANLAGSPAIKKGILQTVKVVDELVKVMGRHKPENIVIEMARENQTTQKGQKNSRERMKRIEEGIKELGSQILKEHPVENTQLQNEKLYLYYLQNGRDMYVDQELDINRLSDYDVDHIVPQSFLKDDSIDNKVLTRSDKARGKSDNVPSEEVVKKMKNYWRQLLNAKLITQRKFDNLTKAERGGLSELDKAGFIKRQLVETRQITKHVAQILDSRMNTKYDENDKLIREVKVITLKSKLVSDFRKDFQFYKVREINNYHHAHDAYLNAVVGTALIKKYPKLESEFVYGDYKVYDVRKMIAKSEQEIGKATAKYFFYSNIMNFFKTEITLANGEIRKRPLIETNGETGEIVWDKGRDFATVRKVLSMPQVNIVKKTEVQTGGFSKESILPKRNSDKLIARKKDWDPKKYGGFDSPTVAYSVLVVAKVEKGKSKKLKSVKELLGITIMERSSFEKNPIDFLEAKGYKEVKKDLIIKLPKYSLFELENGRKRMLASAGELQKGNELALPSKYVNFLYLASHYEKLKGSPEDNEQKQLFVEQHKHYLDEIIEQISEFSKRVILADANLDKVLSAYNKHRDKPIREQAENIIHLFTLTNLGAPAAFKYFDTTIDRKRYTSTKEVLDATLIHQSITGLYETRIDLSQLGGDGGGGGGGTLNLEDEYRLYETSAEPEVSPGSTWLSDFPQAWAETGGMGLAVRQAPLIIPLKATSTPVSIKQYPMSQEAKLGIKPHIQRLLDQGILVPCQSPWNTPLLPVKKPGTNDYRPVQDLREVNKRVEDIHPTVPNPYNLLSGLPPSHRWYTVLDLKDAFFCLRLHPTSQPLFAFEWRDPGMGISGQLTWTRLPQGFKNSPTLFNEALHRDLADFRIQHPDLILLQYVDDILLAATSELDCQQGTRALLLTLGNLGYRASAKKAQLCQKQVKYLGYLLKEGQRWLTEARKETVMGQPTPKTPRQLREFLGKAGFCRLFIPGFAEMAAPLYPLTKPGTLFNWGPDQQKAYQEIKQALLTAPALGLPDLTKPFELFVDEKQGYAKGVLTQKLGPWRRPVAYLSKKLDPVAAGWPPCLRMVAAIAVLRKDAGKLTMGQPLVILAPHAVEALVKQPPDRWLSNARMTHYQAMLLDTDRVQFGPVVALNPATLLPLPEEGAPHDCLEILAETHGTRPDLTDQPIPDADHTWYTDGSSFLQEGQRKAGAAVTTETEVIWARALPAGTSAQRAELIALTQALKMAEGKRLNVYTDSRYAFATAHIHGEIYRRRGWLTSEGREIKNKSEILALLKALFLPKRLSIIHCLGHQKGDSAEARGNRLADQAAREAAIKTPPDTSTLLAGKRTADGSEFEKRTADGSEFESPKKKAKVE

SEQ ID NO: 6236 - protein, 2088 aa, synthetic construct
MPAAKRVKLDGGDKKYSIGLDIGTNSVGWAVITDEYKVPSKKFKVLGNTDRHSIKKNLIGALLFDSGETAEATRLKRTARRRYTRRKNRICYLQEIFSNEMAKVDDSFFHRLEESFLVEEDKKHERHPIFGNIVDEVAYHEKYPTIYHLRKKLVDSTDKADLRLIYLALAHMIKFRGHFLIEGDLNPDNSDVDKLFIQLVQTYNQLFEENPINASGVDAKAILSARLSKSRRLENLIAQLPGEKKNGLFGNLIALSLGLTPNFKSNFDLAEDAKLQLSKDTYDDDLDNLLAQIGDQYADLFLAAKNLSDAILLSDILRVNTEITKAPLSASMIKRYDEHHQDLTLLKALVRQQLPEKYKEIFFDQSKNGYAGYIDGGASQEEFYKFIKPILEKMDGTEELLVKLNREDLLRKQRTFDNGSIPHQIHLGELHAILRRQEDFYPFLKDNREKIEKILTFRIPYYVGPLARGNSRFAWMTRKSEETITPWNFEEVVDKGASAQSFIERMTNFDKNLPNEKVLPKHSLLYEYFTVYNELTKVKYVTEGMRKPAFLSGEQKKAIVDLLFKTNRKVTVKQLKEDYFKKIECFDSVEISGVEDRFNASLGTYHDLLKIIKDKDFLDNEENEDILEDIVLTLTLFEDREMIEERLKTYAHLFDDKVMKQLKRRRYTGWGRLSRKLINGIRDKQSGKTILDFLKSDGFANRNFMQLIHDDSLTFKEDIQKAQVSGQGDSLHEHIANLAGSPAIKKGILQTVKVVDELVKVMGRHKPENIVIEMARENQTTQKGQKNSRERMKRIEEGIKELGSQILKEHPVENTQLQNEKLYLYYLQNGRDMYVDQELDINRLSDYDVDHIVPQSFLKDDSIDNKVLTRSDKARGKSDNVPSEEVVKKMKNYWRQLLNAKLITQRKFDNLTKAERGGLSELDKAGFIKRQLVETRQITKHVAQILDSRMNTKYDENDKLIREVKVITLKSKLVSDFRKDFQFYKVREINNYHHAHDAYLNAVVGTALIKKYPKLESEFVYGDYKVYDVRKMIAKSEQEIGKATAKYFFYSNIMNFFKTEITLANGEIRKRPLIETNGETGEIVWDKGRDFATVRKVLSMPQVNIVKKTEVQTGGFSKESILPKRNSDKLIARKKDWDPKKYGGFDSPTVAYSVLVVAKVEKGKSKKLKSVKELLGITIMERSSFEKNPIDFLEAKGYKEVKKDLIIKLPKYSLFELENGRKRMLASAGELQKGNELALPSKYVNFLYLASHYEKLKGSPEDNEQKQLFVEQHKHYLDEIIEQISEFSKRVILADANLDKVLSAYNKHRDKPIREQAENIIHLFTLTNLGAPAAFKYFDTTIDRKRYTSTKEVLDATLIHQSITGLYETRIDLSQLGGDGGGGGGGTLNIEDEYRLHETSKGPDVPLGSTWLSDFPQAWAETGGMGLAVRQAPLIIPLKATSTPVSIKQYPMSQEARLGIKPHIQRLLDQGILVPCQSPWNTPLLPVKKPGTNDYRPVQDLREVNKRVEDIHPTVPNPYNLLSGLPPSHQWYTVLDLKDAFFCLRLHPTSQSLFAFEWRDPEMGISGQLTWTRLPQGFKNSPTLFNEALHRDLADFRIQHPDLILLQYVDDLLLAATSELDCQQGTRALLQTLGDLGYRASAKKAQICQKQVKYLGYLLKEGQRWLTEARKETVMGQPTPKTPRQLREFLGTAGFCRLWIPGFAEMAAPLYPLTKPGTLFEWGPDQQKAYQEIKQALLTAPALGLPDLTKPFELFVDEKQGYAKGVLTQKLGPWRRPVAYLSKKLDPVAAGWPPCLRMVAAIAVLTKDAGKLTMGQPLVILAPHAVEALVKQPPDRWLSNARMTHYQALLLDTDRVQFGPIVALNPATLLPLPEEGLQHDCLDILAEAHGTRPDLTDQPLPDADHTWYTDGSSFLQEGQRKAGAAVTTETEVVWAKALPAGTSAQRAELIALTQALKMAEGKKLNVYTDSRYAFATAHIHGEIYRRRGWLTSEGKEIKNKDEILALLKALFLPKRLSIIHCPGHQKGNRAEARGNRMADQAAREVATRETPETSTLLAGKRTADGSEFEKRTADGSEFESPKKKAKVE

SEQ ID NO: 6237 - protein, 2088 aa, synthetic construct
MPAAKRVKLDGGDKKYSIGLDIGTNSVGWAVITDEYKVPSKKFKVLGNTDRHSIKKNLIGALLFDSGETAEATRLKRTARRRYTRRKNRICYLQEIFSNEMAKVDDSFFHRLEESFLVEEDKKHERHPIFGNIVDEVAYHEKYPTIYHLRKKLVDSTDKADLRLIYLALAHMIKFRGHFLIEGDLNPDNSDVDKLFIQLVQTYNQLFEENPINASGVDAKAILSARLSKSRRLENLIAQLPGEKKNGLFGNLIALSLGLTPNFKSNFDLAEDAKLQLSKDTYDDDLDNLLAQIGDQYADLFLAAKNLSDAILLSDILRVNTEITKAPLSASMIKRYDEHHQDLTLLKALVRQQLPEKYKEIFFDQSKNGYAGYIDGGASQEEFYKFIKPILEKMDGTEELLVKLNREDLLRKQRTFDNGSIPHQIHLGELHAILRRQEDFYPFLKDNREKIEKILTFRIPYYVGPLARGNSRFAWMTRKSEETITPWNFEEVVDKGASAQSFIERMTNFDKNLPNEKVLPKHSLLYEYFTVYNELTKVKYVTEGMRKPAFLSGEQKKAIVDLLFKTNRKVTVKQLKEDYFKKIECFDSVEISGVEDRFNASLGTYHDLLKIIKDKDFLDNEENEDILEDIVLTLTLFEDREMIEERLKTYAHLFDDKVMKQLKRRRYTGWGRLSRKLINGIRDKQSGKTILDFLKSDGFANRNFMQLIHDDSLTFKEDIQKAQVSGQGDSLHEHIANLAGSPAIKKGILQTVKVVDELVKVMGRHKPENIVIEMARENQTTQKGQKNSRERMKRIEEGIKELGSQILKEHPVENTQLQNEKLYLYYLQNGRDMYVDQELDINRLSDYDVDHIVPQSFLKDDSIDNKVLTRSDKARGKSDNVPSEEVVKKMKNYWRQLLNAKLITQRKFDNLTKAERGGLSELDKAGFIKRQLVETRQITKHVAQILDSRMNTKYDENDKLIREVKVITLKSKLVSDFRKDFQFYKVREINNYHHAHDAYLNAVVGTALIKKYPKLESEFVYGDYKVYDVRKMIAKSEQEIGKATAKYFFYSNIMNFFKTEITLANGEIRKRPLIETNGETGEIVWDKGRDFATVRKVLSMPQVNIVKKTEVQTGGFSKESILPKRNSDKLIARKKDWDPKKYGGFDSPTVAYSVLVVAKVEKGKSKKLKSVKELLGITIMERSSFEKNPIDFLEAKGYKEVKKDLIIKLPKYSLFELENGRKRMLASAGELQKGNELALPSKYVNFLYLASHYEKLKGSPEDNEQKQLFVEQHKHYLDEIIEQISEFSKRVILADANLDKVLSAYNKHRDKPIREQAENIIHLFTLTNLGAPAAFKYFDTTIDRKRYTSTKEVLDATLIHQSITGLYETRIDLSQLGGDGGGGGGGTLNIEDEHRLHETSKEPDVSLGSTWLSDFPQAWAETGGMGLAVRQAPLIIPLKATSTPVSIKQYPMSQEARLGIKPHIQRLLDQGILVPCQSPWNTPLLPVKKPGTNDYRPVQDLREVNKRVEDIHPTVPNPYNLLSGLPPSHQWYTVLDLKDAFFCLRLHPTSQPLFAFEWRDPEMGISGQLTWTRLPQGFKNSPTLFNEALHRDLADFRIQHPDLILLQYVDDLLLAATSELDCQQGTRALLQTLGNLGYRASAKKAQICQKQVKYLGYLLKEGQRWLTEARKETVMGQPTPKTPRQLREFLGTAGFCRLWIPGFAEMAAPLYPLTKPGTLFNWGPDQQKAYQEIKQALLTAPALGLPDLTKPFELFVDEKQGYAKGVLTQKLGPWRRPVAYLSKKLDPVAAGWPPCLRMVAAIAVLTKDAGKLTMGQPLVILAPHAVEALVKQPPDRWLSNARMTHYQALLLDTDRVQFGPVVALNPATLLPLPEEGLQHNCLDILAEAHGTRPDLTDQPLPDADHTWYTDGSSLLQEGQRKAGAAVTTETEVIWAKALPAGTSAQRAELIALTQALKMAEGKKLNVYTDSRYAFATAHIHGEIYRRRGWLTSEGKEIKNKDEILALLKALFLPKRLSIIHCPGHQKGHSAEARGNRMADQAARKAAITETPDTSTLLAGKRTADGSEFEKRTADGSEFESPKKKAKVE

SEQ ID NO: 6238 - protein, 2088 aa, synthetic construct; identical to SEQ ID NO: 6237

SEQ ID NO: 6239 - protein, 2088 aa, synthetic construct
MPAAKRVKLDGGDKKYSIGLDIGTNSVGWAVITDEYKVPSKKFKVLGNTDRHSIKKNLIGALLFDSGETAEATRLKRTARRRYTRRKNRICYLQEIFSNEMAKVDDSFFHRLEESFLVEEDKKHERHPIFGNIVDEVAYHEKYPTIYHLRKKLVDSTDKADLRLIYLALAHMIKFRGHFLIEGDLNPDNSDVDKLFIQLVQTYNQLFEENPINASGVDAKAILSARLSKSRRLENLIAQLPGEKKNGLFGNLIALSLGLTPNFKSNFDLAEDAKLQLSKDTYDDDLDNLLAQIGDQYADLFLAAKNLSDAILLSDILRVNTEITKAPLSASMIKRYDEHHQDLTLLKALVRQQLPEKYKEIFFDQSKNGYAGYIDGGASQEEFYKFIKPILEKMDGTEELLVKLNREDLLRKQRTFDNGSIPHQIHLGELHAILRRQEDFYPFLKDNREKIEKILTFRIPYYVGPLARGNSRFAWMTRKSEETITPWNFEEVVDKGASAQSFIERMTNFDKNLPNEKVLPKHSLLYEYFTVYNELTKVKYVTEGMRKPAFLSGEQKKAIVDLLFKTNRKVTVKQLKEDYFKKIECFDSVEISGVEDRFNASLGTYHDLLKIIKDKDFLDNEENEDILEDIVLTLTLFEDREMIEERLKTYAHLFDDKVMKQLKRRRYTGWGRLSRKLINGIRDKQSGKTILDFLKSDGFANRNFMQLIHDDSLTFKEDIQKAQVSGQGDSLHEHIANLAGSPAIKKGILQTVKVVDELVKVMGRHKPENIVIEMARENQTTQKGQKNSRERMKRIEEGIKELGSQILKEHPVENTQLQNEKLYLYYLQNGRDMYVDQELDINRLSDYDVDHIVPQSFLKDDSIDNKVLTRSDKARGKSDNVPSEEVVKKMKNYWRQLLNAKLITQRKFDNLTKAERGGLSELDKAGFIKRQLVETRQITKHVAQILDSRMNTKYDENDKLIREVKVITLKSKLVSDFRKDFQFYKVREINNYHHAHDAYLNAVVGTALIKKYPKLESEFVYGDYKVYDVRKMIAKSEQEIGKATAKYFFYSNIMNFFKTEITLANGEIRKRPLIETNGETGEIVWDKGRDFATVRKVLSMPQVNIVKKTEVQTGGFSKESILPKRNSDKLIARKKDWDPKKYGGFDSPTVAYSVLVVAKVEKGKSKKLKSVKELLGITIMERSSFEKNPIDFLEAKGYKEVKKDLIIKLPKYSLFELENGRKRMLASAGELQKGNELALPSKYVNFLYLASHYEKLKGSPEDNEQKQLFVEQHKHYLDEIIEQISEFSKRVILADANLDKVLSAYNKHRDKPIREQAENIIHLFTLTNLGAPAAFKYFDTTIDRKRYTSTKEVLDATLIHQSITGLYETRIDLSQLGGDGGGGGGGTLNIEDEYRLHEISTEPDVSPGSTWLSDFPQAWAETGGMGLAVRQAPLIIPLKATSTPVSIKQYPMSQEAKLGIKPHIQRLLDQGILVPCQSPWNTPLLPVKKPGTNDYRPVQGLREVNKRVEDIHPTVPNPYNLLSGLPTSHRWYTVLDLKDAFFCLRLHPTSQPLFASEWRDPGMGISGQLTWTRLPQGFKNSPTLFNEALHRGLADFRIQHPDLILLQYVDDLLLAATSELDCQQGTRALLKTLGNLGYRASAKKAQICQKQVKYLGYLLREGQRWLTEARKETVMGQPTPKTPRQLREFLGTAGFCRLWIPRFAEMAAPLYPLTKPGTLFNWGPDQQKAYHEIKQALLTAPALGLPDLTKPFELFVDEKQGYAKGVLTQKLGPWRRPVAYLSKKLDPVAAGWPPCLRMVAAIAVLTKDAGKLTMGQPLVILAPHAVEALVKQPPDRWLSNARMTHYQAMLLDTDRVQFGPVVALNPATLLPLPEEGAPHDCLEILAETHGTEPDLTDQPIPDADHTWYTDGSSFLQEGQRKAGAAVTTETEVIWARALPAGTSAQRAELIALTQALKMAEGKRLNVYTDSRYAFATAHIHGEIYKRRGWLTSEGREIKNKSEILALLKALFLPKRLSIIHCLGHQKGDSAEARGNRLADQAAREAAIKTPPDTSTLLAGKRTADGSEFEKRTADGSEFESPKKKAKVE

SEQ ID NO: 6240 - protein, 2082 aa, synthetic construct
MPAAKRVKLDGGDKKYSIGLDIGTNSVGWAVITDEYKVPSKKFKVLGNTDRHSIKKNLIGALLFDSGETAEATRLKRTARRRYTRRKNRICYLQEIFSNEMAKVDDSFFHRLEESFLVEEDKKHERHPIFGNIVDEVAYHEKYPTIYHLRKKLVDSTDKADLRLIYLALAHMIKFRGHFLIEGDLNPDNSDVDKLFIQLVQTYNQLFEENPINASGVDAKAILSARLSKSRRLENLIAQLPGEKKNGLFGNLIALSLGLTPNFKSNFDLAEDAKLQLSKDTYDDDLDNLLAQIGDQYADLFLAAKNLSDAILLSDILRVNTEITKAPLSASMIKRYDEHHQDLTLLKALVRQQLPEKYKEIFFDQSKNGYAGYIDGGASQEEFYKFIKPILEKMDGTEELLVKLNREDLLRKQRTFDNGSIPHQIHLGELHAILRRQEDFYPFLKDNREKIEKILTFRIPYYVGPLARGNSRFAWMTRKSEETITPWNFEEVVDKGASAQSFIERMTNFDKNLPNEKVLPKHSLLYEYFTVYNELTKVKYVTEGMRKPAFLSGEQKKAIVDLLFKTNRKVTVKQLKEDYFKKIECFDSVEISGVEDRFNASLGTYHDLLKIIKDKDFLDNEENEDILEDIVLTLTLFEDREMIEERLKTYAHLFDDKVMKQLKRRRYTGWGRLSRKLINGIRDKQSGKTILDFLKSDGFANRNFMQLIHDDSLTFKEDIQKAQVSGQGDSLHEHIANLAGSPAIKKGILQTVKVVDELVKVMGRHKPENIVIEMARENQTTQKGQKNSRERMKRIEEGIKELGSQILKEHPVENTQLQNEKLYLYYLQNGRDMYVDQELDINRLSDYDVDHIVPQSFLKDDSIDNKVLTRSDKARGKSDNVPSEEVVKKMKNYWRQLLNAKLITQRKFDNLTKAERGGLSELDKAGFIKRQLVETRQITKHVAQILDSRMNTKYDENDKLIREVKVITLKSKLVSDFRKDFQFYKVREINNYHHAHDAYLNAVVGTALIKKYPKLESEFVYGDYKVYDVRKMIAKSEQEIGKATAKYFFYSNIMNFFKTEITLANGEIRKRPLIETNGETGEIVWDKGRDFATVRKVLSMPQVNIVKKTEVQTGGFSKESILPKRNSDKLIARKKDWDPKKYGGFDSPTVAYSVLVVAKVEKGKSKKLKSVKELLGITIMERSSFEKNPIDFLEAKGYKEVKKDLIIKLPKYSLFELENGRKRMLASAGELQKGNELALPSKYVNFLYLASHYEKLKGSPEDNEQKQLFVEQHKHYLDEIIEQISEFSKRVILADANLDKVLSAYNKHRDKPIREQAENIIHLFTLTNLGAPAAFKYFDTTIDRKRYTSTKEVLDATLIHQSITGLYETRIDLSQLGGDGGGGGGGTLQLDDEYRLYSPLVKPDQNIQFWLEQFPQAWAETAGMGLAKQVPPQVIQLKASATPVSVRQYPLSKEAQEGIRPHVQRLIQQGILVPVQSPWNTPLLPVRKPGTNDYRPVQDLREVNKRVQDIHPTVPNPYNLLCALPPQRSWYTVLDLKDAFFCLRLHPTSQPLFAFEWRDPGTGRTGQLTWTRLPQGFKNSPTIFNEALHRDLANFRIQHPQVTLLQYVDDLLLAGATKQDCLEGTKALLLELSDLGYRASAKKAQICRREVTYLGYSLRDGQRWLTEARKKTVVQIPAPTTAKQVREFLGTAGFCRLWIPGFATLAAPLYPLTKPKGEFSWAPEHQKAFDAIKKALLSAPALALPDVTKPFTLYVDERKGVARGVLTQTLGPWRRPVAYLSKKLDPVASGWPVCLKAIAAVAILVKDADKLTLGQNITVIAPHALENIVRQPPDRWMTNARMTHYQSLLLTERVTFAPPAALNPATLLPEETDEPVTHDCHQLLIEETGVRKDLTDIPLTGEVLTWFTDGSSYVVEGKRMAGAAVVDGTRTIWASSLPEGTSAQKAELMALTQALRLAEGKSINIYTDSRYAFATAHVHGAIYKQRGWLTSAGREIKNKEEILSLLEALHLPKRLAIIHCPGHQKAKDPISRGNQMADRVAKQAAQGVNLLAGKRTADGSEFEKRTADGSEFESPKKKAKVE

SEQ ID NO: 6241 - protein, 2079 aa, synthetic construct
MPAAKRVKLDGGDKKYSIGLDIGTNSVGWAVITDEYKVPSKKFKVLGNTDRHSIKKNLIGALLFDSGETAEATRLKRTARRRYTRRKNRICYLQEIFSNEMAKVDDSFFHRLEESFLVEEDKKHERHPIFGNIVDEVAYHEKYPTIYHLRKKLVDSTDKADLRLIYLALAHMIKFRGHFLIEGDLNPDNSDVDKLFIQLVQTYNQLFEENPINASGVDAKAILSARLSKSRRLENLIAQLPGEKKNGLFGNLIALSLGLTPNFKSNFDLAEDAKLQLSKDTYDDDLDNLLAQIGDQYADLFLAAKNLSDAILLSDILRVNTEITKAPLSASMIKRYDEHHQDLTLLKALVRQQLPEKYKEIFFDQSKNGYAGYIDGGASQEEFYKFIKPILEKMDGTEELLVKLNREDLLRKQRTFDNGSIPHQIHLGELHAILRRQEDFYPFLKDNREKIEKILTFRIPYYVGPLARGNSRFAWMTRKSEETITPWNFEEVVDKGASAQSFIERMTNFDKNLPNEKVLPKHSLLYEYFTVYNELTKVKYVTEGMRKPAFLSGEQKKAIVDLLFKTNRKVTVKQLKEDYFKKIECFDSVEISGVEDRFNASLGTYHDLLKIIKDKDFLDNEENEDILEDIVLTLTLFEDREMIEERLKTYAHLFDDKVMKQLKRRRYTGWGRLSRKLINGIRDKQSGKTILDFLKSDGFANRNFMQLIHDDSLTFKEDIQKAQVSGQGDSLHEHIANLAGSPAIKKGILQTVKVVDELVKVMGRHKPENIVIEMARENQTTQKGQKNSRERMKRIEEGIKELGSQILKEHPVENTQLQNEKLYLYYLQNGRDMYVDQELDINRLSDYDVDHIVPQSFLKDDSIDNKVLTRSDKARGKSDNVPSEEVVKKMKNYWRQLLNAKLITQRKFDNLTKAERGGLSELDKAGFIKRQLVETRQITKHVAQILDSRMNTKYDENDKLIREVKVITLKSKLVSDFRKDFQFYKVREINNYHHAHDAYLNAVVGTALIKKYPKLESEFVYGDYKVYDVRKMIAKSEQEIGKATAKYFFYSNIMNFFKTEITLANGEIRKRPLIETNGETGEIVWDKGRDFATVRKVLSMPQVNIVKKTEVQTGGFSKESILPKRNSDKLIARKKDWDPKKYGGFDSPTVAYSVLVVAKVEKGKSKKLKSVKELLGITIMERSSFEKNPIDFLEAKGYKEVKKDLIIKLPKYSLFELENGRKRMLASAGELQKGNELALPSKYVNFLYLASHYEKLKGSPEDNEQKQLFVEQHKHYLDEIIEQISEFSKRVILADANLDKVLSAYNKHRDKPIREQAENIIHLFTLTNLGAPAAFKYFDTTIDRKRYTSTKEVLDATLIHQSITGLYETRIDLSQLGGDGGGGGGGIPWLMKKPLQLTTLVPLQEYEERLLKQTMLTGSYKEKLQSLFLKYDALWQHWENQVGHRRIKPHHIATGTVNPRPQKQYPINPKAKASIQTVINDLLKQGVLIQQNSIMNTPVYPVPKPDGKWRMVLDYREVNKTIPLIAAQNQHSAGILSSIFRGKYKTTLDLSNGFWAHSITPESYWLTAFTWLGQQYCWTRLPQGFLNSPALFNADVVDLLKEVPNVQVYVDDIYISHDDPREHLEQLEKVFSLLLNAGYVVSLKKSEIAQHEVEFLGFNITKEGRGLTETFKQKLLNITPPRDLKQLQSILGKLNFARNFIPNFSELVKPLYNIIATAPGKYITWTTDNSQQLQNIISMLNSAENLEERNPEVRLIMKVNTSPSAGYIRFYNEFAKRPIMYLNYVYTKAEVKFTNTEKLLTTIHKGLIKALDLGMGQEILVYSPIVSMTKIQKTPLPERKALPIRWITWMSYLEDPRIQFHYDKTLPELQQVPTVTDDIIAKIKHPSEFSMVFYTDGSAIKHPNVNKSHNAGMGIAQVQFKPEFTVINTWSIPLGDHTAQLAEVAAVEFACKKALKIDGPVLIVTDSFYVAESVNKELPYWQSNGFFNNKKKPLKHVSKWKSIADCIQLKPDIIIIHEKGHQPTASTFHTEGNNLADKLATQGSYVVNAGKRTADGSEFEKRTADGSEFESPKKKAKVE

SEQ ID NO: 6242 - protein, 2086 aa, synthetic construct
MPAAKRVKLDGGDKKYSIGLDIGTNSVGWAVITDEYKVPSKKFKVLGNTDRHSIKKNLIGALLFDSGETAEATRLKRTARRRYTRRKNRICYLQEIFSNEMAKVDDSFFHRLEESFLVEEDKKHERHPIFGNIVDEVAYHEKYPTIYHLRKKLVDSTDKADLRLIYLALAHMIKFRGHFLIEGDLNPDNSDVDKLFIQLVQTYNQLFEENPINASGVDAKAILSARLSKSRRLENLIAQLPGEKKNGLFGNLIALSLGLTPNFKSNFDLAEDAKLQLSKDTYDDDLDNLLAQIGDQYADLFLAAKNLSDAILLSDILRVNTEITKAPLSASMIKRYDEHHQDLTLLKALVRQQLPEKYKEIFFDQSKNGYAGYIDGGASQEEFYKFIKPILEKMDGTEELLVKLNREDLLRKQRTFDNGSIPHQIHLGELHAILRRQEDFYPFLKDNREKIEKILTFRIPYYVGPLARGNSRFAWMTRKSEETITPWNFEEVVDKGASAQSFIERMTNFDKNLPNEKVLPKHSLLYEYFTVYNELTKVKYVTEGMRKPAFLSGEQKKAIVDLLFKTNRKVTVKQLKEDYFKKIECFDSVEISGVEDRFNASLGTYHDLLKIIKDKDFLDNEENEDILEDIVLTLTLFEDREMIEERLKTYAHLFDDKVMKQLKRRRYTGWGRLSRKLINGIRDKQSGKTILDFLKSDGFANRNFMQLIHDDSLTFKEDIQKAQVSGQGDSLHEHIANLAGSPAIKKGILQTVKVVDELVKVMGRHKPENIVIEMARENQTTQKGQKNSRERMKRIEEGIKELGSQILKEHPVENTQLQNEKLYLYYLQNGRDMYVDQELDINRLSDYDVDHIVPQSFLKDDSIDNKVLTRSDKARGKSDNVPSEEVVKKMKNYWRQLLNAKLITQRKFDNLTKAERGGLSELDKAGFIKRQLVETRQITKHVAQILDSRMNTKYDENDKLIREVKVITLKSKLVSDFRKDFQFYKVREINNYHHAHDAYLNAVVGTALIKKYPKLESEFVYGDYKVYDVRKMIAKSEQEIGKATAKYFFYSNIMNFFKTEITLANGEIRKRPLIETNGETGEIVWDKGRDFATVRKVLSMPQVNIVKKTEVQTGGFSKESILPKRNSDKLIARKKDWDPKKYGGFDSPTVAYSVLVVAKVEKGKSKKLKSVKELLGITIMERSSFEKNPIDFLEAKGYKEVKKDLIIKLPKYSLFELENGRKRMLASAGELQKGNELALPSKYVNFLYLASHYEKLKGSPEDNEQKQLFVEQHKHYLDEIIEQISEFSKRVILADANLDKVLSAYNKHRDKPIREQAENIIHLFTLTNLGAPAAFKYFDTTIDRKRYTSTKEVLDATLIHQSITGLYETRIDLSQLGGDGGGGGGGVLNLEEEYRLHEKPVPSSIDPSWLQLFPTVWAERAGMGLANQVPPVVVELRSGASPVAVRQYPMSKEAREGIRPHIQRFLDLGVLVPCQSPWNTPLLPVKKPGTNDYRPVQDLREINKRVQDIHPTVPNPYNLLSSLPPSHTWYSVLDLKDAFFCLKLHPNSQPLFAFEWRDPEKGNTGQLTWTRLPQGFKNSPTLFDEALHRDLAPFRALNPQVVLLQYVDDLLVAAPTYRDCKEGTQKLLQELSKLGYRVSAKKAQLCQKEVTYLGYLLKEGKRWLTPARKATVMKIPPPTTPRQVREFLGTAGFCRLWIPGFASLAAPLYPLTKESIPFIWTEEHQKAFDRIKEALLSAPALALPDLTKPFTLYVDERAGVARGVLTQTLGPWRRPVAYLSKKLDPVASGWPTCLKAVAAVALLLKDADKLTLGQNVTVIASHSLESIVRQPPDRWMTNARMTHYQSLLLNERVSFAPPAVLNPATLLPVESEATPVHRCSEILAEETGTRRDLKDQPLPGVPAWYTDGSSFIAEGKRRAGAAIVDGKRTVWASSLPEGTSAQKAELVALTQALRLAEGKDINIYTDSRYAFATAHIHGAIYKQRGLLTSAGKDIKNKEEILALLEAIHLPKRVAIIHCPGHQKGNDPVATGNRRADEAAKQAALSTRVLAETTKPAGKRTADGSEFEKRTADGSEFESPKKKAKVE

SEQ ID NO: 6243 - protein, 2086 aa, synthetic construct
MPAAKRVKLDGGDKKYSIGLDIGTNSVGWAVITDEYKVPSKKFKVLGNTDRHSIKKNLIGALLFDSGETAEATRLKRTARRRYTRRKNRICYLQEIFSNEMAKVDDSFFHRLEESFLVEEDKKHERHPIFGNIVDEVAYHEKYPTIYHLRKKLVDSTDKADLRLIYLALAHMIKFRGHFLIEGDLNPDNSDVDKLFIQLVQTYNQLFEENPINASGVDAKAILSARLSKSRRLENLIAQLPGEKKNGLFGNLIALSLGLTPNFKSNFDLAEDAKLQLSKDTYDDDLDNLLAQIGDQYADLFLAAKNLSDAILLSDILRVNTEITKAPLSASMIKRYDEHHQDLTLLKALVRQQLPEKYKEIFFDQSKNGYAGYIDGGASQEEFYKFIKPILEKMDGTEELLVKLNREDLLRKQRTFDNGSIPHQIHLGELHAILRRQEDFYPFLKDNREKIEKILTFRIPYYVGPLARGNSRFAWMTRKSEETITPWNFEEVVDKGASAQSFIERMTNFDKNLPNEKVLPKHSLLYEYFTVYNELTKVKYVTEGMRKPAFLSGEQKKAIVDLLFKTNRKVTVKQLKEDYFKKIECFDSVEISGVEDRFNASLGTYHDLLKIIKDKDFLDNEENEDILEDIVLTLTLFEDREMIEERLKTYAHLFDDKVMKQLKRRRYTGWGRLSRKLINGIRDKQSGKTILDFLKSDGFANRNFMQLIHDDSLTFKEDIQKAQVSGQGDSLHEHIANLAGSPAIKKGILQTVKVVDELVKVMGRHKPENIVIEMARENQTTQKGQKNSRERMKRIEEGIKELGSQILKEHPVENTQLQNEKLYLYYLQNGRDMYVDQELDINRLSDYDVDHIVPQSFLKDDSIDNKVLTRSDKARGKSDNVPSEEVVKKMKNYWRQLLNAKLITQRKFDNLTKAERGGLSELDKAGFIKRQLVETRQITKHVAQILDSRMNTKYDENDKLIREVKVITLKSKLVSDFRKDFQFYKVREINNYHHAHDAYLNAVVGTALIKKYPKLESEFVYGDYKVYDVRKMIAKSEQEIGKATAKYFFYSNIMNFFKTEITLANGEIRKRPLIETNGETGEIVWDKGRDFATVRKVLSMPQVNIVKKTEVQTGGFSKESILPKRNSDKLIARKKDWDPKKYGGFDSPTVAYSVLVVAKVEKGKSKKLKSVKELLGITIMERSSFEKNPIDFLEAKGYKEVKKDLIIKLPKYSLFELENGRKRMLASAGELQKGNELALPSKYVNFLYLASHYEKLKGSPEDNEQKQLFVEQHKHYLDEIIEQISEFSKRVILADANLDKVLSAYNKHRDKPIREQAENIIHLFTLTNLGAPAAFKYFDTTIDRKRYTSTKEVLDATLIHQSITGLYETRIDLSQLGGDGGGGGGGVLNLEEEYRLHEKPVPSSIDPSWLQLFPTVWAERAGMGLANQVPPVVVELRSGASPVAVRQYPMSKEAREGIRPHIQRFLDLGVLVPCQSPWNTPLLPVKKPGTNDYRPVQDLREINKRVQDIHPTVPNPYNLLSSLPPSHTWYSVLDLKDAFFCLKLHPNSQPLFAFEWRDPEKGNTGQLTWTRLPQGFKNSPTLFNEALHRDLAPFRALNPQVVLLQYVDDLLVAAPTYRDCKEGTQKLLQELSKLGYRVSAKKAQLCQKEVTYLGYLLKEGKRWLTPARKATVMKIPPPTTPRQVREFLGKAGFCRLFIPGFASLAAPLYPLTKPSIPFIWTEEHQKAFDRIKEALLSAPALALPDLTKPFTLYVDERAGVARGVLTQTLGPWRRPVAYLSKKLDPVASGWPTCLKAVAAVALLLKDADKLTLGQNVTVIASHSLESIVRQPPDRWMTNARMTHYQSLLLNERVSFAPPAVLNPATLLPVESEATPVHRCSEILAEETGTRRDLKDQPLPGVPAWYTDGSSFIAEGKRRAGAAIVDGKRTVWASSLPEGTSAQKAELVALTQALRLAEGKDINIYTDSRYAFATAHIHGAIYKQRGWLTSAGKDIKNKEEILALLEAIHLPKRVAIIHCPGHQKGNDPVATGNRRADEAAKQAALSTRVLAETTKPAGKRTADGSEFEKRTADGSEFESPKKKAKVE

SEQ ID NO: 6244 - protein, 2091 aa, synthetic construct
MPAAKRVKLDGGDKKYSIGLDIGTNSVGWAVITDEYKVPSKKFKVLGNTDRHSIKKNLIGALLFDSGETAEATRLKRTARRRYTRRKNRICYLQEIFSNEMAKVDDSFFHRLEESFLVEEDKKHERHPIFGNIVDEVAYHEKYPTIYHLRKKLVDSTDKADLRLIYLALAHMIKFRGHFLIEGDLNPDNSDVDKLFIQLVQTYNQLFEENPINASGVDAKAILSARLSKSRRLENLIAQLPGEKKNGLFGNLIALSLGLTPNFKSNFDLAEDAKLQLSKDTYDDDLDNLLAQIGDQYADLFLAAKNLSDAILLSDILRVNTEITKAPLSASMIKRYDEHHQDLTLLKALVRQQLPEKYKEIFFDQSKNGYAGYIDGGASQEEFYKFIKPILEKMDGTEELLVKLNREDLLRKQRTFDNGSIPHQIHLGELHAILRRQEDFYPFLKDNREKIEKILTFRIPYYVGPLARGNSRFAWMTRKSEETITPWNFEEVVDKGASAQSFIERMTNFDKNLPNEKVLPKHSLLYEYFTVYNELTKVKYVTEGMRKPAFLSGEQKKAIVDLLFKTNRKVTVKQLKEDYFKKIECFDSVEISGVEDRFNASLGTYHDLLKIIKDKDFLDNEENEDILEDIVLTLTLFEDREMIEERLKTYAHLFDDKVMKQLKRRRYTGWGRLSRKLINGIRDKQSGKTILDFLKSDGFANRNFMQLIHDDSLTFKEDIQKAQVSGQGDSLHEHIANLAGSPAIKKGILQTVKVVDELVKVMGRHKPENIVIEMARENQTTQKGQKNSRERMKRIEEGIKELGSQILKEHPVENTQLQNEKLYLYYLQNGRDMYVDQELDINRLSDYDVDHIVPQSFLKDDSIDNKVLTRSDKARGKSDNVPSEEVVKKMKNYWRQLLNAKLITQRKFDNLTKAERGGLSELDKAGFIKRQLVETRQITKHVAQILDSRMNTKYDENDKLIREVKVITLKSKLVSDFRKDFQFYKVREINNYHHAHDAYLNAVVGTALIKKYPKLESEFVYGDYKVYDVRKMIAKSEQEIGKATAKYFFYSNIMNFFKTEITLANGEIRKRPLIETNGETGEIVWDKGRDFATVRKVLSMPQVNIVKKTEVQTGGFSKESILPKRNSDKLIARKKDWDPKKYGGFDSPTVAYSVLVVAKVEKGKSKKLKSVKELLGITIMERSSFEKNPIDFLEAKGYKEVKKDLIIKLPKYSLFELENGRKRMLASAGELQKGNELALPSKYVNFLYLASHYEKLKGSPEDNEQKQLFVEQHKHYLDEIIEQISEFSKRVILADANLDKVLSAYNKHRDKPIREQAENIIHLFTLTNLGAPAAFKYFDTTIDRKRYTSTKEVLDATLIHQSITGLYETRIDLSQLGGDGGGGGGGGTAPLEEEYRLFLEAPIQNVTLLEQWKREIPKVWAEINPPGLASTQAPIHVQLLSTALPVRVRQYPITLEAKRSLRETIRKFRAAGILRPVHSPWNTPLLPVRKSGTSEYRMVQDLREVNKRVETIHPTVPNPYTLLSLLPPDRIWYSVLDLKDAFFCIPLAPESQLIFAFEWADAEEGESGQLTWTRLPQGFKNSPTLFNEALNRDLQGFRLDHPSVSLLQYVDDLLIAADTQAACLSATRDLLMTLAELGYRVSGKKAQLCQEEVTYLGFKIHKGSRSLSNSRTQAILQIPVPKTKRQVREFLGTIGYCRLWIPGFAELAQPLYAATRPGNDPLVWGEKEEEAFQSLKLALTQPPALALPSLDKPFQLFVEETSGAAKGVLTQALGPWKRPVAYLSKRLDPVAAGWPRCLRAIAAAALLTREASKLTFGQDIEITSSHNLESLLRSPPDKWLTNARITQYQVLLLDPPRVRFKQTAALNPATLLPETDDTLPIHHCLDTLDSLTSTRPDLTDQPLAQAEATLFTDGSSYIRDGKRYAGAAVVTLDSVIWAEPLPIGTSAQKAELIALTKALEWSKDKSVNIYTDSRYAFATLHVHGMIYRERGWLTAGGKAIKNAPEILALLTAVWLPKRVAVMHCKGHQKDDAPTSTGNRRADEVAREVAIRPLSTQATISAGKRTADGSEFEKRTADGSEFESPKKKAKVE

SEQ ID NO: 6245 - protein, 2095 aa, synthetic construct
MPAAKRVKLDGGDKKYSIGLDIGTNSVGWAVITDEYKVPSKKFKVLGNTDRHSIKKNLIGALLFDSGETAEATRLKRTARRRYTRRKNRICYLQEIFSNEMAKVDDSFFHRLEESFLVEEDKKHERHPIFGNIVDEVAYHEKYPTIYHLRKKLVDSTDKADLRLIYLALAHMIKFRGHFLIEGDLNPDNSDVDKLFIQLVQTYNQLFEENPINASGVDAKAILSARLSKSRRLENLIAQLPGEKKNGLFGNLIALSLGLTPNFKSNFDLAEDAKLQLSKDTYDDDLDNLLAQIGDQYADLFLAAKNLSDAILLSDILRVNTEITKAPLSASMIKRYDEHHQDLTLLKALVRQQLPEKYKEIFFDQSKNGYAGYIDGGASQEEFYKFIKPILEKMDGTEELLVKLNREDLLRKQRTFDNGSIPHQIHLGELHAILRRQEDFYPFLKDNREKIEKILTFRIPYYVGPLARGNSRFAWMTRKSEETITPWNFEEVVDKGASAQSFIERMTNFDKNLPNEKVLPKHSLLYEYFTVYNELTKVKYVTEGMRKPAFLSGEQKKAIVDLLFKTNRKVTVKQLKEDYFKKIECFDSVEISGVEDRFNASLGTYHDLLKIIKDKDFLDNEENEDILEDIVLTLTLFEDREMIEERLKTYAHLFDDKVMKQLKRRRYTGWGRLSRKLINGIRDKQSGKTILDFLKSDGFANRNFMQLIHDDSLTFKEDIQKAQVSGQGDSLHEHIANLAGSPAIKKGILQTVKVVDELVKVMGRHKPENIVIEMARENQTTQKGQKNSRERMKRIEEGIKELGSQILKEHPVENTQLQNEKLYLYYLQNGRDMYVDQELDINRLSDYDVDHIVPQSFLKDDSIDNKVLTRSDKARGKSDNVPSEEVVKKMKNYWRQLLNAKLITQRKFDNLTKAERGGLSELDKAGFIKRQLVETRQITKHVAQILDSRMNTKYDENDKLIREVKVITLKSKLVSDFRKDFQFYKVREINNYHHAHDAYLNAVVGTALIKKYPKLESEFVYGDYKVYDVRKMIAKSEQEIGKATAKYFFYSNIMNFFKTEITLANGEIRKRPLIETNGETGEIVWDKGRDFATVRKVLSMPQVNIVKKTEVQTGGFSKESILPKRNSDKLIARKKDWDPKKYGGFDSPTVAYSVLVVAKVEKGKSKKLKSVKELLGITIMERSSFEKNPIDFLEAKGYKEVKKDLIIKLPKYSLFELENGRKRMLASAGELQKGNELALPSKYVNFLYLASHYEKLKGSPEDNEQKQLFVEQHKHYLDEIIEQISEFSKRVILADANLDKVLSAYNKHRDKPIREQAENIIHLFTLTNLGAPAAFKYFDTTIDRKRYTSTKEVLDATLIHQSITGLYETRIDLSQLGGDGGGGGGGGTVSLQDEHRLFDIPVTTSLPDVWLQDFPQAWAETGGLGRAKCQAPIIIDLKPTAVPVSIKQYPMSLEAHMGIRQHIIKFLELGVLRPCRSPWNTPLLPVKKPGTQDYRPVQDLREINKRTVDIHPTVPNPYNLLSTLKPDYSWYTVLDLKDAFFCLPLAPQSQELFAFEWKDPERGISGQLTWTRLPQGFKNSPTLFNEALHRDLTDFRTQHPEVTLLQYVDDLLLAAPTKKACTQGTRHLLQELGEKGYRASAKKAQICQTKVTYLGYILSEGKRWLTPGRIETVARIPPPRNPREVREFLGTAGFCRLWIPGFAELAAPLYALTKPSTPFTWQTEHQLAFEALKKALLSAPALGLPDTSKPFTLFLDERQGIAKGVLTQKLGPWKRPVAYLSKKLDPVAAGWPPCLRIMAATAMLVKDSAKLTLGQPLTVITPHTLEAIVRQPPDRWITNARLTHYQALLLDTDRVQFGPPVTLNPATLLPVPENQPSPHDCRQVLAETHGTREDLKDQELPDADHTWYTDGSSYLDSGTRRAGAAVVDGHNTIWAQSLPPGTSAQKAELIALTKALELSKGKKANIYTDSRYAFATAHTHGSIYERRGWLTSEGKEIKNKAEIIALLKALFLPQEVAIIHCPGHQKGQDPVAVGNRQADRVARQAAMAEVLTLATEPDNTSHITAGKRTADGSEFEKRTADGSEFESPKKKAKVE

SEQ ID NO: 6246 - protein, 2087 aa, synthetic construct
MPAAKRVKLDGGDKKYSIGLDIGTNSVGWAVITDEYKVPSKKFKVLGNTDRHSIKKNLIGALLFDSGETAEATRLKRTARRRYTRRKNRICYLQEIFSNEMAKVDDSFFHRLEESFLVEEDKKHERHPIFGNIVDEVAYHEKYPTIYHLRKKLVDSTDKADLRLIYLALAHMIKFRGHFLIEGDLNPDNSDVDKLFIQLVQTYNQLFEENPINASGVDAKAILSARLSKSRRLENLIAQLPGEKKNGLFGNLIALSLGLTPNFKSNFDLAEDAKLQLSKDTYDDDLDNLLAQIGDQYADLFLAAKNLSDAILLSDILRVNTEITKAPLSASMIKRYDEHHQDLTLLKALVRQQLPEKYKEIFFDQSKNGYAGYIDGGASQEEFYKFIKPILEKMDGTEELLVKLNREDLLRKQRTFDNGSIPHQIHLGELHAILRRQEDFYPFLKDNREKIEKILTFRIPYYVGPLARGNSRFAWMTRKSEETITPWNFEEVVDKGASAQSFIERMTNFDKNLPNEKVLPKHSLLYEYFTVYNELTKVKYVTEGMRKPAFLSGEQKKAIVDLLFKTNRKVTVKQLKEDYFKKIECFDSVEISGVEDRFNASLGTYHDLLKIIKDKDFLDNEENEDILEDIVLTLTLFEDREMIEERLKTYAHLFDDKVMKQLKRRRYTGWGRLSRKLINGIRDKQSGKTILDFLKSDGFANRNFMQLIHDDSLTFKEDIQKAQVSGQGDSLHEHIANLAGSPAIKKGILQTVKVVDELVKVMGRHKPENIVIEMARENQTTQKGQKNSRERMKRIEEGIKELGSQILKEHPVENTQLQNEKLYLYYLQNGRDMYVDQELDINRLSDYDVDHIVPQSFLKDDSIDNKVLTRSDKARGKSDNVPSEEVVKKMKNYWRQLLNAKLITQRKFDNLTKAERGGLSELDKAGFIKRQLVETRQITKHVAQILDSRMNTKYDENDKLIREVKVITLKSKLVSDFRKDFQFYKVREINNYHHAHDAYLNAVVGTALIKKYPKLESEFVYGDYKVYDVRKMIAKSEQEIGKATAKYFFYSNIMNFFKTEITLANGEIRKRPLIETNGETGEIVWDKGRDFATVRKVLSMPQVNIVKKTEVQTGGFSKESILPKRNSDKLIARKKDWDPKKYGGFDSPTVAYSVLVVAKVEKGKSKKLKSVKELLGITIMERSSFEKNPIDFLEAKGYKEVKKDLIIKLPKYSLFELENGRKRMLASAGELQKGNELALPSKYVNFLYLASHYEKLKGSPEDNEQKQLFVEQHKHYLDEIIEQISEFSKRVILADANLDKVLSAYNKHRDKPIREQAENIIHLFTLTNLGAPAAFKYFDTTIDRKRYTSTKEVLDATLIHQSITGLYETRIDLSQLGGDGGGGGGGGVLNLEEEYRLHEKPVPSSIDPSWLQLFPTVWAERAGMGLANQVPPVVVELRSGASPVAVRQYPMSKEAREGIRPHIQKFLDLGVLVPCRSPWNTPLLPVKKPGTNDYRPVQDLREINKRVQDIHPTVPNPYNLLSSLPPSYTWYSVLDLKDAFFCLRLHPNSQPLFAFEWKDPEKGNTGQLTWTRLPQGFKNSPTLFNEALHRDLAPFRALNPQVVLLQYVDDLLVAAPTYEDCKKGTQKLLQELSKLGYRVSAKKAQLCQREVTYLGYLLKEGKRWLTPARKATVMKIPVPTTPRQVREFLGKAGFCRLFIPGFASLAAPLYPLTKPSIPFIWTEEHQQAFDHIKKALLSAPALALPDLTKPFTLYIDERAGVARGVLTQTLGPWRRPVAYLSKKLDPVASGWPTCLKAVAAVALLLKDADKLTLGQNVTVIASHSLESIVRQPPDRWMTNARMTHYQSLLLNERVSFAPPAVLNPATLLPVESEATPVHRCSEILAEETGTRRDLEDQPLPGVPTWYTDGSSFITEGKRRAGAPIVDGKRTVWASSLPEGTSAQKAELVALTQALRLAEGKNINIYTDSRYAFATAHIHGAIYKQRGWLTSAGKDIKNKEEILALLEAIHLPRRVAIIHCPGHQRGSNPVATGNRRADEAAKQAALSTRVLAGTTKPAGKRTADGSEFEKRTADGSEFESPKKKAKVE

SEQ ID NO: 6247 - protein, 2211 aa, synthetic construct
MPAAKRVKLDGGDKKYSIGLDIGTNSVGWAVITDEYKVPSKKFKVLGNTDRHSIKKNLIGALLFDSGETAEATRLKRTARRRYTRRKNRICYLQEIFSNEMAKVDDSFFHRLEESFLVEEDKKHERHPIFGNIVDEVAYHEKYPTIYHLRKKLVDSTDKADLRLIYLALAHMIKFRGHFLIEGDLNPDNSDVDKLFIQLVQTYNQLFEENPINASGVDAKAILSARLSKSRRLENLIAQLPGEKKNGLFGNLIALSLGLTPNFKSNFDLAEDAKLQLSKDTYDDDLDNLLAQIGDQYADLFLAAKNLSDAILLSDILRVNTEITKAPLSASMIKRYDEHHQDLTLLKALVRQQLPEKYKEIFFDQSKNGYAGYIDGGASQEEFYKFIKPILEKMDGTEELLVKLNREDLLRKQRTFDNGSIPHQIHLGELHAILRRQEDFYPFLKDNREKIEKILTFRIPYYVGPLARGNSRFAWMTRKSEETITPWNFEEVVDKGASAQSFIERMTNFDKNLPNEKVLPKHSLLYEYFTVYNELTKVKYVTEGMRKPAFLSGEQKKAIVDLLFKTNRKVTVKQLKEDYFKKIECFDSVEISGVEDRFNASLGTYHDLLKIIKDKDFLDNEENEDILEDIVLTLTLFEDREMIEERLKTYAHLFDDKVMKQLKRRRYTGWGRLSRKLINGIRDKQSGKTILDFLKSDGFANRNFMQLIHDDSLTFKEDIQKAQVSGQGDSLHEHIANLAGSPAIKKGILQTVKVVDELVKVMGRHKPENIVIEMARENQTTQKGQKNSRERMKRIEEGIKELGSQILKEHPVENTQLQNEKLYLYYLQNGRDMYVDQELDINRLSDYDVDHIVPQSFLKDDSIDNKVLTRSDKARGKSDNVPSEEVVKKMKNYWRQLLNAKLITQRKFDNLTKAERGGLSELDKAGFIKRQLVETRQITKHVAQILDSRMNTKYDENDKLIREVKVITLKSKLVSDFRKDFQFYKVREINNYHHAHDAYLNAVVGTALIKKYPKLESEFVYGDYKVYDVRKMIAKSEQEIGKATAKYFFYSNIMNFFKTEITLANGEIRKRPLIETNGETGEIVWDKGRDFATVRKVLSMPQVNIVKKTEVQTGGFSKESILPKRNSDKLIARKKDWDPKKYGGFDSPTVAYSVLVVAKVEKGKSKKLKSVKELLGITIMERSSFEKNPIDFLEAKGYKEVKKDLIIKLPKYSLFELENGRKRMLASAGELQKGNELALPSKYVNFLYLASHYEKLKGSPEDNEQKQLFVEQHKHYLDEIIEQISEFSKRVILADANLDKVLSAYNKHRDKPIREQAENIIHLFTLTNLGAPAAFKYFDTTIDRKRYTSTKEVLDATLIHQSITGLYETRIDLSQLGGDGGGGGGGGTLGDQGSRGSDPLPEPRVTLTVEGIPTEFLVNTGAEHSVLTKPMGKMGSKRTVVAGATGSKVYPWTTKRLLKIGQKQVTHSFLVIPECPAPLLGRDLLTKLKAQIQFSTEGPQVTWEDRPAMCLVLNLEEEYRLHEKPVPPSIDPSWLQLFPMVWAEKAGMGLANQVPPVVVELKSDASPVAVRQYPMSKEAREGIRPHIQRFLDLGILVPCQSPWNTPLLPVKKPGTNDYRPVQDLREVNKRVQDIHPTVPNPYNLLSSLPPSHTWYSVLDLKDAFFCLKLHPNSQPLFAFEWRDPEKGNTGQLTWTRLPQGFKNSPTLFNEALHRDLASFRALNPQVVMLQYVDDLLVAAPTYRDCKEGTRRLLQELSKLGYRVSAKKAQLCREEVTYLGYLLKGGKRWLTPARKATVMKIPTPTTPRQVREFLGTAGFCRLWIPGFASLAAPLYPLTRPKVPFTWTEAHQEAFGRIKEALLSAPALALPDLTKPFALYVDEKEGVARGVLTQTLGPWRRPVAYLSKKLDPVASGWPTCLKAIAAVALLLKDADKLTLGQNVLVIAPHNLESIVRQPPDRWMTNARMTHYQSLLLNERVSFAPPAILNPATLLPVESDDTPIHICSEILAEETGTRPDLRDQPLPGVPAWYTDGSSFIMDGRRQAGAAIVDNKRTVWASNLPEGTSAQKAELIALTQALRLAEGKSINIYTDSRYAFATAHVHGAIYKQRGWLTSAGKDIKNKEEILALLEAIHLPKRVAIIHCPGHQRGTDPVATGNRKADEAAKQAAQSTRILTETTKNAGKRTADGSEFEKRTADGSEFESPKKKAKVE

SEQ ID NO: 6248 - protein, 2089 aa, synthetic construct
MPAAKRVKLDGGDKKYSIGLDIGTNSVGWAVITDEYKVPSKKFKVLGNTDRHSIKKNLIGALLFDSGETAEATRLKRTARRRYTRRKNRICYLQEIFSNEMAKVDDSFFHRLEESFLVEEDKKHERHPIFGNIVDEVAYHEKYPTIYHLRKKLVDSTDKADLRLIYLALAHMIKFRGHFLIEGDLNPDNSDVDKLFIQLVQTYNQLFEENPINASGVDAKAILSARLSKSRRLENLIAQLPGEKKNGLFGNLIALSLGLTPNFKSNFDLAEDAKLQLSKDTYDDDLDNLLAQIGDQYADLFLAAKNLSDAILLSDILRVNTEITKAPLSASMIKRYDEHHQDLTLLKALVRQQLPEKYKEIFFDQSKNGYAGYIDGGASQEEFYKFIKPILEKMDGTEELLVKLNREDLLRKQRTFDNGSIPHQIHLGELHAILRRQEDFYPFLKDNREKIEKILTFRIPYYVGPLARGNSRFAWMTRKSEETITPWNFEEVVDKGASAQSFIERMTNFDKNLPNEKVLPKHSLLYEYFTVYNELTKVKYVTEGMRKPAFLSGEQKKAIVDLLFKTNRKVTVKQLKEDYFKKIECFDSVEISGVEDRFNASLGTYHDLLKIIKDKDFLDNEENEDILEDIVLTLTLFEDREMIEERLKTYAHLFDDKVMKQLKRRRYTGWGRLSRKLINGIRDKQSGKTILDFLKSDGFANRNFMQLIHDDSLTFKEDIQKAQVSGQGDSLHEHIANLAGSPAIKKGILQTVKVVDELVKVMGRHKPENIVIEMARENQTTQKGQKNSRERMKRIEEGIKELGSQILKEHPVENTQLQNEKLYLYYLQNGRDMYVDQELDINRLSDYDVDHIVPQSFLKDDSIDNKVLTRSDKARGKSDNVPSEEVVKKMKNYWRQLLNAKLITQRKFDNLTKAERGGLSELDKAGFIKRQLVETRQITKHVAQILDSRMNTKYDENDKLIREVKVITLKSKLVSDFRKDFQFYKVREINNYHHAHDAYLNAVVGTALIKKYPKLESEFVYGDYKVYDVRKMIAKSEQEIGKATAKYFFYSNIMNFFKTEITLANGEIRKRPLIETNGETGEIVWDKGRDFATVRKVLSMPQVNIVKKTEVQTGGFSKESILPKRNSDKLIARKKDWDPKKYGGFDSPTVAYSVLVVAKVEKGKSKKLKSVKELLGITIMERSSFEKNPIDFLEAKGYKEVKKDLIIKLPKYSLFELENGRKRMLASAGELQKGNELALPSKYVNFLYLASHYEKLKGSPEDNEQKQLFVEQHKHYLDEIIEQISEFSKRVILADANLDKVLSAYNKHRDKPIREQAENIIHLFTLTNLGAPAAFKYFDTTIDRKRYTSTKEVLDATLIHQSITGLYETRIDLSQLGGDGGGGGGGGTLNLEDEYRLYETSAEPEVSPGSTWLSDFPQAWAETGGMGLAVRQAPLIIPLKATSTPVSIKQYPMSQEAKLGIKPHIQRLLDQGILVPCQSPWNTPLLPVKKPGTNDYRPVQDLREVNKRVEDIHPTVPNPYNLLSGLPPSHRWYTVLDLKDAFFCLRLHPTSQPLFAFEWRDPGMGISGQLTWTRLPQGFKNSPTLFNEALHRDLADFRIQHPDLILLQYVDDILLAATSELDCQQGTRALLLTLGNLGYRASAKKAQLCQKQVKYLGYLLKEGQRWLTEARKETVMGQPTPKTPRQLREFLGKAGFCRLFIPGFAEMAAPLYPLTKPGTLFNWGPDQQKAYQEIKQALLTAPALGLPDLTKPFELFVDEKQGYAKGVLTQKLGPWRRPVAYLSKKLDPVAAGWPPCLRMVAAIAVLRKDAGKLTMGQPLVILAPHAVEALVKQPPDRWLSNARMTHYQAMLLDTDRVQFGPVVALNPATLLPLPEEGAPHDCLEILAETHGTRPDLTDQPIPDADHTWYTDGSSFLQEGQRKAGAAVTTETEVIWARALPAGTSAQRAELIALTQALKMAEGKRLNVYTDSRYAFATAHIHGEIYRRRGWLTSEGREIKNKSEILALLKALFLPKRLSIIHCLGHQKGDSAEARGNRLADQAAREAAIKTPPDTSTLLAGKRTADGSEFEKRTADGSEFESPKKKAKVE

SEQ ID NO: 6249 - protein, 2089 aa, synthetic construct
MPAAKRVKLDGGDKKYSIGLDIGTNSVGWAVITDEYKVPSKKFKVLGNTDRHSIKKNLIGALLFDSGETAEATRLKRTARRRYTRRKNRICYLQEIFSNEMAKVDDSFFHRLEESFLVEEDKKHERHPIFGNIVDEVAYHEKYPTIYHLRKKLVDSTDKADLRLIYLALAHMIKFRGHFLIEGDLNPDNSDVDKLFIQLVQTYNQLFEENPINASGVDAKAILSARLSKSRRLENLIAQLPGEKKNGLFGNLIALSLGLTPNFKSNFDLAEDAKLQLSKDTYDDDLDNLLAQIGDQYADLFLAAKNLSDAILLSDILRVNTEITKAPLSASMIKRYDEHHQDLTLLKALVRQQLPEKYKEIFFDQSKNGYAGYIDGGASQEEFYKFIKPILEKMDGTEELLVKLNREDLLRKQRTFDNGSIPHQIHLGELHAILRRQEDFYPFLKDNREKIEKILTFRIPYYVGPLARGNSRFAWMTRKSEETITPWNFEEVVDKGASAQSFIERMTNFDKNLPNEKVLPKHSLLYEYFTVYNELTKVKYVTEGMRKPAFLSGEQKKAIVDLLFKTNRKVTVKQLKEDYFKKIECFDSVEISGVEDRFNASLGTYHDLLKIIKDKDFLDNEENEDILEDIVLTLTLFEDREMIEERLKTYAHLFDDKVMKQLKRRRYTGWGRLSRKLINGIRDKQSGKTILDFLKSDGFANRNFMQLIHDDSLTFKEDIQKAQVSGQGDSLHEHIANLAGSPAIKKGILQTVKVVDELVKVMGRHKPENIVIEMARENQTTQKGQKNSRERMKRIEEGIKELGSQILKEHPVENTQLQNEKLYLYYLQNGRDMYVDQELDINRLSDYDVDHIVPQSFLKDDSIDNKVLTRSDKARGKSDNVPSEEVVKKMKNYWRQLLNAKLITQRKFDNLTKAERGGLSELDKAGFIKRQLVETRQITKHVAQILDSRMNTKYDENDKLIREVKVITLKSKLVSDFRKDFQFYKVREINNYHHAHDAYLNAVVGTALIKKYPKLESEFVYGDYKVYDVRKMIAKSEQEIGKATAKYFFYSNIMNFFKTEITLANGEIRKRPLIETNGETGEIVWDKGRDFATVRKVLSMPQVNIVKKTEVQTGGFSKESILPKRNSDKLIARKKDWDPKKYGGFDSPTVAYSVLVVAKVEKGKSKKLKSVKELLGITIMERSSFEKNPIDFLEAKGYKEVKKDLIIKLPKYSLFELENGRKRMLASAGELQKGNELALPSKYVNFLYLASHYEKLKGSPEDNEQKQLFVEQHKHYLDEIIEQISEFSKRVILADANLDKVLSAYNKHRDKPIREQAENIIHLFTLTNLGAPAAFKYFDTTIDRKRYTSTKEVLDATLIHQSITGLYETRIDLSQLGGDGGGGGGGGLGIEDEYRLHETSTEPDVSLGSTWLSDFPQAWAETGGMGLAVRQAPLIIPLKATSTPVSIQQYPMSHEARLGIKPHIQRLLDQGILVPCQSPWNTPLLPVKKPGTNDYRPVQDLREVNKRVEDIHPTVPNPYNLLSGLPPSHQWYTVLDLKDAFFCLRLHPTSQPLFAFEWRDPGMGISGQLTWTRLPQGFKNSPTLFNEALHRDLADFRIQHPDLILLQYVDDILLAATSELDCQQGTRALLQTLGDLGYRASAKKAQICQKQVKYLGYLLREGQRWLTEARKETVMGQPVPKTPRQLREFLGKAGFCRLFIPGFAEMAAPLYPLTKPGTLFSWGPDQQKAYQEIKQALLTAPALGLPDLTKPFELFVDEKQGYAKGVLTQKLGPWRRPVAYLSKKLDPVAAGWPPCLRMVAAIAVLTKDAGKLTMGQPLVILAPHAVEALVKQPPDRWLSNARMTHYQAMLLDTDRVQFGPVVALNPATLLPLPEEGAPHDCLEILAETHGTRPDLTDQPIPDADHTWYTDGSSFLQEGQRKAGAAVTTETEVIWAGALPAGTSAQRAELIALTQALKMAEGKRLNVYTDSRYAFATAHIHGEIYRRRGWLTSEGREIKNKSEILALLKALFLPKRLSIIHCLGHQKGDSAEARGNRLADQAAREAAIKTPPDTSTLLIAGKRTADGSEFEKRTADGSEFESPKKKAKVE

SEQ ID NO: 6250 - protein, 2092 aa, synthetic construct
MPAAKRVKLDGGDKKYSIGLDIGTNSVGWAVITDEYKVPSKKFKVLGNTDRHSIKKNLIGALLFDSGETAEATRLKRTARRRYTRRKNRICYLQEIFSNEMAKVDDSFFHRLEESFLVEEDKKHERHPIFGNIVDEVAYHEKYPTIYHLRKKLVDSTDKADLRLIYLALAHMIKFRGHFLIEGDLNPDNSDVDKLFIQLVQTYNQLFEENPINASGVDAKAILSARLSKSRRLENLIAQLPGEKKNGLFGNLIALSLGLTPNFKSNFDLAEDAKLQLSKDTYDDDLDNLLAQIGDQYADLFLAAKNLSDAILLSDILRVNTEITKAPLSASMIKRYDEHHQDLTLLKALVRQQLPEKYKEIFFDQSKNGYAGYIDGGASQEEFYKFIKPILEKMDGTEELLVKLNREDLLRKQRTFDNGSIPHQIHLGELHAILRRQEDFYPFLKDNREKIEKILTFRIPYYVGPLARGNSRFAWMTRKSEETITPWNFEEVVDKGASAQSFIERMTNFDKNLPNEKVLPKHSLLYEYFTVYNELTKVKYVTEGMRKPAFLSGEQKKAIVDLLFKTNRKVTVKQLKEDYFKKIECFDSVEISGVEDRFNASLGTYHDLLKIIKDKDFLDNEENEDILEDIVLTLTLFEDREMIEERLKTYAHLFDDKVMKQLKRRRYTGWGRLSRKLINGIRDKQSGKTILDFLKSDGFANRNFMQLIHDDSLTFKEDIQKAQVSGQGDSLHEHIANLAGSPAIKKGILQTVKVVDELVKVMGRHKPENIVIEMARENQTTQKGQKNSRERMKRIEEGIKELGSQILKEHPVENTQLQNEKLYLYYLQNGRDMYVDQELDINRLSDYDVDHIVPQSFLKDDSIDNKVLTRSDKARGKSDNVPSEEVVKKMKNYWRQLLNAKLITQRKFDNLTKAERGGLSELDKAGFIKRQLVETRQITKHVAQILDSRMNTKYDENDKLIREVKVITLKSKLVSDFRKDFQFYKVREINNYHHAHDAYLNAVVGTALIKKYPKLESEFVYGDYKVYDVRKMIAKSEQEIGKATAKYFFYSNIMNFFKTEITLANGEIRKRPLIETNGETGEIVWDKGRDFATVRKVLSMPQVNIVKKTEVQTGGFSKESILPKRNSDKLIARKKDWDPKKYGGFDSPTVAYSVLVVAKVEKGKSKKLKSVKELLGITIMERSSFEKNPIDFLEAKGYKEVKKDLIIKLPKYSLFELENGRKRMLASAGELQKGNELALPSKYVNFLYLASHYEKLKGSPEDNEQKQLFVEQHKHYLDEIIEQISEFSKRVILADANLDKVLSAYNKHRDKPIREQAENIIHLFTLTNLGAPAAFKYFDTTIDRKRYTSTKEVLDATLIHQSITGLYETRIDLSQLGGDGGGGGGGGGTAPLEEEYRLFLEAPIQNVTLLEQWKREIPKVWAEINPPGLASTQAPIHVQLLSTALPVRVRQYPITLEAKRSLRETIRKFRAAGILRPVHSPWNTPLLPVRKSGTSEYRMVQDLREVNKRVETIHPTVPNPYTLLSLLPPDRIWYSVLDLKDAFFCIPLAPESQLIFAFEWADAEEGESGQLTWTRLPQGFKNSPTLFNEALNRDLQGFRLDHPSVSLLQYVDDLLIAADTQAACLSATRDLLMTLAELGYRVSGKKAQLCQEEVTYLGFKIHKGSRSLSNSRTQAILQIPVPKTKRQVREFLGTIGYCRLWIPGFAELAQPLYAATRPGNDPLVWGEKEEEAFQSLKLALTQPPALALPSLDKPFQLFVEETSGAAKGVLTQALGPWKRPVAYLSKRLDPVAAGWPRCLRAIAAAALLTREASKLTFGQDIEITSSHNLESLLRSPPDKWLTNARITQYQVLLLDPPRVRFKQTAALNPATLLPETDDTLPIHHCLDTLDSLTSTRPDLTDQPLAQAEATLFTDGSSYIRDGKRYAGAAVVTLDSVIWAEPLPIGTSAQKAELIALTKALEWSKDKSVNIYTDSRYAFATLHVHGMIYRERGWLTAGGKAIKNAPEILALLTAVWLPKRVAVMHCKGHQKDDAPTSTGNRRADEVAREVAIRPLSTQATISAGKRTADGSEFEKRTADGSEFESPKKKAKVE

SEQ ID NO: 6251 - protein, 2212 aa, synthetic construct
MPAAKRVKLDGGDKKYSIGLDIGTNSVGWAVITDEYKVPSKKFKVLGNTDRHSIKKNLIGALLFDSGETAEATRLKRTARRRYTRRKNRICYLQEIFSNEMAKVDDSFFHRLEESFLVEEDKKHERHPIFGNIVDEVAYHEKYPTIYHLRKKLVDSTDKADLRLIYLALAHMIKFRGHFLIEGDLNPDNSDVDKLFIQLVQTYNQLFEENPINASGVDAKAILSARLSKSRRLENLIAQLPGEKKNGLFGNLIALSLGLTPNFKSNFDLAEDAKLQLSKDTYDDDLDNLLAQIGDQYADLFLAAKNLSDAILLSDILRVNTEITKAPLSASMIKRYDEHHQDLTLLKALVRQQLPEKYKEIFFDQSKNGYAGYIDGGASQEEFYKFIKPILEKMDGTEELLVKLNREDLLRKQRTFDNGSIPHQIHLGELHAILRRQEDFYPFLKDNREKIEKILTFRIPYYVGPLARGNSRFAWMTRKSEETITPWNFEEVVDKGASAQSFIERMTNFDKNLPNEKVLPKHSLLYEYFTVYNELTKVKYVTEGMRKPAFLSGEQKKAIVDLLFKTNRKVTVKQLKEDYFKKIECFDSVEISGVEDRFNASLGTYHDLLKIIKDKDFLDNEENEDILEDIVLTLTLFEDREMIEERLKTYAHLFDDKVMKQLKRRRYTGWGRLSRKLINGIRDKQSGKTILDFLKSDGFANRNFMQLIHDDSLTFKEDIQKAQVSGQGDSLHEHIANLAGSPAIKKGILQTVKVVDELVKVMGRHKPENIVIEMARENQTTQKGQKNSRERMKRIEEGIKELGSQILKEHPVENTQLQNEKLYLYYLQNGRDMYVDQELDINRLSDYDVDHIVPQSFLKDDSIDNKVLTRSDKARGKSDNVPSEEVVKKMKNYWRQLLNAKLITQRKFDNLTKAERGGLSELDKAGFIKRQLVETRQITKHVAQILDSRMNTKYDENDKLIREVKVITLKSKLVSDFRKDFQFYKVREINNYHHAHDAYLNAVVGTALIKKYPKLESEFVYGDYKVYDVRKMIAKSEQEIGKATAKYFFYSNIMNFFKTEITLANGEIRKRPLIETNGETGEIVWDKGRDFATVRKVLSMPQVNIVKKTEVQTGGFSKESILPKRNSDKLIARKKDWDPKKYGGFDSPTVAYSVLVVAKVEKGKSKKLKSVKELLGITIMERSSFEKNPIDFLEAKGYKEVKKDLIIKLPKYSLFELENGRKRMLASAGELQKGNELALPSKYVNFLYLASHYEKLKGSPEDNEQKQLFVEQHKHYLDEIIEQISEFSKRVILADANLDKVLSAYNKHRDKPIREQAENIIHLFTLTNLGAPAAFKYFDTTIDRKRYTSTKEVLDATLIHQSITGLYETRIDLSQLGGDGGGGGGGGGTLGDQGSRGSDPLPEPRVTLTVEGIPTEFLVNTGAEHSVLTKPMGKMGSKRTVVAGATGSKVYPWTTKRLLKIGQKQVTHSFLVIPECPAPLLGRDLLTKLKAQIQFSTEGPQVTWEDRPAMCLVLNLEEEYRLHEKPVPPSIDPSWLQLFPMVWAEKAGMGLANQVPPVVVELKSDASPVAVRQYPMSKEAREGIRPHIQRFLDLGILVPCQSPWNTPLLPVKKPGTNDYRPVQDLREVNKRVQDIHPTVPNPYNLLSSLPPSHTWYSVLDLKDAFFCLKLHPNSQPLFAFEWRDPEKGNTGQLTWTRLPQGFKNSPTLFNEALHRDLASFRALNPQVVMLQYVDDLLVAAPTYRDCKEGTRRLLQELSKLGYRVSAKKAQLCREEVTYLGYLLKGGKRWLTPARKATVMKIPTPTTPRQVREFLGTAGFCRLWIPGFASLAAPLYPLTRPKVPFTWTEAHQEAFGRIKEALLSAPALALPDLTKPFALYVDEKEGVARGVLTQTLGPWRRPVAYLSKKLDPVASGWPTCLKAIAAVALLLKDADKLTLGQNVLVIAPHNLESIVRQPPDRWMTNARMTHYQSLLLNERVSFAPPAILNPATLLPVESDDTPIHICSEILAEETGTRPDLRDQPLPGVPAWYTDGSSFIMDGRRQAGAAIVDNKRTVWASNLPEGTSAQKAELIALTQALRLAEGKSINIYTDSRYAFATAHVHGAIYKQRGWLTSAGKDIKNKEEILALLEAIHLPKRVAIIHCPGHQRGTDPVATGNRKADEAAKQAAQSTRILTETTKNAGKRTADGSEFEKRTADGSEFESPKKKAKVE

SEQ ID NO: 6252 - protein, 2088 aa, synthetic construct
MPAAKRVKLDGGDKKYSIGLDIGTNSVGWAVITDEYKVPSKKFKVLGNTDRHSIKKNLIGALLFDSGETAEATRLKRTARRRYTRRKNRICYLQEIFSNEMAKVDDSFFHRLEESFLVEEDKKHERHPIFGNIVDEVAYHEKYPTIYHLRKKLVDSTDKADLRLIYLALAHMIKFRGHFLIEGDLNPDNSDVDKLFIQLVQTYNQLFEENPINASGVDAKAILSARLSKSRRLENLIAQLPGEKKNGLFGNLIALSLGLTPNFKSNFDLAEDAKLQLSKDTYDDDLDNLLAQIGDQYADLFLAAKNLSDAILLSDILRVNTEITKAPLSASMIKRYDEHHQDLTLLKALVRQQLPEKYKEIFFDQSKNGYAGYIDGGASQEEFYKFIKPILEKMDGTEELLVKLNREDLLRKQRTFDNGSIPHQIHLGELHAILRRQEDFYPFLKDNREKIEKILTFRIPYYVGPLARGNSRFAWMTRKSEETITPWNFEEVVDKGASAQSFIERMTNFDKNLPNEKVLPKHSLLYEYFTVYNELTKVKYVTEGMRKPAFLSGEQKKAIVDLLFKTNRKVTVKQLKEDYFKKIECFDSVEISGVEDRFNASLGTYHDLLKIIKDKDFLDNEENEDILEDIVLTLTLFEDREMIEERLKTYAHLFDDKVMKQLKRRRYTGWGRLSRKLINGIRDKQSGKTILDFLKSDGFANRNFMQLIHDDSLTFKEDIQKAQVSGQGDSLHEHIANLAGSPAIKKGILQTVKVVDELVKVMGRHKPENIVIEMARENQTTQKGQKNSRERMKRIEEGIKELGSQILKEHPVENTQLQNEKLYLYYLQNGRDMYVDQELDINRLSDYDVDHIVPQSFLKDDSIDNKVLTRSDKARGKSDNVPSEEVVKKMKNYWRQLLNAKLITQRKFDNLTKAERGGLSELDKAGFIKRQLVETRQITKHVAQILDSRMNTKYDENDKLIREVKVITLKSKLVSDFRKDFQFYKVREINNYHHAHDAYLNAVVGTALIKKYPKLESEFVYGDYKVYDVRKMIAKSEQEIGKATAKYFFYSNIMNFFKTEITLANGEIRKRPLIETNGETGEIVWDKGRDFATVRKVLSMPQVNIVKKTEVQTGGFSKESILPKRNSDKLIARKKDWDPKKYGGFDSPTVAYSVLVVAKVEKGKSKKLKSVKELLGITIMERSSFEKNPIDFLEAKGYKEVKKDLIIKLPKYSLFELENGRKRMLASAGELQKGNELALPSKYVNFLYLASHYEKLKGSPEDNEQKQLFVEQHKHYLDEIIEQISEFSKRVILADANLDKVLSAYNKHRDKPIREQAENIIHLFTLTNLGAPAAFKYFDTTIDRKRYTSTKEVLDATLIHQSITGLYETRIDLSQLGGDGGGGGGGGGVLNLEEEYRLHEKPVPSSIDPSWLQLFPTVWAERAGMGLANQVPPVVVELRSGASPVAVRQYPMSKEAREGIRPHIQRFLDLGVLVPCQSPWNTPLLPVKKPGTNDYRPVQDLREINKRVQDIHPTVPNPYNLLSSLPPSHTWYSVLDLKDAFFCLKLHPNSQPLFAFEWRDPEKGNTGQLTWTRLPQGFKNSPTLFDEALHRDLAPFRALNPQVVLLQYVDDLLVAAPTYRDCKEGTQKLLQELSKLGYRVSAKKAQLCQKEVTYLGYLLKEGKRWLTPARKATVMKIPPPTTPRQVREFLGTAGFCRLWIPGFASLAAPLYPLTKESIPFIWTEEHQKAFDRIKEALLSAPALALPDLTKPFTLYVDERAGVARGVLTQTLGPWRRPVAYLSKKLDPVASGWPTCLKAVAAVALLLKDADKLTLGQNVTVIASHSLESIVRQPPDRWMTNARMTHYQSLLLNERVSFAPPAVLNPATLLPVESEATPVHRCSEILAEETGTRRDLKDQPLPGVPAWYTDGSSFIAEGKRRAGAAIVDGKRTVWASSLPEGTSAQKAELVALTQALRLAEGKDINIYTDSRYAFATAHIHGAIYKQRGLLTSAGKDIKNKEEILALLEAIHLPKRVAIIHCPGHQKGNDPVATGNRRADEAAKQAALSTRVLAETTKPAGKRTADGSEFEKRTADGSEFESPKKKAKVE

SEQ ID NO: 6253 - protein, 2090 aa, synthetic construct
MPAAKRVKLDGGDKKYSIGLDIGTNSVGWAVITDEYKVPSKKFKVLGNTDRHSIKKNLIGALLFDSGETAEATRLKRTARRRYTRRKNRICYLQEIFSNEMAKVDDSFFHRLEESFLVEEDKKHERHPIFGNIVDEVAYHEKYPTIYHLRKKLVDSTDKADLRLIYLALAHMIKFRGHFLIEGDLNPDNSDVDKLFIQLVQTYNQLFEENPINASGVDAKAILSARLSKSRRLENLIAQLPGEKKNGLFGNLIALSLGLTPNFKSNFDLAEDAKLQLSKDTYDDDLDNLLAQIGDQYADLFLAAKNLSDAILLSDILRVNTEITKAPLSASMIKRYDEHHQDLTLLKALVRQQLPEKYKEIFFDQSKNGYAGYIDGGASQEEFYKFIKPILEKMDGTEELLVKLNREDLLRKQRTFDNGSIPHQIHLGELHAILRRQEDFYPFLKDNREKIEKILTFRIPYYVGPLARGNSRFAWMTRKSEETITPWNFEEVVDKGASAQSFIERMTNFDKNLPNEKVLPKHSLLYEYFTVYNELTKVKYVTEGMRKPAFLSGEQKKAIVDLLFKTNRKVTVKQLKEDYFKKIECFDSVEISGVEDRFNASLGTYHDLLKIIKDKDFLDNEENEDILEDIVLTLTLFEDREMIEERLKTYAHLFDDKVMKQLKRRRYTGWGRLSRKLINGIRDKQSGKTILDFLKSDGFANRNFMQLIHDDSLTFKEDIQKAQVSGQGDSLHEHIANLAGSPAIKKGILQTVKVVDELVKVMGRHKPENIVIEMARENQTTQKGQKNSRERMKRIEEGIKELGSQILKEHPVENTQLQNEKLYLYYLQNGRDMYVDQELDINRLSDYDVDHIVPQSFLKDDSIDNKVLTRSDKARGKSDNVPSEEVVKKMKNYWRQLLNAKLITQRKFDNLTKAERGGLSELDKAGFIKRQLVETRQITKHVAQILDSRMNTKYDENDKLIREVKVITLKSKLVSDFRKDFQFYKVREINNYHHAHDAYLNAVVGTALIKKYPKLESEFVYGDYKVYDVRKMIAKSEQEIGKATAKYFFYSNIMNFFKTEITLANGEIRKRPLIETNGETGEIVWDKGRDFATVRKVLSMPQVNIVKKTEVQTGGFSKESILPKRNSDKLIARKKDWDPKKYGGFDSPTVAYSVLVVAKVEKGKSKKLKSVKELLGITIMERSSFEKNPIDFLEAKGYKEVKKDLIIKLPKYSLFELENGRKRMLASAGELQKGNELALPSKYVNFLYLASHYEKLKGSPEDNEQKQLFVEQHKHYLDEIIEQISEFSKRVILADANLDKVLSAYNKHRDKPIREQAENIIHLFTLTNLGAPAAFKYFDTTIDRKRYTSTKEVLDATLIHQSITGLYETRIDLSQLGGDGGGGGGGGGTLNIEDEYRLHETSKEPDVPLGSTWLSDFPQAWAETGGMGLAVRQAPLIIPLKATSTPVSIKQYPMSQEARLGIKPHIQRLLDQGILVPCQSPWNTPLLPVKKPGTNDYRPVQDLREVNKRVEDIHPTVPNPYNLLSGLPPSHQWYTVLDLKDAFFCLRLHPTSQPLFAFEWRDPEMGISGQLTWTRLPQGFKNSPTLFNEALHRDLADFRIQHPDLILLQYVDDLLLAATSEQDCQRGTRALLQTLGNLGYRASAKKAQICQKQVKYLGYLLKEGQRWLTEARKETVMGQPTPKTPRQLREFLGKAGFCRLFIPGFAEMAAPLYPLTKPGTLFNWGPDQQKAYQEIKQALLTAPALGLPDLTKPFELFVDEKQGYAKGVLTQKLGPWRRPVAYLSKKLDPVAAGWPPCLRMVAAIAVLTKDAGKLTMGQPLVILAPHAVEALVKQPPDRWLSNARMTHYQAMLLDTDRVQFGPVVALNPATLLPLPEKEAPHDCLEILAETHGTRPDLTDQPIPDADYTWYTDGSSFLQEGQRRAGAAVTTETEVIWARALPAGTSAQRAELIALTQALKMAEGKKLNVYTDSRYAFATAHVHGEIYRRRGWLTSEGREIKNKNEILALLKALFLPKRLSIIHCPGHQKGNSAEARGNRMADQAAREAAMKAVLETSTLLAGKRTADGSEFEKRTADGSEFESPKKKAKVE

SEQ ID NO: 6254 - protein, 2093 aa, synthetic construct
MPAAKRVKLDGGDKKYSIGLDIGTNSVGWAVITDEYKVPSKKFKVLGNTDRHSIKKNLIGALLFDSGETAEATRLKRTARRRYTRRKNRICYLQEIFSNEMAKVDDSFFHRLEESFLVEEDKKHERHPIFGNIVDEVAYHEKYPTIYHLRKKLVDSTDKADLRLIYLALAHMIKFRGHFLIEGDLNPDNSDVDKLFIQLVQTYNQLFEENPINASGVDAKAILSARLSKSRRLENLIAQLPGEKKNGLFGNLIALSLGLTPNFKSNFDLAEDAKLQLSKDTYDDDLDNLLAQIGDQYADLFLAAKNLSDAILLSDILRVNTEITKAPLSASMIKRYDEHHQDLTLLKALVRQQLPEKYKEIFFDQSKNGYAGYIDGGASQEEFYKFIKPILEKMDGTEELLVKLNREDLLRKQRTFDNGSIPHQIHLGELHAILRRQEDFYPFLKDNREKIEKILTFRIPYYVGPLARGNSRFAWMTRKSEETITPWNFEEVVDKGASAQSFIERMTNFDKNLPNEKVLPKHSLLYEYFTVYNELTKVKYVTEGMRKPAFLSGEQKKAIVDLLFKTNRKVTVKQLKEDYFKKIECFDSVEISGVEDRFNASLGTYHDLLKIIKDKDFLDNEENEDILEDIVLTLTLFEDREMIEERLKTYAHLFDDKVMKQLKRRRYTGWGRLSRKLINGIRDKQSGKTILDFLKSDGFANRNFMQLIHDDSLTFKEDIQKAQVSGQGDSLHEHIANLAGSPAIKKGILQTVKVVDELVKVMGRHKPENIVIEMARENQTTQKGQKNSRERMKRIEEGIKELGSQILKEHPVENTQLQNEKLYLYYLQNGRDMYVDQELDINRLSDYDVDHIVPQSFLKDDSIDNKVLTRSDKARGKSDNVPSEEVVKKMKNYWRQLLNAKLITQRKFDNLTKAERGGLSELDKAGFIKRQLVETRQITKHVAQILDSRMNTKYDENDKLIREVKVITLKSKLVSDFRKDFQFYKVREINNYHHAHDAYLNAVVGTALIKKYPKLESEFVYGDYKVYDVRKMIAKSEQEIGKATAKYFFYSNIMNFFKTEITLANGEIRKRPLIETNGETGEIVWDKGRDFATVRKVLSMPQVNIVKKTEVQTGGFSKESILPKRNSDKLIARKKDWDPKKYGGFDSPTVAYSVLVVAKVEKGKSKKLKSVKELLGITIMERSSFEKNPIDFLEAKGYKEVKKDLIIKLPKYSLFELENGRKRMLASAGELQKGNELALPSKYVNFLYLASHYEKLKGSPEDNEQKQLFVEQHKHYLDEIIEQISEFSKRVILADANLDKVLSAYNKHRDKPIREQAENIIHLFTLTNLGAPAAFKYFDTTIDRKRYTSTKEVLDATLIHQSITGLYETRIDLSQLGGDGGGGGGGGGGTAPLEEEYRLFLEAPIQNVTLLEQWKREIPKVWAEINPPGLASTQAPIHVQLLSTALPVRVRQYPITLEAKRSLRETIRKFRAAGILRPVHSPWNTPLLPVRKSGTSEYRMVQDLREVNKRVETIHPTVPNPYTLLSLLPPDRIWYSVLDLKDAFFCIPLAPESQLIFAFEWADAEEGESGQLTWTRLPQGFKNSPTLFDEALNRDLQGFRLDHPSVSLLQYVDDLLIAADTQAACLSATRDLLMTLAELGYRVSGKKAQLCQEEVTYLGFKIHKGSRSLSNSRTQAILQIPVPKTKRQVREFLGTIGYCRLWIPGFAELAQPLYAATRGGNDPLVWGEKEEEAFQSLKLALTQPPALALPSLDKPFQLFVEETSGAAKGVLTQALGPWKRPVAYLSKRLDPVAAGWPRCLRAIAAAALLTREASKLTFGQDIEITSSHNLESLLRSPPDKWLTNARITQYQVLLLDPPRVRFKQTAALNPATLLPETDDTLPIHHCLDTLDSLTSTRPDLTDQPLAQAEATLFTDGSSYIRDGKRYAGAAVVTLDSVIWAEPLPIGTSAQKAELIALTKALEWSKDKSVNIYTDSRYAFATLHVHGMIYRERGLLTAGGKAIKNAPEILALLTAVWLPKRVAVMHCKGHQKDDAPTSTGNRRADEVAREVAIRPLSTQATISAGKRTADGSEFEKRTADGSEFESPKKKAKVE

SEQ ID NO: 6255 - protein, 1996 aa, synthetic construct
MPAAKRVKLDGGDKKYSIGLDIGTNSVGWAVITDEYKVPSKKFKVLGNTDRHSIKKNLIGALLFDSGETAEATRLKRTARRRYTRRKNRICYLQEIFSNEMAKVDDSFFHRLEESFLVEEDKKHERHPIFGNIVDEVAYHEKYPTIYHLRKKLVDSTDKADLRLIYLALAHMIKFRGHFLIEGDLNPDNSDVDKLFIQLVQTYNQLFEENPINASGVDAKAILSARLSKSRRLENLIAQLPGEKKNGLFGNLIALSLGLTPNFKSNFDLAEDAKLQLSKDTYDDDLDNLLAQIGDQYADLFLAAKNLSDAILLSDILRVNTEITKAPLSASMIKRYDEHHQDLTLLKALVRQQLPEKYKEIFFDQSKNGYAGYIDGGASQEEFYKFIKPILEKMDGTEELLVKLNREDLLRKQRTFDNGSIPHQIHLGELHAILRRQEDFYPFLKDNREKIEKILTFRIPYYVGPLARGNSRFAWMTRKSEETITPWNFEEVVDKGASAQSFIERMTNFDKNLPNEKVLPKHSLLYEYFTVYNELTKVKYVTEGMRKPAFLSGEQKKAIVDLLFKTNRKVTVKQLKEDYFKKIECFDSVEISGVEDRFNASLGTYHDLLKIIKDKDFLDNEENEDILEDIVLTLTLFEDREMIEERLKTYAHLFDDKVMKQLKRRRYTGWGRLSRKLINGIRDKQSGKTILDFLKSDGFANRNFMQLIHDDSLTFKEDIQKAQVSGQGDSLHEHIANLAGSPAIKKGILQTVKVVDELVKVMGRHKPENIVIEMARENQTTQKGQKNSRERMKRIEEGIKELGSQILKEHPVENTQLQNEKLYLYYLQNGRDMYVDQELDINRLSDYDVDHIVPQSFLKDDSIDNKVLTRSDKARGKSDNVPSEEVVKKMKNYWRQLLNAKLITQRKFDNLTKAERGGLSELDKAGFIKRQLVETRQITKHVAQILDSRMNTKYDENDKLIREVKVITLKSKLVSDFRKDFQFYKVREINNYHHAHDAYLNAVVGTALIKKYPKLESEFVYGDYKVYDVRKMIAKSEQEIGKATAKYFFYSNIMNFFKTEITLANGEIRKRPLIETNGETGEIVWDKGRDFATVRKVLSMPQVNIVKKTEVQTGGFSKESILPKRNSDKLIARKKDWDPKKYGGFDSPTVAYSVLVVAKVEKGKSKKLKSVKELLGITIMERSSFEKNPIDFLEAKGYKEVKKDLIIKLPKYSLFELENGRKRMLASAGELQKGNELALPSKYVNFLYLASHYEKLKGSPEDNEQKQLFVEQHKHYLDEIIEQISEFSKRVILADANLDKVLSAYNKHRDKPIREQAENIIHLFTLTNLGAPAAFKYFDTTIDRKRYTSTKEVLDATLIHQSITGLYETRIDLSQLGGDGGGGGGGGGGGVLDTPPSHIGLEHLPPPPEVPQFPLNLERLQALQDLVHRSLEAGYISPWDGPGNNPVFPVRKPNGAWRFVHDLRATNALTKPIPALSPGPPDLTAPPTHPPHIICLDLKDAFFQIPVEDRFRFYLSFTLPSPGGLQPHRRFAWRVLPQGFINSPALFQRALQEPLRQVSAAFSQSLLVSYMDDILYASPTEEQRSQCYQALAARLRDLGFQVASEKTSQTPSPVPFLGQMVHEQIVTYQSLPTLQISSPISLHQLQAVLGDLQWVSRGTPTTRRPLQLLYSSLKRHHDPRAIIQLSPEQLQGIAELRQALSHNARSRYNEQEPLLAYVHLTRAGSTLVLFQKGAQFPLAYFQTPLTDNQASPWGLLLLLGCQYLQTQALSSYAKPILKYYHNLPKTSLDNWIQSSEDPRVQELLQLWPQISSQGIQPPGPWKTLITRAEVFLTPQFSPDPIPAALCLFSDGATGRGAYCLWKDHLLDFQAVPAPESAQKGELAGLLAGLAAAPPEPVNIWVDSKYLYSLLRTWVLGAWLQPDPVPSYALLYKSLLRHPAIVVGHVRSHSSASHPIASLNNYVDQLAGKRTADGSEFEKRTADGSEFESPKKKAKVE

SEQ ID NO: 6256 - protein, 2089 aa, synthetic construct
MPAAKRVKLDGGDKKYSIGLDIGTNSVGWAVITDEYKVPSKKFKVLGNTDRHSIKKNLIGALLFDSGETAEATRLKRTARRRYTRRKNRICYLQEIFSNEMAKVDDSFFHRLEESFLVEEDKKHERHPIFGNIVDEVAYHEKYPTIYHLRKKLVDSTDKADLRLIYLALAHMIKFRGHFLIEGDLNPDNSDVDKLFIQLVQTYNQLFEENPINASGVDAKAILSARLSKSRRLENLIAQLPGEKKNGLFGNLIALSLGLTPNFKSNFDLAEDAKLQLSKDTYDDDLDNLLAQIGDQYADLFLAAKNLSDAILLSDILRVNTEITKAPLSASMIKRYDEHHQDLTLLKALVRQQLPEKYKEIFFDQSKNGYAGYIDGGASQEEFYKFIKPILEKMDGTEELLVKLNREDLLRKQRTFDNGSIPHQIHLGELHAILRRQEDFYPFLKDNREKIEKILTFRIPYYVGPLARGNSRFAWMTRKSEETITPWNFEEVVDKGASAQSFIERMTNFDKNLPNEKVLPKHSLLYEYFTVYNELTKVKYVTEGMRKPAFLSGEQKKAIVDLLFKTNRKVTVKQLKEDYFKKIECFDSVEISGVEDRFNASLGTYHDLLKIIKDKDFLDNEENEDILEDIVLTLTLFEDREMIEERLKTYAHLFDDKVMKQLKRRRYTGWGRLSRKLINGIRDKQSGKTILDFLKSDGFANRNFMQLIHDDSLTFKEDIQKAQVSGQGDSLHEHIANLAGSPAIKKGILQTVKVVDELVKVMGRHKPENIVIEMARENQTTQKGQKNSRERMKRIEEGIKELGSQILKEHPVENTQLQNEKLYLYYLQNGRDMYVDQELDINRLSDYDVDHIVPQSFLKDDSIDNKVLTRSDKARGKSDNVPSEEVVKKMKNYWRQLLNAKLITQRKFDNLTKAERGGLSELDKAGFIKRQLVETRQITKHVAQILDSRMNTKYDENDKLIREVKVITLKSKLVSDFRKDFQFYKVREINNYHHAHDAYLNAVVGTALIKKYPKLESEFVYGDYKVYDVRKMIAKSEQEIGKATAKYFFYSNIMNFFKTEITLANGEIRKRPLIETNGETGEIVWDKGRDFATVRKVLSMPQVNIVKKTEVQTGGFSKESILPKRNSDKLIARKKDWDPKKYGGFDSPTVAYSVLVVAKVEKGKSKKLKSVKELLGITIMERSSFEKNPIDFLEAKGYKEVKKDLIIKLPKYSLFELENGRKRMLASAGELQKGNELALPSKYVNFLYLASHYEKLKGSPEDNEQKQLFVEQHKHYLDEIIEQISEFSKRVILADANLDKVLSAYNKHRDKPIREQAENIIHLFTLTNLGAPAAFKYFDTTIDRKRYTSTKEVLDATLIHQSITGLYETRIDLSQLGGDGGGGGGGGGGVLNLEEEYRLHEKPVPSSIDPSWLQLFPTVWAERAGMGLANQVPPVVVELRSGASPVAVRQYPMSKEAREGIRPHIQKFLDLGVLVPCRSPWNTPLLPVKKPGTNDYRPVQDLREINKRVQDIHPTVPNPYNLLSSLPPSYTWYSVLDLKDAFFCLRLHPNSQPLFAFEWKDPEKGNTGQLTWTRLPQGFKNSPTLFNEALHRDLAPFRALNPQVVLLQYVDDLLVAAPTYEDCKKGTQKLLQELSKLGYRVSAKKAQLCQREVTYLGYLLKEGKRWLTPARKATVMKIPVPTTPRQVREFLGKAGFCRLFIPGFASLAAPLYPLTKPSIPFIWTEEHQQAFDHIKKALLSAPALALPDLTKPFTLYIDERAGVARGVLTQTLGPWRRPVAYLSKKLDPVASGWPTCLKAVAAVALLLKDADKLTLGQNVTVIASHSLESIVRQPPDRWMTNARMTHYQSLLLNERVSFAPPAVLNPATLLPVESEATPVHRCSEILAEETGTRRDLEDQPLPGVPTWYTDGSSFITEGKRRAGAPIVDGKRTVWASSLPEGTSAQKAELVALTQALRLAEGKNINIYTDSRYAFATAHIHGAIYKQRGWLTSAGKDIKNKEEILALLEAIHLPRRVAIIHCPGHQRGSNPVATGNRRADEAAKQAALSTRVLAGTTKPAGKRTADGSEFEKRTADGSEFESPKKKAKVE

SEQ ID NO: 6257 - protein, 2213 aa, synthetic construct
MPAAKRVKLDGGDKKYSIGLDIGTNSVGWAVITDEYKVPSKKFKVLGNTDRHSIKKNLIGALLFDSGETAEATRLKRTARRRYTRRKNRICYLQEIFSNEMAKVDDSFFHRLEESFLVEEDKKHERHPIFGNIVDEVAYHEKYPTIYHLRKKLVDSTDKADLRLIYLALAHMIKFRGHFLIEGDLNPDNSDVDKLFIQLVQTYNQLFEENPINASGVDAKAILSARLSKSRRLENLIAQLPGEKKNGLFGNLIALSLGLTPNFKSNFDLAEDAKLQLSKDTYDDDLDNLLAQIGDQYADLFLAAKNLSDAILLSDILRVNTEITKAPLSASMIKRYDEHHQDLTLLKALVRQQLPEKYKEIFFDQSKNGYAGYIDGGASQEEFYKFIKPILEKMDGTEELLVKLNREDLLRKQRTFDNGSIPHQIHLGELHAILRRQEDFYPFLKDNREKIEKILTFRIPYYVGPLARGNSRFAWMTRKSEETITPWNFEEVVDKGASAQSFIERMTNFDKNLPNEKVLPKHSLLYEYFTVYNELTKVKYVTEGMRKPAFLSGEQKKAIVDLLFKTNRKVTVKQLKEDYFKKIECFDSVEISGVEDRFNASLGTYHDLLKIIKDKDFLDNEENEDILEDIVLTLTLFEDREMIEERLKTYAHLFDDKVMKQLKRRRYTGWGRLSRKLINGIRDKQSGKTILDFLKSDGFANRNFMQLIHDDSLTFKEDIQKAQVSGQGDSLHEHIANLAGSPAIKKGILQTVKVVDELVKVMGRHKPENIVIEMARENQTTQKGQKNSRERMKRIEEGIKELGSQILKEHPVENTQLQNEKLYLYYLQNGRDMYVDQELDINRLSDYDVDHIVPQSFLKDDSIDNKVLTRSDKARGKSDNVPSEEVVKKMKNYWRQLLNAKLITQRKFDNLTKAERGGLSELDKAGFIKRQLVETRQITKHVAQILDSRMNTKYDENDKLIREVKVITLKSKLVSDFRKDFQFYKVREINNYHHAHDAYLNAVVGTALIKKYPKLESEFVYGDYKVYDVRKMIAKSEQEIGKATAKYFFYSNIMNFFKTEITLANGEIRKRPLIETNGETGEIVWDKGRDFATVRKVLSMPQVNIVKKTEVQTGGFSKESILPKRNSDKLIARKKDWDPKKYGGFDSPTVAYSVLVVAKVEKGKSKKLKSVKELLGITIMERSSFEKNPIDFLEAKGYKEVKKDLIIKLPKYSLFELENGRKRMLASAGELQKGNELALPSKYVNFLYLASHYEKLKGSPEDNEQKQLFVEQHKHYLDEIIEQISEFSKRVILADANLDKVLSAYNKHRDKPIREQAENIIHLFTLTNLGAPAAFKYFDTTIDRKRYTSTKEVLDATLIHQSITGLYETRIDLSQLGGDGGGGGGGGGGTLGDQGSRGSDPLPEPRVTLTVEGIPTEFLVNTGAEHSVLTKPMGKMGSKRTVVAGATGSKVYPWTTKRLLKIGQKQVTHSFLVIPECPAPLLGRDLLTKLKAQIQFSTEGPQVTWEDRPAMCLVLNLEEEYRLHEKPVPPSIDPSWLQLFPMVWAEKAGMGLANQVPPVVVELKSDASPVAVRQYPMSKEAREGIRPHIQRFLDLGILVPCQSPWNTPLLPVKKPGTNDYRPVQDLREVNKRVQDIHPTVPNPYNLLSSLPPSHTWYSVLDLKDAFFCLKLHPNSQPLFAFEWRDPEKGNTGQLTWTRLPQGFKNSPTLFNEALHRDLASFRALNPQVVMLQYVDDLLVAAPTYRDCKEGTRRLLQELSKLGYRVSAKKAQLCREEVTYLGYLLKGGKRWLTPARKATVMKIPTPTTPRQVREFLGTAGFCRLWIPGFASLAAPLYPLTRPKVPFTWTEAHQEAFGRIKEALLSAPALALPDLTKPFALYVDEKEGVARGVLTQTLGPWRRPVAYLSKKLDPVASGWPTCLKAIAAVALLLKDADKLTLGQNVLVIAPHNLESIVRQPPDRWMTNARMTHYQSLLLNERVSFAPPAILNPATLLPVESDDTPIHICSEILAEETGTRPDLRDQPLPGVPAWYTDGSSFIMDGRRQAGAAIVDNKRTVWASNLPEGTSAQKAELIALTQALRLAEGKSINIYTDSRYAFATAHVHGAIYKQRGWLTSAGKDIKNKEEILALLEAIHLPKRVAIIHCPGHQRGTDPVATGNRKADEAAKQAAQSTRILTETTKNAGKRTADGSEFEKRTADGSEFESPKKKAKVE

SEQ ID NO: 6258 - protein, 2213 aa, synthetic construct
MPAAKRVKLDGGDKKYSIGLDIGTNSVGWAVITDEYKVPSKKFKVLGNTDRHSIKKNLIGALLFDSGETAEATRLKRTARRRYTRRKNRICYLQEIFSNEMAKVDDSFFHRLEESFLVEEDKKHERHPIFGNIVDEVAYHEKYPTIYHLRKKLVDSTDKADLRLIYLALAHMIKFRGHFLIEGDLNPDNSDVDKLFIQLVQTYNQLFEENPINASGVDAKAILSARLSKSRRLENLIAQLPGEKKNGLFGNLIALSLGLTPNFKSNFDLAEDAKLQLSKDTYDDDLDNLLAQIGDQYADLFLAAKNLSDAILLSDILRVNTEITKAPLSASMIKRYDEHHQDLTLLKALVRQQLPEKYKEIFFDQSKNGYAGYIDGGASQEEFYKFIKPILEKMDGTEELLVKLNREDLLRKQRTFDNGSIPHQIHLGELHAILRRQEDFYPFLKDNREKIEKILTFRIPYYVGPLARGNSRFAWMTRKSEETITPWNFEEVVDKGASAQSFIERMTNFDKNLPNEKVLPKHSLLYEYFTVYNELTKVKYVTEGMRKPAFLSGEQKKAIVDLLFKTNRKVTVKQLKEDYFKKIECFDSVEISGVEDRFNASLGTYHDLLKIIKDKDFLDNEENEDILEDIVLTLTLFEDREMIEERLKTYAHLFDDKVMKQLKRRRYTGWGRLSRKLINGIRDKQSGKTILDFLKSDGFANRNFMQLIHDDSLTFKEDIQKAQVSGQGDSLHEHIANLAGSPAIKKGILQTVKVVDELVKVMGRHKPENIVIEMARENQTTQKGQKNSRERMKRIEEGIKELGSQILKEHPVENTQLQNEKLYLYYLQNGRDMYVDQELDINRLSDYDVDHIVPQSFLKDDSIDNKVLTRSDKARGKSDNVPSEEVVKKMKNYWRQLLNAKLITQRKFDNLTKAERGGLSELDKAGFIKRQLVETRQITKHVAQILDSRMNTKYDENDKLIREVKVITLKSKLVSDFRKDFQFYKVREINNYHHAHDAYLNAVVGTALIKKYPKLESEFVYGDYKVYDVRKMIAKSEQEIGKATAKYFFYSNIMNFFKTEITLANGEIRKRPLIETNGETGEIVWDKGRDFATVRKVLSMPQVNIVKKTEVQTGGFSKESILPKRNSDKLIARKKDWDPKKYGGFDSPTVAYSVLVVAKVEKGKSKKLKSVKELLGITIMERSSFEKNPIDFLEAKGYKEVKKDLIIKLPKYSLFELENGRKRMLASAGELQKGNELALPSKYVNFLYLASHYEKLKGSPEDNEQKQLFVEQHKHYLDEIIEQISEFSKRVILADANLDKVLSAYNKHRDKPIREQAENIIHLFTLTNLGAPAAFKYFDTTIDRKRYTSTKEVLDATLIHQSITGLYETRIDLSQLGGDGGGGGGGGGGTLGDQGSRGSDPLPEPRVTLTVEGIPTEFLVNTGAEHSVLTKPMGKMGSKRTVVAGATGSKVYPWTTKRLLKIGQKQVTHSFLVIPECPAPLLGRDLLTKLKAQIQFSTEGPQVTWEDRPAMCLVLNLEEEYRLHEKPVPPSIDPSWLQLFPMVWAEKAGMGLANQVPPVVVELKSDASPVAVRQYPMSKEAREGIRPHIQRFLDLGILVPCQSPWNTPLLPVKKPGTNDYRPVQDLREVNKRVQDIHPTVPNPYNLLSSLPPSHTWYSVLDLKDAFFCLKLHPNSQPLFAFEWRDPEKGNTGQLTWTRLPQGFKNSPTLFNEALHRDLASFRALNPQVVMLQYVDDLLVAAPTYRDCKEGTRRLLQELSKLGYRVSAKKAQLCREEVTYLGYLLKGGKRWLTPARKATVMKIPTPTTPRQVREFLGKAGFCRLFIPGFASLAAPLYPLTRPKVPFTWTEAHQEAFGRIKEALLSAPALALPDLTKPFALYVDEKEGVARGVLTQTLGPWRRPVAYLSKKLDPVASGWPTCLKAIAAVALLLKDADKLTLGQNVLVIAPHNLESIVRQPPDRWMTNARMTHYQSLLLNERVSFAPPAILNPATLLPVESDDTPIHICSEILAEETGTRPDLRDQPLPGVPAWYTDGSSFIMDGRRQAGAAIVDNKRTVWASNLPEGTSAQKAELIALTQALRLAEGKSINIYTDSRYAFATAHVHGAIYKQRGWLTSAGKDIKNKEEILALLEAIHLPKRVAIIHCPGHQRGTDPVATGNRKADEAAKQAAQSTRILTETTKNAGKRTADGSEFEKRTADGSEFESPKKKAKVE

SEQ ID NO: 6259 - protein, 2091 aa, synthetic construct
MPAAKRVKLDGGDKKYSIGLDIGTNSVGWAVITDEYKVPSKKFKVLGNTDRHSIKKNLIGALLFDSGETAEATRLKRTARRRYTRRKNRICYLQEIFSNEMAKVDDSFFHRLEESFLVEEDKKHERHPIFGNIVDEVAYHEKYPTIYHLRKKLVDSTDKADLRLIYLALAHMIKFRGHFLIEGDLNPDNSDVDKLFIQLVQTYNQLFEENPINASGVDAKAILSARLSKSRRLENLIAQLPGEKKNGLFGNLIALSLGLTPNFKSNFDLAEDAKLQLSKDTYDDDLDNLLAQIGDQYADLFLAAKNLSDAILLSDILRVNTEITKAPLSASMIKRYDEHHQDLTLLKALVRQQLPEKYKEIFFDQSKNGYAGYIDGGASQEEFYKFIKPILEKMDGTEELLVKLNREDLLRKQRTFDNGSIPHQIHLGELHAILRRQEDFYPFLKDNREKIEKILTFRIPYYVGPLARGNSRFAWMTRKSEETITPWNFEEVVDKGASAQSFIERMTNFDKNLPNEKVLPKHSLLYEYFTVYNELTKVKYVTEGMRKPAFLSGEQKKAIVDLLFKTNRKVTVKQLKEDYFKKIECFDSVEISGVEDRFNASLGTYHDLLKIIKDKDFLDNEENEDILEDIVLTLTLFEDREMIEERLKTYAHLFDDKVMKQLKRRRYTGWGRLSRKLINGIRDKQSGKTILDFLKSDGFANRNFMQLIHDDSLTFKEDIQKAQVSGQGDSLHEHIANLAGSPAIKKGILQTVKVVDELVKVMGRHKPENIVIEMARENQTTQKGQKNSRERMKRIEEGIKELGSQILKEHPVENTQLQNEKLYLYYLQNGRDMYVDQELDINRLSDYDVDHIVPQSFLKDDSIDNKVLTRSDKARGKSDNVPSEEVVKKMKNYWRQLLNAKLITQRKFDNLTKAERGGLSELDKAGFIKRQLVETRQITKHVAQILDSRMNTKYDENDKLIREVKVITLKSKLVSDFRKDFQFYKVREINNYHHAHDAYLNAVVGTALIKKYPKLESEFVYGDYKVYDVRKMIAKSEQEIGKATAKYFFYSNIMNFFKTEITLANGEIRKRPLIETNGETGEIVWDKGRDFATVRKVLSMPQVNIVKKTEVQTGGFSKESILPKRNSDKLIARKKDWDPKKYGGFDSPTVAYSVLVVAKVEKGKSKKLKSVKELLGITIMERSSFEKNPIDFLEAKGYKEVKKDLIIKLPKYSLFELENGRKRMLASAGELQKGNELALPSKYVNFLYLASHYEKLKGSPEDNEQKQLFVEQHKHYLDEIIEQISEFSKRVILADANLDKVLSAYNKHRDKPIREQAENIIHLFTLTNLGAPAAFKYFDTTIDRKRYTSTKEVLDATLIHQSITGLYETRIDLSQLGGDGGGGGGGGGGTLNLEDEYRLYETSAEPEVSPGSTWLSDFPQAWAETGGMGLAVRQAPLIIPLKATSTPVSIKQYPMSQEAKLGIKPHIQRLLDQGILVPCQSPWNTPLLPVKKPGTNDYRPVQDLREVNKRVEDIHPTVPNPYNLLSGLPPSHRWYTVLDLKDAFFCLRLHPTSQPLFAFEWRDPGMGISGQLTWTRLPQGFKNSPTLFNEALHRDLADFRIQHPDLILLQYVDDILLAATSELDCQQGTRALLLTLGNLGYRASAKKAQLCQKQVKYLGYLLKEGQRWLTEARKETVMGQPTPKTPRQLREFLGTAGFCRLWIPGFAEMAAPLYPLTKPGTLFNWGPDQQKAYQEIKQALLTAPALGLPDLTKPFELFVDEKQGYAKGVLTQKLGPWRRPVAYLSKKLDPVAAGWPPCLRMVAAIAVLRKDAGKLTMGQPLVILAPHAVEALVKQPPDRWLSNARMTHYQAMLLDTDRVQFGPVVALNPATLLPLPEEGAPHDCLEILAETHGTRPDLTDQPIPDADHTWYTDGSSFLQEGQRKAGAAVTTETEVIWARALPAGTSAQRAELIALTQALKMAEGKRLNVYTDSRYAFATAHIHGEIYRRRGWLTSEGREIKNKSEILALLKALFLPKRLSIIHCLGHQKGDSAEARGNRLADQAAREAAIKTPPDTSTLLAGKRTADGSEFEKRTADGSEFESPKKKAKVE

SEQ ID NO: 6260 - protein, 2091 aa, synthetic construct
MPAAKRVKLDGGDKKYSIGLDIGTNSVGWAVITDEYKVPSKKFKVLGNTDRHSIKKNLIGALLFDSGETAEATRLKRTARRRYTRRKNRICYLQEIFSNEMAKVDDSFFHRLEESFLVEEDKKHERHPIFGNIVDEVAYHEKYPTIYHLRKKLVDSTDKADLRLIYLALAHMIKFRGHFLIEGDLNPDNSDVDKLFIQLVQTYNQLFEENPINASGVDAKAILSARLSKSRRLENLIAQLPGEKKNGLFGNLIALSLGLTPNFKSNFDLAEDAKLQLSKDTYDDDLDNLLAQIGDQYADLFLAAKNLSDAILLSDILRVNTEITKAPLSASMIKRYDEHHQDLTLLKALVRQQLPEKYKEIFFDQSKNGYAGYIDGGASQEEFYKFIKPILEKMDGTEELLVKLNREDLLRKQRTFDNGSIPHQIHLGELHAILRRQEDFYPFLKDNREKIEKILTFRIPYYVGPLARGNSRFAWMTRKSEETITPWNFEEVVDKGASAQSFIERMTNFDKNLPNEKVLPKHSLLYEYFTVYNELTKVKYVTEGMRKPAFLSGEQKKAIVDLLFKTNRKVTVKQLKEDYFKKIECFDSVEISGVEDRFNASLGTYHDLLKIIKDKDFLDNEENEDILEDIVLTLTLFEDREMIEERLKTYAHLFDDKVMKQLKRRRYTGWGRLSRKLINGIRDKQSGKTILDFLKSDGFANRNFMQLIHDDSLTFKEDIQKAQVSGQGDSLHEHIANLAGSPAIKKGILQTVKVVDELVKVMGRHKPENIVIEMARENQTTQKGQKNSRERMKRIEEGIKELGSQILKEHPVENTQLQNEKLYLYYLQNGRDMYVDQELDINRLSDYDVDHIVPQSFLKDDSIDNKVLTRSDKARGKSDNVPSEEVVKKMKNYWRQLLNAKLITQRKFDNLTKAERGGLSELDKAGFIKRQLVETRQITKHVAQILDSRMNTKYDENDKLIREVKVITLKSKLVSDFRKDFQFYKVREINNYHHAHDAYLNAVVGTALIKKYPKLESEFVYGDYKVYDVRKMIAKSEQEIGKATAKYFFYSNIMNFFKTEITLANGEIRKRPLIETNGETGEIVWDKGRDFATVRKVLSMPQVNIVKKTEVQTGGFSKESILPKRNSDKLIARKKDWDPKKYGGFDSPTVAYSVLVVAKVEKGKSKKLKSVKELLGITIMERSSFEKNPIDFLEAKGYKEVKKDLIIKLPKYSLFELENGRKRMLASAGELQKGNELALPSKYVNFLYLASHYEKLKGSPEDNEQKQLFVEQHKHYLDEIIEQISEFSKRVILADANLDKVLSAYNKHRDKPIREQAENIIHLFTLTNLGAPAAFKYFDTTIDRKRYTSTKEVLDATLIHQSITGLYETRIDLSQLGGDGGGGGGGGGGTLNIEDEYRLHETSKEPDVSLGSTWLSDFPQAWAETGGMGLAVRQAPLIIPLKATSTPVSIKQYPMSQEARLGIKPHIQRLLDQGILVPCQSPWNTPLLPVKKPGTNDYRPVQDLREVNKRVEDIHPTVPNPYNLLSGLPPSHQWYTVLDLKDAFFCLRLHPTSQPLFAFEWRDPEMGISGQLTWTRLPQGFKNSPTLFNEALHRDLAGFRIQHPDLILLQYVDDLLLAATSELDCQQGTRALLQTLGDLGYRASAKKAQICQKQVKYLGYLLKEGQRWLTEARKETVMGQPIPKTPRQLREFLGTAGFCRLWIPGFAEMAAPLYPLTKPGTLFNWGPDQQKAFQEIKQALLTAPALGLPDLTKPFELFVDEKQGYAKGVLTQKLGPWRRPVAYLSKKLDPVAAGWPPCLRMVAAIAVLTKDAGKLTMGQPLVILAPHAVEALVKQPPDRWLSNARMTHYQALLLDTDRVQFGPVVALNPATLLPLPEEGLQHDCLDILAEAHGTRSDLMDQPLPDADHTWYTDGSSFLQEGQRKAGAAVTTETEVIWARALPAGTSAQRAELIALTQALKMAEGKKLNVYTDSRYAFATAHIHGEIYRRRGWLTSEGKEIKNKDEILALLKALFLPKRLSIIHCPGHQKGNSAEARGNRMADQAAREVATRETPETSTLLAGKRTADGSEFEKRTADGSEFESPKKKAKVE

SEQ ID NO: 6261 - protein, 2082 aa, synthetic construct
MPAAKRVKLDGGDKKYSIGLDIGTNSVGWAVITDEYKVPSKKFKVLGNTDRHSIKKNLIGALLFDSGETAEATRLKRTARRRYTRRKNRICYLQEIFSNEMAKVDDSFFHRLEESFLVEEDKKHERHPIFGNIVDEVAYHEKYPTIYHLRKKLVDSTDKADLRLIYLALAHMIKFRGHFLIEGDLNPDNSDVDKLFIQLVQTYNQLFEENPINASGVDAKAILSARLSKSRRLENLIAQLPGEKKNGLFGNLIALSLGLTPNFKSNFDLAEDAKLQLSKDTYDDDLDNLLAQIGDQYADLFLAAKNLSDAILLSDILRVNTEITKAPLSASMIKRYDEHHQDLTLLKALVRQQLPEKYKEIFFDQSKNGYAGYIDGGASQEEFYKFIKPILEKMDGTEELLVKLNREDLLRKQRTFDNGSIPHQIHLGELHAILRRQEDFYPFLKDNREKIEKILTFRIPYYVGPLARGNSRFAWMTRKSEETITPWNFEEVVDKGASAQSFIERMTNFDKNLPNEKVLPKHSLLYEYFTVYNELTKVKYVTEGMRKPAFLSGEQKKAIVDLLFKTNRKVTVKQLKEDYFKKIECFDSVEISGVEDRFNASLGTYHDLLKIIKDKDFLDNEENEDILEDIVLTLTLFEDREMIEERLKTYAHLFDDKVMKQLKRRRYTGWGRLSRKLINGIRDKQSGKTILDFLKSDGFANRNFMQLIHDDSLTFKEDIQKAQVSGQGDSLHEHIANLAGSPAIKKGILQTVKVVDELVKVMGRHKPENIVIEMARENQTTQKGQKNSRERMKRIEEGIKELGSQILKEHPVENTQLQNEKLYLYYLQNGRDMYVDQELDINRLSDYDVDHIVPQSFLKDDSIDNKVLTRSDKARGKSDNVPSEEVVKKMKNYWRQLLNAKLITQRKFDNLTKAERGGLSELDKAGFIKRQLVETRQITKHVAQILDSRMNTKYDENDKLIREVKVITLKSKLVSDFRKDFQFYKVREINNYHHAHDAYLNAVVGTALIKKYPKLESEFVYGDYKVYDVRKMIAKSEQEIGKATAKYFFYSNIMNFFKTEITLANGEIRKRPLIETNGETGEIVWDKGRDFATVRKVLSMPQVNIVKKTEVQTGGFSKESILPKRNSDKLIARKKDWDPKKYGGFDSPTVAYSVLVVAKVEKGKSKKLKSVKELLGITIMERSSFEKNPIDFLEAKGYKEVKKDLIIKLPKYSLFELENGRKRMLASAGELQKGNELALPSKYVNFLYLASHYEKLKGSPEDNEQKQLFVEQHKHYLDEIIEQISEFSKRVILADANLDKVLSAYNKHRDKPIREQAENIIHLFTLTNLGAPAAFKYFDTTIDRKRYTSTKEVLDATLIHQSITGLYETRIDLSQLGGDGGGGGGGGGGIPWLMKKPLQLTTLVPLQEYEERLLKQTMLTGSYKEKLQSLFLKYDALWQHWENQVGHRRIKPHHIATGTVNPRPQKQYPINPKAKASIQTVINDLLKQGVLIQQNSIMNTPVYPVPKPDGKWRMVLDYREVNKTIPLIAAQNQHSAGILSSIFRGKYKTTLDLSNGFWAHSITPESYWLTAFTWLGQQYCWTRLPQGFLNSPALFNADVVDLLKEVPNVQVYVDDIYISHDDPREHLEQLEKVFSLLLNAGYVVSLKKSEIAQHEVEFLGFNITKEGRGLTETFKQKLLNITPPRDLKQLQSILGLLNFARNFIPNFSELVKPLYNIIATAPGKYITWTTDNSQQLQNIISMLNSAENLEERNPEVRLIMKVNTSPSAGYIRFYNEFAKRPIMYLNYVYTKAEVKFTNTEKLLTTIHKGLIKALDLGMGQEILVYSPIVSMTKIQKTPLPERKALPIRWITWMSYLEDPRIQFHYDKTLPELQQVPTVTDDIIAKIKHPSEFSMVFYTDGSAIKHPNVNKSHNAGMGIAQVQFKPEFTVINTWSIPLGDHTAQLAEVAAVEFACKKALKIDGPVLIVTDSFYVAESVNKELPYWQSNGFFNNKKKPLKHVSKWKSIADCIQLKPDIIIIHEKGHQPTASTFHTEGNNLADKLATQGSYVVNAGKRTADGSEFEKRTADGSEFESPKKKAKVE

SEQ ID NO: 6262 - protein, 2091 aa, synthetic construct
MPAAKRVKLDGGDKKYSIGLDIGTNSVGWAVITDEYKVPSKKFKVLGNTDRHSIKKNLIGALLFDSGETAEATRLKRTARRRYTRRKNRICYLQEIFSNEMAKVDDSFFHRLEESFLVEEDKKHERHPIFGNIVDEVAYHEKYPTIYHLRKKLVDSTDKADLRLIYLALAHMIKFRGHFLIEGDLNPDNSDVDKLFIQLVQTYNQLFEENPINASGVDAKAILSARLSKSRRLENLIAQLPGEKKNGLFGNLIALSLGLTPNFKSNFDLAEDAKLQLSKDTYDDDLDNLLAQIGDQYADLFLAAKNLSDAILLSDILRVNTEITKAPLSASMIKRYDEHHQDLTLLKALVRQQLPEKYKEIFFDQSKNGYAGYIDGGASQEEFYKFIKPILEKMDGTEELLVKLNREDLLRKQRTFDNGSIPHQIHLGELHAILRRQEDFYPFLKDNREKIEKILTFRIPYYVGPLARGNSRFAWMTRKSEETITPWNFEEVVDKGASAQSFIERMTNFDKNLPNEKVLPKHSLLYEYFTVYNELTKVKYVTEGMRKPAFLSGEQKKAIVDLLFKTNRKVTVKQLKEDYFKKIECFDSVEISGVEDRFNASLGTYHDLLKIIKDKDFLDNEENEDILEDIVLTLTLFEDREMIEERLKTYAHLFDDKVMKQLKRRRYTGWGRLSRKLINGIRDKQSGKTILDFLKSDGFANRNFMQLIHDDSLTFKEDIQKAQVSGQGDSLHEHIANLAGSPAIKKGILQTVKVVDELVKVMGRHKPENIVIEMARENQTTQKGQKNSRERMKRIEEGIKELGSQILKEHPVENTQLQNEKLYLYYLQNGRDMYVDQELDINRLSDYDVDHIVPQSFLKDDSIDNKVLTRSDKARGKSDNVPSEEVVKKMKNYWRQLLNAKLITQRKFDNLTKAERGGLSELDKAGFIKRQLVETRQITKHVAQILDSRMNTKYDENDKLIREVKVITLKSKLVSDFRKDFQFYKVREINNYHHAHDAYLNAVVGTALIKKYPKLESEFVYGDYKVYDVRKMIAKSEQEIGKATAKYFFYSNIMNFFKTEITLANGEIRKRPLIETNGETGEIVWDKGRDFATVRKVLSMPQVNIVKKTEVQTGGFSKESILPKRNSDKLIARKKDWDPKKYGGFDSPTVAYSVLVVAKVEKGKSKKLKSVKELLGITIMERSSFEKNPIDFLEAKGYKEVKKDLIIKLPKYSLFELENGRKRMLASAGELQKGNELALPSKYVNFLYLASHYEKLKGSPEDNEQKQLFVEQHKHYLDEIIEQISEFSKRVILADANLDKVLSAYNKHRDKPIREQAENIIHLFTLTNLGAPAAFKYFDTTIDRKRYTSTKEVLDATLIHQSITGLYETRIDLSQLGGDGGGGGGGGGGTLNIEDEYRLHETSKEPDVPLGSTWLSDFPQAWAETGGMGLAVRQAPLIIPLKATSTPVSIKQYPMSQEARLGIKPHIQRLLDQGILVPCQSPWNTPLLPVKKPGTNDYRPVQDLREVNKRVEDIHPTVPNPYNLLSGLPPSHQWYTVLDLKDAFFCLRLHPTSQPLFAFEWRDPEMGISGQLTWTRLPQGFKNSPTLFNEALHRDLADFRIQHPDLILLQYVDDLLLAATSEQDCQRGTRALLQTLGNLGYRASAKKAQICQKQVKYLGYLLKEGQRWLTEARKETVMGQPTPKTPRQLREFLGTAGFCRLWIPGFAEMAAPLYPLTKPGTLFNWGPDQQKAYQEIKQALLTAPALGLPDLTKPFELFVDEKQGYAKGVLTQKLGPWRRPVAYLSKKLDPVAAGWPPCLRMVAAIAVLTKDAGKLTMGQPLVILAPHAVEALVKQPPDRWLSNARMTHYQAMLLDTDRVQFGPVVALNPATLLPLPEKEAPHDCLEILAETHGTRPDLTDQPIPDADYTWYTDGSSFLQEGQRRAGAAVTTETEVIWARALPAGTSAQRAELIALTQALKMAEGKKLNVYTDSRYAFATAHVHGEIYRRRGWLTSEGREIKNKNEILALLKALFLPKRLSIIHCPGHQKGNSAEARGNRMADQAAREAAMKAVLETSTLLAGKRTADGSEFEKRTADGSEFESPKKKAKVE

SEQ ID NO: 6263 - protein, 2091 aa, synthetic construct
MPAAKRVKLDGGDKKYSIGLDIGTNSVGWAVITDEYKVPSKKFKVLGNTDRHSIKKNLIGALLFDSGETAEATRLKRTARRRYTRRKNRICYLQEIFSNEMAKVDDSFFHRLEESFLVEEDKKHERHPIFGNIVDEVAYHEKYPTIYHLRKKLVDSTDKADLRLIYLALAHMIKFRGHFLIEGDLNPDNSDVDKLFIQLVQTYNQLFEENPINASGVDAKAILSARLSKSRRLENLIAQLPGEKKNGLFGNLIALSLGLTPNFKSNFDLAEDAKLQLSKDTYDDDLDNLLAQIGDQYADLFLAAKNLSDAILLSDILRVNTEITKAPLSASMIKRYDEHHQDLTLLKALVRQQLPEKYKEIFFDQSKNGYAGYIDGGASQEEFYKFIKPILEKMDGTEELLVKLNREDLLRKQRTFDNGSIPHQIHLGELHAILRRQEDFYPFLKDNREKIEKILTFRIPYYVGPLARGNSRFAWMTRKSEETITPWNFEEVVDKGASAQSFIERMTNFDKNLPNEKVLPKHSLLYEYFTVYNELTKVKYVTEGMRKPAFLSGEQKKAIVDLLFKTNRKVTVKQLKEDYFKKIECFDSVEISGVEDRFNASLGTYHDLLKIIKDKDFLDNEENEDILEDIVLTLTLFEDREMIEERLKTYAHLFDDKVMKQLKRRRYTGWGRLSRKLINGIRDKQSGKTILDFLKSDGFANRNFMQLIHDDSLTFKEDIQKAQVSGQGDSLHEHIANLAGSPAIKKGILQTVKVVDELVKVMGRHKPENIVIEMARENQTTQKGQKNSRERMKRIEEGIKELGSQILKEHPVENTQLQNEKLYLYYLQNGRDMYVDQELDINRLSDYDVDHIVPQSFLKDDSIDNKVLTRSDKARGKSDNVPSEEVVKKMKNYWRQLLNAKLITQRKFDNLTKAERGGLSELDKAGFIKRQLVETRQITKHVAQILDSRMNTKYDENDKLIREVKVITLKSKLVSDFRKDFQFYKVREINNYHHAHDAYLNAVVGTALIKKYPKLESEFVYGDYKVYDVRKMIAKSEQEIGKATAKYFFYSNIMNFFKTEITLANGEIRKRPLIETNGETGEIVWDKGRDFATVRKVLSMPQVNIVKKTEVQTGGFSKESILPKRNSDKLIARKKDWDPKKYGGFDSPTVAYSVLVVAKVEKGKSKKLKSVKELLGITIMERSSFEKNPIDFLEAKGYKEVKKDLIIKLPKYSLFELENGRKRMLASAGELQKGNELALPSKYVNFLYLASHYEKLKGSPEDNEQKQLFVEQHKHYLDEIIEQISEFSKRVILADANLDKVLSAYNKHRDKPIREQAENIIHLFTLTNLGAPAAFKYFDTTIDRKRYTSTKEVLDATLIHQSITGLYETRIDLSQLGGDGGGGGGGGGGTLNIEDEYRLHETSKEPDVPLGSTWLSDFPQAWAETGGMGLAVRQAPLIIPLKATSTPVSIKQYPMSQEARLGIKPHIQRLLDQGILVPCQSPWNTPLLPVKKPGTNDYRPVQDLREVNKRVEDIHPTVPNPYNLLSGLPPSHQWYTVLDLKDAFFCLRLHPTSQPLFAFEWRDPEMGISGQLTWTRLPQGFKNSPTLFNEALHRDLADFRIQHPDLILLQYVDDLLLAATSEQDCQRGTRALLQTLGNLGYRASAKKAQICQKQVKYLGYLLKEGQRWLTEARKETVMGQPTPKTPRQLREFLGKAGFCRLFIPGFAEMAAPLYPLTKPGTLFNWGPDQQKAYQEIKQALLTAPALGLPDLTKPFELFVDEKQGYAKGVLTQKLGPWRRPVAYLSKKLDPVAAGWPPCLRMVAAIAVLTKDAGKLTMGQPLVILAPHAVEALVKQPPDRWLSNARMTHYQAMLLDTDRVQFGPVVALNPATLLPLPEKEAPHDCLEILAETHGTRPDLTDQPIPDADYTWYTDGSSFLQEGQRRAGAAVTTETEVIWARALPAGTSAQRAELIALTQALKMAEGKKLNVYTDSRYAFATAHVHGEIYRRRGWLTSEGREIKNKNEILALLKALFLPKRLSIIHCPGHQKGNSAEARGNRMADQAAREAAMKAVLETSTLLAGKRTADGSEFEKRTADGSEFESPKKKAKVE

SEQ ID NO: 6264 - protein, 2094 aa, synthetic construct
MPAAKRVKLDGGDKKYSIGLDIGTNSVGWAVITDEYKVPSKKFKVLGNTDRHSIKKNLIGALLFDSGETAEATRLKRTARRRYTRRKNRICYLQEIFSNEMAKVDDSFFHRLEESFLVEEDKKHERHPIFGNIVDEVAYHEKYPTIYHLRKKLVDSTDKADLRLIYLALAHMIKFRGHFLIEGDLNPDNSDVDKLFIQLVQTYNQLFEENPINASGVDAKAILSARLSKSRRLENLIAQLPGEKKNGLFGNLIALSLGLTPNFKSNFDLAEDAKLQLSKDTYDDDLDNLLAQIGDQYADLFLAAKNLSDAILLSDILRVNTEITKAPLSASMIKRYDEHHQDLTLLKALVRQQLPEKYKEIFFDQSKNGYAGYIDGGASQEEFYKFIKPILEKMDGTEELLVKLNREDLLRKQRTFDNGSIPHQIHLGELHAILRRQEDFYPFLKDNREKIEKILTFRIPYYVGPLARGNSRFAWMTRKSEETITPWNFEEVVDKGASAQSFIERMTNFDKNLPNEKVLPKHSLLYEYFTVYNELTKVKYVTEGMRKPAFLSGEQKKAIVDLLFKTNRKVTVKQLKEDYFKKIECFDSVEISGVEDRFNASLGTYHDLLKIIKDKDFLDNEENEDILEDIVLTLTLFEDREMIEERLKTYAHLFDDKVMKQLKRRRYTGWGRLSRKLINGIRDKQSGKTILDFLKSDGFANRNFMQLIHDDSLTFKEDIQKAQVSGQGDSLHEHIANLAGSPAIKKGILQTVKVVDELVKVMGRHKPENIVIEMARENQTTQKGQKNSRERMKRIEEGIKELGSQILKEHPVENTQLQNEKLYLYYLQNGRDMYVDQELDINRLSDYDVDHIVPQSFLKDDSIDNKVLTRSDKARGKSDNVPSEEVVKKMKNYWRQLLNAKLITQRKFDNLTKAERGGLSELDKAGFIKRQLVETRQITKHVAQILDSRMNTKYDENDKLIREVKVITLKSKLVSDFRKDFQFYKVREINNYHHAHDAYLNAVVGTALIKKYPKLESEFVYGDYKVYDVRKMIAKSEQEIGKATAKYFFYSNIMNFFKTEITLANGEIRKRPLIETNGETGEIVWDKGRDFATVRKVLSMPQVNIVKKTEVQTGGFSKESILPKRNSDKLIARKKDWDPKKYGGFDSPTVAYSVLVVAKVEKGKSKKLKSVKELLGITIMERSSFEKNPIDFLEAKGYKEVKKDLIIKLPKYSLFELENGRKRMLASAGELQKGNELALPSKYVNFLYLASHYEKLKGSPEDNEQKQLFVEQHKHYLDEIIEQISEFSKRVILADANLDKVLSAYNKHRDKPIREQAENIIHLFTLTNLGAPAAFKYFDTTIDRKRYTSTKEVLDATLIHQSITGLYETRIDLSQLGGDGGGGGGGGGGGTAPLEEEYRLFLEAPIQNVTLLEQWKREIPKVWAEINPPGLASTQAPIHVQLLSTALPVRVRQYPITLEAKRSLRETIRKFRAAGILRPVHSPWNTPLLPVRKSGTSEYRMVQDLREVNKRVETIHPTVPNPYTLLSLLPPDRIWYSVLDLKDAFFCIPLAPESQLIFAFEWADAEEGESGQLTWTRLPQGFKNSPTLFNEALNRDLQGFRLDHPSVSLLQYVDDLLIAADTQAACLSATRDLLMTLAELGYRVSGKKAQLCQEEVTYLGFKIHKGSRSLSNSRTQAILQIPVPKTKRQVREFLGTIGYCRLWIPGFAELAQPLYAATRPGNDPLVWGEKEEEAFQSLKLALTQPPALALPSLDKPFQLFVEETSGAAKGVLTQALGPWKRPVAYLSKRLDPVAAGWPRCLRAIAAAALLTREASKLTFGQDIEITSSHNLESLLRSPPDKWLTNARITQYQVLLLDPPRVRFKQTAALNPATLLPETDDTLPIHHCLDTLDSLTSTRPDLTDQPLAQAEATLFTDGSSYIRDGKRYAGAAVVTLDSVIWAEPLPIGTSAQKAELIALTKALEWSKDKSVNIYTDSRYAFATLHVHGMIYRERGWLTAGGKAIKNAPEILALLTAVWLPKRVAVMHCKGHQKDDAPTSTGNRRADEVAREVAIRPLSTQATISAGKRTADGSEFEKRTADGSEFESPKKKAKVE

SEQ ID NO: 6265 - protein, 2094 aa, synthetic construct
MPAAKRVKLDGGDKKYSIGLDIGTNSVGWAVITDEYKVPSKKFKVLGNTDRHSIKKNLIGALLFDSGETAEATRLKRTARRRYTRRKNRICYLQEIFSNEMAKVDDSFFHRLEESFLVEEDKKHERHPIFGNIVDEVAYHEKYPTIYHLRKKLVDSTDKADLRLIYLALAHMIKFRGHFLIEGDLNPDNSDVDKLFIQLVQTYNQLFEENPINASGVDAKAILSARLSKSRRLENLIAQLPGEKKNGLFGNLIALSLGLTPNFKSNFDLAEDAKLQLSKDTYDDDLDNLLAQIGDQYADLFLAAKNLSDAILLSDILRVNTEITKAPLSASMIKRYDEHHQDLTLLKALVRQQLPEKYKEIFFDQSKNGYAGYIDGGASQEEFYKFIKPILEKMDGTEELLVKLNREDLLRKQRTFDNGSIPHQIHLGELHAILRRQEDFYPFLKDNREKIEKILTFRIPYYVGPLARGNSRFAWMTRKSEETITPWNFEEVVDKGASAQSFIERMTNFDKNLPNEKVLPKHSLLYEYFTVYNELTKVKYVTEGMRKPAFLSGEQKKAIVDLLFKTNRKVTVKQLKEDYFKKIECFDSVEISGVEDRFNASLGTYHDLLKIIKDKDFLDNEENEDILEDIVLTLTLFEDREMIEERLKTYAHLFDDKVMKQLKRRRYTGWGRLSRKLINGIRDKQSGKTILDFLKSDGFANRNFMQLIHDDSLTFKEDIQKAQVSGQGDSLHEHIANLAGSPAIKKGILQTVKVVDELVKVMGRHKPENIVIEMARENQTTQKGQKNSRERMKRIEEGIKELGSQILKEHPVENTQLQNEKLYLYYLQNGRDMYVDQELDINRLSDYDVDHIVPQSFLKDDSIDNKVLTRSDKARGKSDNVPSEEVVKKMKNYWRQLLNAKLITQRKFDNLTKAERGGLSELDKAGFIKRQLVETRQITKHVAQILDSRMNTKYDENDKLIREVKVITLKSKLVSDFRKDFQFYKVREINNYHHAHDAYLNAVVGTALIKKYPKLESEFVYGDYKVYDVRKMIAKSEQEIGKATAKYFFYSNIMNFFKTEITLANGEIRKRPLIETNGETGEIVWDKGRDFATVRKVLSMPQVNIVKKTEVQTGGFSKESILPKRNSDKLIARKKDWDPKKYGGFDSPTVAYSVLVVAKVEKGKSKKLKSVKELLGITIMERSSFEKNPIDFLEAKGYKEVKKDLIIKLPKYSLFELENGRKRMLASAGELQKGNELALPSKYVNFLYLASHYEKLKGSPEDNEQKQLFVEQHKHYLDEIIEQISEFSKRVILADANLDKVLSAYNKHRDKPIREQAENIIHLFTLTNLGAPAAFKYFDTTIDRKRYTSTKEVLDATLIHQSITGLYETRIDLSQLGGDGGGGGGGGGGGTAPLEEEYRLFLEAPIQNVTLLEQWKREIPKVWAEINPPGLASTQAPIHVQLLSTALPVRVRQYPITLEAKRSLRETIRKFRAAGILRPVHSPWNTPLLPVRKSGTSEYRMVQDLREVNKRVETIHPTVPNPYTLLSLLPPDRIWYSVLDLKDAFFCIPLAPESQLIFAFEWADAEEGESGQLTWTRLPQGFKNSPTLFNEALNRDLQGFRLDHPSVSLLQYVDDLLIAADTQAACLSATRDLLMTLAELGYRVSGKKAQLCQEEVTYLGFKIHKGSRSLSNSRTQAILQIPVPKTKRQVREFLGKIGYCRLFIPGFAELAQPLYAATRPGNDPLVWGEKEEEAFQSLKLALTQPPALALPSLDKPFQLFVEETSGAAKGVLTQALGPWKRPVAYLSKRLDPVAAGWPRCLRAIAAAALLTREASKLTFGQDIEITSSHNLESLLRSPPDKWLTNARITQYQVLLLDPPRVRFKQTAALNPATLLPETDDTLPIHHCLDTLDSLTSTRPDLTDQPLAQAEATLFTDGSSYIRDGKRYAGAAVVTLDSVIWAEPLPIGTSAQKAELIALTKALEWSKDKSVNIYTDSRYAFATLHVHGMIYRERGWLTAGGKAIKNAPEILALLTAVWLPKRVAVMHCKGHQKDDAPTSTGNRRADEVAREVAIRPLSTQATISAGKRTADGSEFEKRTADGSEFESPKKKAKVE

SEQ ID NO: 6266 - protein, 2098 aa, synthetic construct
MPAAKRVKLDGGDKKYSIGLDIGTNSVGWAVITDEYKVPSKKFKVLGNTDRHSIKKNLIGALLFDSGETAEATRLKRTARRRYTRRKNRICYLQEIFSNEMAKVDDSFFHRLEESFLVEEDKKHERHPIFGNIVDEVAYHEKYPTIYHLRKKLVDSTDKADLRLIYLALAHMIKFRGHFLIEGDLNPDNSDVDKLFIQLVQTYNQLFEENPINASGVDAKAILSARLSKSRRLENLIAQLPGEKKNGLFGNLIALSLGLTPNFKSNFDLAEDAKLQLSKDTYDDDLDNLLAQIGDQYADLFLAAKNLSDAILLSDILRVNTEITKAPLSASMIKRYDEHHQDLTLLKALVRQQLPEKYKEIFFDQSKNGYAGYIDGGASQEEFYKFIKPILEKMDGTEELLVKLNREDLLRKQRTFDNGSIPHQIHLGELHAILRRQEDFYPFLKDNREKIEKILTFRIPYYVGPLARGNSRFAWMTRKSEETITPWNFEEVVDKGASAQSFIERMTNFDKNLPNEKVLPKHSLLYEYFTVYNELTKVKYVTEGMRKPAFLSGEQKKAIVDLLFKTNRKVTVKQLKEDYFKKIECFDSVEISGVEDRFNASLGTYHDLLKIIKDKDFLDNEENEDILEDIVLTLTLFEDREMIEERLKTYAHLFDDKVMKQLKRRRYTGWGRLSRKLINGIRDKQSGKTILDFLKSDGFANRNFMQLIHDDSLTFKEDIQKAQVSGQGDSLHEHIANLAGSPAIKKGILQTVKVVDELVKVMGRHKPENIVIEMARENQTTQKGQKNSRERMKRIEEGIKELGSQILKEHPVENTQLQNEKLYLYYLQNGRDMYVDQELDINRLSDYDVDHIVPQSFLKDDSIDNKVLTRSDKARGKSDNVPSEEVVKKMKNYWRQLLNAKLITQRKFDNLTKAERGGLSELDKAGFIKRQLVETRQITKHVAQILDSRMNTKYDENDKLIREVKVITLKSKLVSDFRKDFQFYKVREINNYHHAHDAYLNAVVGTALIKKYPKLESEFVYGDYKVYDVRKMIAKSEQEIGKATAKYFFYSNIMNFFKTEITLANGEIRKRPLIETNGETGEIVWDKGRDFATVRKVLSMPQVNIVKKTEVQTGGFSKESILPKRNSDKLIARKKDWDPKKYGGFDSPTVAYSVLVVAKVEKGKSKKLKSVKELLGITIMERSSFEKNPIDFLEAKGYKEVKKDLIIKLPKYSLFELENGRKRMLASAGELQKGNELALPSKYVNFLYLASHYEKLKGSPEDNEQKQLFVEQHKHYLDEIIEQISEFSKRVILADANLDKVLSAYNKHRDKPIREQAENIIHLFTLTNLGAPAAFKYFDTTIDRKRYTSTKEVLDATLIHQSITGLYETRIDLSQLGGDGGGGGGGGGGGTVSLQDEHRLFDIPVTTSLPDVWLQDFPQAWAETGGLGRAKCQAPIIIDLKPTAVPVSIKQYPMSLEAHMGIRQHIIKFLELGVLRPCRSPWNTPLLPVKKPGTQDYRPVQDLREINKRTVDIHPTVPNPYNLLSTLKPDYSWYTVLDLKDAFFCLPLAPQSQELFAFEWKDPERGISGQLTWTRLPQGFKNSPTLFNEALHRDLTDFRTQHPEVTLLQYVDDLLLAAPTKKACTQGTRHLLQELGEKGYRASAKKAQICQTKVTYLGYILSEGKRWLTPGRIETVARIPPPRNPREVREFLGKAGFCRLFIPGFAELAAPLYALTKPSTPFTWQTEHQLAFEALKKALLSAPALGLPDTSKPFTLFLDERQGIAKGVLTQKLGPWKRPVAYLSKKLDPVAAGWPPCLRIMAATAMLVKDSAKLTLGQPLTVITPHTLEAIVRQPPDRWITNARLTHYQALLLDTDRVQFGPPVTLNPATLLPVPENQPSPHDCRQVLAETHGTREDLKDQELPDADHTWYTDGSSYLDSGTRRAGAAVVDGHNTIWAQSLPPGTSAQKAELIALTKALELSKGKKANIYTDSRYAFATAHTHGSIYERRGWLTSEGKEIKNKAEIIALLKALFLPQEVAIIHCPGHQKGQDPVAVGNRQADRVARQAAMAEVLTLATEPDNTSHITAGKRTADGSEFEKRTADGSEFESPKKKAKVE

SEQ ID NO: 6267 - protein, 2091 aa, synthetic construct
MPAAKRVKLDGGDKKYSIGLDIGTNSVGWAVITDEYKVPSKKFKVLGNTDRHSIKKNLIGALLFDSGETAEATRLKRTARRRYTRRKNRICYLQEIFSNEMAKVDDSFFHRLEESFLVEEDKKHERHPIFGNIVDEVAYHEKYPTIYHLRKKLVDSTDKADLRLIYLALAHMIKFRGHFLIEGDLNPDNSDVDKLFIQLVQTYNQLFEENPINASGVDAKAILSARLSKSRRLENLIAQLPGEKKNGLFGNLIALSLGLTPNFKSNFDLAEDAKLQLSKDTYDDDLDNLLAQIGDQYADLFLAAKNLSDAILLSDILRVNTEITKAPLSASMIKRYDEHHQDLTLLKALVRQQLPEKYKEIFFDQSKNGYAGYIDGGASQEEFYKFIKPILEKMDGTEELLVKLNREDLLRKQRTFDNGSIPHQIHLGELHAILRRQEDFYPFLKDNREKIEKILTFRIPYYVGPLARGNSRFAWMTRKSEETITPWNFEEVVDKGASAQSFIERMTNFDKNLPNEKVLPKHSLLYEYFTVYNELTKVKYVTEGMRKPAFLSGEQKKAIVDLLFKTNRKVTVKQLKEDYFKKIECFDSVEISGVEDRFNASLGTYHDLLKIIKDKDFLDNEENEDILEDIVLTLTLFEDREMIEERLKTYAHLFDDKVMKQLKRRRYTGWGRLSRKLINGIRDKQSGKTILDFLKSDGFANRNFMQLIHDDSLTFKEDIQKAQVSGQGDSLHEHIANLAGSPAIKKGILQTVKVVDELVKVMGRHKPENIVIEMARENQTTQKGQKNSRERMKRIEEGIKELGSQILKEHPVENTQLQNEKLYLYYLQNGRDMYVDQELDINRLSDYDVDHIVPQSFLKDDSIDNKVLTRSDKARGKSDNVPSEEVVKKMKNYWRQLLNAKLITQRKFDNLTKAERGGLSELDKAGFIKRQLVETRQITKHVAQILDSRMNTKYDENDKLIREVKVITLKSKLVSDFRKDFQFYKVREINNYHHAHDAYLNAVVGTALIKKYPKLESEFVYGDYKVYDVRKMIAKSEQEIGKATAKYFFYSNIMNFFKTEITLANGEIRKRPLIETNGETGEIVWDKGRDFATVRKVLSMPQVNIVKKTEVQTGGFSKESILPKRNSDKLIARKKDWDPKKYGGFDSPTVAYSVLVVAKVEKGKSKKLKSVKELLGITIMERSSFEKNPIDFLEAKGYKEVKKDLIIKLPKYSLFELENGRKRMLASAGELQKGNELALPSKYVNFLYLASHYEKLKGSPEDNEQKQLFVEQHKHYLDEIIEQISEFSKRVILADANLDKVLSAYNKHRDKPIREQAENIIHLFTLTNLGAPAAFKYFDTTIDRKRYTSTKEVLDATLIHQSITGLYETRIDLSQLGGDGGGGGGGGGGGTLQLEEEYRLFEPESTQKQEMDIWLKNFPQAWAETGGMGTAHCQAPVLIQLKATATPISIRQYPMPHEAYQGIKPHIRRMLDQGILKPCQSPWNTPLLPVKKPGTEDYRPVQDLREVNKRVEDIHPTVPNPYNLLSTLPPSHPWYTVLDLKDAFFCLRLHSESQLLFAFEWRDPEIGLSGQLTWTRLPQGFKNSPTLFNEALHSDLADFRVRYPALVLLQYVDDLLLAAATRTECLEGTKALLETLGNKGYRASAKKAQICLQEVTYLGYSLKDGQRWLTKARKEAILSIPVPKNSRQVREFLGKAGYCRLFIPGFAELAAPLYPLTRPGTLFQWGTEQQLAFEDIKKALLSSPALGLPDITKPFELFIDENSGFAKGVLVQKLGPWKRPVAYLSKKLDTVASGWPPCLRMVAAIAILVKDAGKLTLGQPLTILTSHPVEALVRQPPNKWLSNARMTHYQAMLLDAERVHFGPTVSLNPATLLPLPSGGNHHDCLQILAETHGTRPDLTDQPLPDADLTWYTDGSSFIRNGEREAGAAVTTESEVIWAAPLPPGTSAQRAELIALTQALKMAEGKKLTVYTDSRYAFATTHVHGEIYRRRGWLTSEGKEIKNKNEILALLEALFLPKRLSIIHCPGHQKGDSPQAKGNRLADDTAKKAATETHSSLTVLPAGKRTADGSEFEKRTADGSEFESPKKKAKVE

SEQ ID NO: 6268 - protein, 2123 aa, synthetic construct
MPAAKRVKLDGGDKKYSIGLDIGTNSVGWAVITDEYKVPSKKFKVLGNTDRHSIKKNLIGALLFDSGETAEATRLKRTARRRYTRRKNRICYLQEIFSNEMAKVDDSFFHRLEESFLVEEDKKHERHPIFGNIVDEVAYHEKYPTIYHLRKKLVDSTDKADLRLIYLALAHMIKFRGHFLIEGDLNPDNSDVDKLFIQLVQTYNQLFEENPINASGVDAKAILSARLSKSRRLENLIAQLPGEKKNGLFGNLIALSLGLTPNFKSNFDLAEDAKLQLSKDTYDDDLDNLLAQIGDQYADLFLAAKNLSDAILLSDILRVNTEITKAPLSASMIKRYDEHHQDLTLLKALVRQQLPEKYKEIFFDQSKNGYAGYIDGGASQEEFYKFIKPILEKMDGTEELLVKLNREDLLRKQRTFDNGSIPHQIHLGELHAILRRQEDFYPFLKDNREKIEKILTFRIPYYVGPLARGNSRFAWMTRKSEETITPWNFEEVVDKGASAQSFIERMTNFDKNLPNEKVLPKHSLLYEYFTVYNELTKVKYVTEGMRKPAFLSGEQKKAIVDLLFKTNRKVTVKQLKEDYFKKIECFDSVEISGVEDRFNASLGTYHDLLKIIKDKDFLDNEENEDILEDIVLTLTLFEDREMIEERLKTYAHLFDDKVMKQLKRRRYTGWGRLSRKLINGIRDKQSGKTILDFLKSDGFANRNFMQLIHDDSLTFKEDIQKAQVSGQGDSLHEHIANLAGSPAIKKGILQTVKVVDELVKVMGRHKPENIVIEMARENQTTQKGQKNSRERMKRIEEGIKELGSQILKEHPVENTQLQNEKLYLYYLQNGRDMYVDQELDINRLSDYDVDHIVPQSFLKDDSIDNKVLTRSDKARGKSDNVPSEEVVKKMKNYWRQLLNAKLITQRKFDNLTKAERGGLSELDKAGFIKRQLVETRQITKHVAQILDSRMNTKYDENDKLIREVKVITLKSKLVSDFRKDFQFYKVREINNYHHAHDAYLNAVVGTALIKKYPKLESEFVYGDYKVYDVRKMIAKSEQEIGKATAKYFFYSNIMNFFKTEITLANGEIRKRPLIETNGETGEIVWDKGRDFATVRKVLSMPQVNIVKKTEVQTGGFSKESILPKRNSDKLIARKKDWDPKKYGGFDSPTVAYSVLVVAKVEKGKSKKLKSVKELLGITIMERSSFEKNPIDFLEAKGYKEVKKDLIIKLPKYSLFELENGRKRMLASAGELQKGNELALPSKYVNFLYLASHYEKLKGSPEDNEQKQLFVEQHKHYLDEIIEQISEFSKRVILADANLDKVLSAYNKHRDKPIREQAENIIHLFTLTNLGAPAAFKYFDTTIDRKRYTSTKEVLDATLIHQSITGLYETRIDLSQLGGDGGGGGGGGGGGLLGRDLLTKLKAQIQFSTEGPQVTWEDRPAMCLVLNLEEEYRLHEKPVPPSIDPSWLQLFPMVWAEKAGMGLANQVPPVVVELKSDASPVAVRQYPMSKEAREGIRPHIQRFLDLGILVPCQSPWNTPLLPVKKPGTNDYRPVQDLREVNKRVQDIHPTVPNPYNLLSSLPPSHTWYSVLDLKDAFFCLKLHPNSQPLFAFEWRDPEKGNTGQLTWTRLPQGFKNSPTLFNEALHRDLASFRALNPQVVMLQYVDDLLVAAPTYRDCKEGTRRLLQELSKLGYRVSAKKAQLCREEVTYLGYLLKGGKRWLTPARKATVMKIPTPTTPRQVREFLGTAGFCRLWIPGFASLAAPLYPLTRPKVPFTWTEAHQEAFGRIKEALLSAPALALPDLTKPFALYVDEKEGVARGVLTQTLGPWRRPVAYLSKKLDPVASGWPTCLKAIAAVALLLKDADKLTLGQNVLVIAPHNLESIVRQPPDRWMTNARMTHYQSLLLNERVSFAPPAILNPATLLPVESDDTPIHICSEILAEETGTRPDLRDQPLPGVPAWYTDGSSFIMDGRRQAGAAIVDNKRTVWASNLPEGTSAQKAELIALTQALRLAEGKSINIYTDSRYAFATAHVHGAIYKQRGWLTSAGKDIKNKEEILALLEAIHLPKRVAIIHCPGHQRGTDPVATGNRKADEAAKQAAQSTRILTETTKNAGKRTADGSEFEKRTADGSEFESPKKKAKVE

SEQ ID NO: 6269 - protein, 2123 aa, synthetic construct
MPAAKRVKLDGGDKKYSIGLDIGTNSVGWAVITDEYKVPSKKFKVLGNTDRHSIKKNLIGALLFDSGETAEATRLKRTARRRYTRRKNRICYLQEIFSNEMAKVDDSFFHRLEESFLVEEDKKHERHPIFGNIVDEVAYHEKYPTIYHLRKKLVDSTDKADLRLIYLALAHMIKFRGHFLIEGDLNPDNSDVDKLFIQLVQTYNQLFEENPINASGVDAKAILSARLSKSRRLENLIAQLPGEKKNGLFGNLIALSLGLTPNFKSNFDLAEDAKLQLSKDTYDDDLDNLLAQIGDQYADLFLAAKNLSDAILLSDILRVNTEITKAPLSASMIKRYDEHHQDLTLLKALVRQQLPEKYKEIFFDQSKNGYAGYIDGGASQEEFYKFIKPILEKMDGTEELLVKLNREDLLRKQRTFDNGSIPHQIHLGELHAILRRQEDFYPFLKDNREKIEKILTFRIPYYVGPLARGNSRFAWMTRKSEETITPWNFEEVVDKGASAQSFIERMTNFDKNLPNEKVLPKHSLLYEYFTVYNELTKVKYVTEGMRKPAFLSGEQKKAIVDLLFKTNRKVTVKQLKEDYFKKIECFDSVEISGVEDRFNASLGTYHDLLKIIKDKDFLDNEENEDILEDIVLTLTLFEDREMIEERLKTYAHLFDDKVMKQLKRRRYTGWGRLSRKLINGIRDKQSGKTILDFLKSDGFANRNFMQLIHDDSLTFKEDIQKAQVSGQGDSLHEHIANLAGSPAIKKGILQTVKVVDELVKVMGRHKPENIVIEMARENQTTQKGQKNSRERMKRIEEGIKELGSQILKEHPVENTQLQNEKLYLYYLQNGRDMYVDQELDINRLSDYDVDHIVPQSFLKDDSIDNKVLTRSDKARGKSDNVPSEEVVKKMKNYWRQLLNAKLITQRKFDNLTKAERGGLSELDKAGFIKRQLVETRQITKHVAQILDSRMNTKYDENDKLIREVKVITLKSKLVSDFRKDFQFYKVREINNYHHAHDAYLNAVVGTALIKKYPKLESEFVYGDYKVYDVRKMIAKSEQEIGKATAKYFFYSNIMNFFKTEITLANGEIRKRPLIETNGETGEIVWDKGRDFATVRKVLSMPQVNIVKKTEVQTGGFSKESILPKRNSDKLIARKKDWDPKKYGGFDSPTVAYSVLVVAKVEKGKSKKLKSVKELLGITIMERSSFEKNPIDFLEAKGYKEVKKDLIIKLPKYSLFELENGRKRMLASAGELQKGNELALPSKYVNFLYLASHYEKLKGSPEDNEQKQLFVEQHKHYLDEIIEQISEFSKRVILADANLDKVLSAYNKHRDKPIREQAENIIHLFTLTNLGAPAAFKYFDTTIDRKRYTSTKEVLDATLIHQSITGLYETRIDLSQLGGDGGGGGGGGGGGLLGRDLLTKLKAQIQFSTEGPQVTWEDRPAMCLVLNLEEEYRLHEKPVPPSIDPSWLQLFPMVWAEKAGMGLANQVPPVVVELKSDASPVAVRQYPMSKEAREGIRPHIQRFLDLGILVPCQSPWNTPLLPVKKPGTNDYRPVQDLREVNKRVQDIHPTVPNPYNLLSSLPPSHTWYSVLDLKDAFFCLKLHPNSQPLFAFEWRDPEKGNTGQLTWTRLPQGFKNSPTLFNEALHRDLASFRALNPQVVMLQYVDDLLVAAPTYRDCKEGTRRLLQELSKLGYRVSAKKAQLCREEVTYLGYLLKGGKRWLTPARKATVMKIPTPTTPRQVREFLGKAGFCRLFIPGFASLAAPLYPLTRPKVPFTWTEAHQEAFGRIKEALLSAPALALPDLTKPFALYVDEKEGVARGVLTQTLGPWRRPVAYLSKKLDPVASGWPTCLKAIAAVALLLKDADKLTLGQNVLVIAPHNLESIVRQPPDRWMTNARMTHYQSLLLNERVSFAPPAILNPATLLPVESDDTPIHICSEILAEETGTRPDLRDQPLPGVPAWYTDGSSFIMDGRRQAGAAIVDNKRTVWASNLPEGTSAQKAELIALTQALRLAEGKSINIYTDSRYAFATAHVHGAIYKQRGWLTSAGKDIKNKEEILALLEAIHLPKRVAIIHCPGHQRGTDPVATGNRKADEAAKQAAQSTRILTETTKNAGKRTADGSEFEKRTADGSEFESPKKKAKVE

SEQ ID NO: 6270 - protein, 2092 aa, synthetic construct
MPAAKRVKLDGGDKKYSIGLDIGTNSVGWAVITDEYKVPSKKFKVLGNTDRHSIKKNLIGALLFDSGETAEATRLKRTARRRYTRRKNRICYLQEIFSNEMAKVDDSFFHRLEESFLVEEDKKHERHPIFGNIVDEVAYHEKYPTIYHLRKKLVDSTDKADLRLIYLALAHMIKFRGHFLIEGDLNPDNSDVDKLFIQLVQTYNQLFEENPINASGVDAKAILSARLSKSRRLENLIAQLPGEKKNGLFGNLIALSLGLTPNFKSNFDLAEDAKLQLSKDTYDDDLDNLLAQIGDQYADLFLAAKNLSDAILLSDILRVNTEITKAPLSASMIKRYDEHHQDLTLLKALVRQQLPEKYKEIFFDQSKNGYAGYIDGGASQEEFYKFIKPILEKMDGTEELLVKLNREDLLRKQRTFDNGSIPHQIHLGELHAILRRQEDFYPFLKDNREKIEKILTFRIPYYVGPLARGNSRFAWMTRKSEETITPWNFEEVVDKGASAQSFIERMTNFDKNLPNEKVLPKHSLLYEYFTVYNELTKVKYVTEGMRKPAFLSGEQKKAIVDLLFKTNRKVTVKQLKEDYFKKIECFDSVEISGVEDRFNASLGTYHDLLKIIKDKDFLDNEENEDILEDIVLTLTLFEDREMIEERLKTYAHLFDDKVMKQLKRRRYTGWGRLSRKLINGIRDKQSGKTILDFLKSDGFANRNFMQLIHDDSLTFKEDIQKAQVSGQGDSLHEHIANLAGSPAIKKGILQTVKVVDELVKVMGRHKPENIVIEMARENQTTQKGQKNSRERMKRIEEGIKELGSQILKEHPVENTQLQNEKLYLYYLQNGRDMYVDQELDINRLSDYDVDHIVPQSFLKDDSIDNKVLTRSDKARGKSDNVPSEEVVKKMKNYWRQLLNAKLITQRKFDNLTKAERGGLSELDKAGFIKRQLVETRQITKHVAQILDSRMNTKYDENDKLIREVKVITLKSKLVSDFRKDFQFYKVREINNYHHAHDAYLNAVVGTALIKKYPKLESEFVYGDYKVYDVRKMIAKSEQEIGKATAKYFFYSNIMNFFKTEITLANGEIRKRPLIETNGETGEIVWDKGRDFATVRKVLSMPQVNIVKKTEVQTGGFSKESILPKRNSDKLIARKKDWDPKKYGGFDSPTVAYSVLVVAKVEKGKSKKLKSVKELLGITIMERSSFEKNPIDFLEAKGYKEVKKDLIIKLPKYSLFELENGRKRMLASAGELQKGNELALPSKYVNFLYLASHYEKLKGSPEDNEQKQLFVEQHKHYLDEIIEQISEFSKRVILADANLDKVLSAYNKHRDKPIREQAENIIHLFTLTNLGAPAAFKYFDTTIDRKRYTSTKEVLDATLIHQSITGLYETRIDLSQLGGDGGGGGGGGGGGTLNLEDEYRLYETSAEPEVSPGSTWLSDFPQAWAETGGMGLAVRQAPLIIPLKATSTPVSIKQYPMSQEAKLGIKPHIQRLLDQGILVPCQSPWNTPLLPVKKPGTNDYRPVQDLREVNKRVEDIHPTVPNPYNLLSGLPPSHRWYTVLDLKDAFFCLRLHPTSQPLFAFEWRDPGMGISGQLTWTRLPQGFKNSPTLFNEALHRDLADFRIQHPDLILLQYVDDILLAATSELDCQQGTRALLLTLGNLGYRASAKKAQLCQKQVKYLGYLLKEGQRWLTEARKETVMGQPTPKTPRQLREFLGTAGFCRLWIPGFAEMAAPLYPLTKPGTLFNWGPDQQKAYQEIKQALLTAPALGLPDLTKPFELFVDEKQGYAKGVLTQKLGPWRRPVAYLSKKLDPVAAGWPPCLRMVAAIAVLRKDAGKLTMGQPLVILAPHAVEALVKQPPDRWLSNARMTHYQAMLLDTDRVQFGPVVALNPATLLPLPEEGAPHDCLEILAETHGTRPDLTDQPIPDADHTWYTDGSSFLQEGQRKAGAAVTTETEVIWARALPAGTSAQRAELIALTQALKMAEGKRLNVYTDSRYAFATAHIHGEIYRRRGWLTSEGREIKNKSEILALLKALFLPKRLSIIHCLGHQKGDSAEARGNRLADQAAREAAIKTPPDTSTLLAGKRTADGSEFEKRTADGSEFESPKKKAKVE

SEQ ID NO: 6271 - protein, 2092 aa, synthetic construct
MPAAKRVKLDGGDKKYSIGLDIGTNSVGWAVITDEYKVPSKKFKVLGNTDRHSIKKNLIGALLFDSGETAEATRLKRTARRRYTRRKNRICYLQEIFSNEMAKVDDSFFHRLEESFLVEEDKKHERHPIFGNIVDEVAYHEKYPTIYHLRKKLVDSTDKADLRLIYLALAHMIKFRGHFLIEGDLNPDNSDVDKLFIQLVQTYNQLFEENPINASGVDAKAILSARLSKSRRLENLIAQLPGEKKNGLFGNLIALSLGLTPNFKSNFDLAEDAKLQLSKDTYDDDLDNLLAQIGDQYADLFLAAKNLSDAILLSDILRVNTEITKAPLSASMIKRYDEHHQDLTLLKALVRQQLPEKYKEIFFDQSKNGYAGYIDGGASQEEFYKFIKPILEKMDGTEELLVKLNREDLLRKQRTFDNGSIPHQIHLGELHAILRRQEDFYPFLKDNREKIEKILTFRIPYYVGPLARGNSRFAWMTRKSEETITPWNFEEVVDKGASAQSFIERMTNFDKNLPNEKVLPKHSLLYEYFTVYNELTKVKYVTEGMRKPAFLSGEQKKAIVDLLFKTNRKVTVKQLKEDYFKKIECFDSVEISGVEDRFNASLGTYHDLLKIIKDKDFLDNEENEDILEDIVLTLTLFEDREMIEERLKTYAHLFDDKVMKQLKRRRYTGWGRLSRKLINGIRDKQSGKTILDFLKSDGFANRNFMQLIHDDSLTFKEDIQKAQVSGQGDSLHEHIANLAGSPAIKKGILQTVKVVDELVKVMGRHKPENIVIEMARENQTTQKGQKNSRERMKRIEEGIKELGSQILKEHPVENTQLQNEKLYLYYLQNGRDMYVDQELDINRLSDYDVDHIVPQSFLKDDSIDNKVLTRSDKARGKSDNVPSEEVVKKMKNYWRQLLNAKLITQRKFDNLTKAERGGLSELDKAGFIKRQLVETRQITKHVAQILDSRMNTKYDENDKLIREVKVITLKSKLVSDFRKDFQFYKVREINNYHHAHDAYLNAVVGTALIKKYPKLESEFVYGDYKVYDVRKMIAKSEQEIGKATAKYFFYSNIMNFFKTEITLANGEIRKRPLIETNGETGEIVWDKGRDFATVRKVLSMPQVNIVKKTEVQTGGFSKESILPKRNSDKLIARKKDWDPKKYGGFDSPTVAYSVLVVAKVEKGKSKKLKSVKELLGITIMERSSFEKNPIDFLEAKGYKEVKKDLIIKLPKYSLFELENGRKRMLASAGELQKGNELALPSKYVNFLYLASHYEKLKGSPEDNEQKQLFVEQHKHYLDEIIEQISEFSKRVILADANLDKVLSAYNKHRDKPIREQAENIIHLFTLTNLGAPAAFKYFDTTIDRKRYTSTKEVLDATLIHQSITGLYETRIDLSQLGGDGGGGGGGGGGGTLNLEDEYRLYETSAEPEVSPGSTWLSDFPQAWAETGGMGLAVRQAPLIIPLKATSTPVSIKQYPMSQEAKLGIKPHIQRLLDQGILVPCQSPWNTPLLPVKKPGTNDYRPVQDLREVNKRVEDIHPTVPNPYNLLSGLPPSHRWYTVLDLKDAFFCLRLHPTSQPLFAFEWRDPGMGISGQLTWTRLPQGFKNSPTLFNEALHRDLADFRIQHPDLILLQYVDDILLAATSELDCQQGTRALLLTLGNLGYRASAKKAQLCQKQVKYLGYLLKEGQRWLTEARKETVMGQPTPKTPRQLREFLGKAGFCRLFIPGFAEMAAPLYPLTKPGTLFNWGPDQQKAYQEIKQALLTAPALGLPDLTKPFELFVDEKQGYAKGVLTQKLGPWRRPVAYLSKKLDPVAAGWPPCLRMVAAIAVLRKDAGKLTMGQPLVILAPHAVEALVKQPPDRWLSNARMTHYQAMLLDTDRVQFGPVVALNPATLLPLPEEGAPHDCLEILAETHGTRPDLTDQPIPDADHTWYTDGSSFLQEGQRKAGAAVTTETEVIWARALPAGTSAQRAELIALTQALKMAEGKRLNVYTDSRYAFATAHIHGEIYRRRGWLTSEGREIKNKSEILALLKALFLPKRLSIIHCLGHQKGDSAEARGNRLADQAAREAAIKTPPDTSTLLAGKRTADGSEFEKRTADGSEFESPKKKAKVE

SEQ ID NO: 6272 - protein, 2090 aa, synthetic construct
MPAAKRVKLDGGDKKYSIGLDIGTNSVGWAVITDEYKVPSKKFKVLGNTDRHSIKKNLIGALLFDSGETAEATRLKRTARRRYTRRKNRICYLQEIFSNEMAKVDDSFFHRLEESFLVEEDKKHERHPIFGNIVDEVAYHEKYPTIYHLRKKLVDSTDKADLRLIYLALAHMIKFRGHFLIEGDLNPDNSDVDKLFIQLVQTYNQLFEENPINASGVDAKAILSARLSKSRRLENLIAQLPGEKKNGLFGNLIALSLGLTPNFKSNFDLAEDAKLQLSKDTYDDDLDNLLAQIGDQYADLFLAAKNLSDAILLSDILRVNTEITKAPLSASMIKRYDEHHQDLTLLKALVRQQLPEKYKEIFFDQSKNGYAGYIDGGASQEEFYKFIKPILEKMDGTEELLVKLNREDLLRKQRTFDNGSIPHQIHLGELHAILRRQEDFYPFLKDNREKIEKILTFRIPYYVGPLARGNSRFAWMTRKSEETITPWNFEEVVDKGASAQSFIERMTNFDKNLPNEKVLPKHSLLYEYFTVYNELTKVKYVTEGMRKPAFLSGEQKKAIVDLLFKTNRKVTVKQLKEDYFKKIECFDSVEISGVEDRFNASLGTYHDLLKIIKDKDFLDNEENEDILEDIVLTLTLFEDREMIEERLKTYAHLFDDKVMKQLKRRRYTGWGRLSRKLINGIRDKQSGKTILDFLKSDGFANRNFMQLIHDDSLTFKEDIQKAQVSGQGDSLHEHIANLAGSPAIKKGILQTVKVVDELVKVMGRHKPENIVIEMARENQTTQKGQKNSRERMKRIEEGIKELGSQILKEHPVENTQLQNEKLYLYYLQNGRDMYVDQELDINRLSDYDVDHIVPQSFLKDDSIDNKVLTRSDKARGKSDNVPSEEVVKKMKNYWRQLLNAKLITQRKFDNLTKAERGGLSELDKAGFIKRQLVETRQITKHVAQILDSRMNTKYDENDKLIREVKVITLKSKLVSDFRKDFQFYKVREINNYHHAHDAYLNAVVGTALIKKYPKLESEFVYGDYKVYDVRKMIAKSEQEIGKATAKYFFYSNIMNFFKTEITLANGEIRKRPLIETNGETGEIVWDKGRDFATVRKVLSMPQVNIVKKTEVQTGGFSKESILPKRNSDKLIARKKDWDPKKYGGFDSPTVAYSVLVVAKVEKGKSKKLKSVKELLGITIMERSSFEKNPIDFLEAKGYKEVKKDLIIKLPKYSLFELENGRKRMLASAGELQKGNELALPSKYVNFLYLASHYEKLKGSPEDNEQKQLFVEQHKHYLDEIIEQISEFSKRVILADANLDKVLSAYNKHRDKPIREQAENIIHLFTLTNLGAPAAFKYFDTTIDRKRYTSTKEVLDATLIHQSITGLYETRIDLSQLGGDGGGGGGGGGGGVLNLEEEYRLHEKPVPSSIDPSWLQLFPTVWAERAGMGLANQVPPVVVELRSGASPVAVRQYPMSKEAREGIRPHIQRFLDLGVLVPCQSPWNTPLLPVKKPGTNDYRPVQDLREINKRVQDIHPTVPNPYNLLSSLPPSHTWYSVLDLKDAFFCLKLHPNSQPLFAFEWRDPEKGNTGQLTWTRLPQGFKNSPTLFNEALHRDLAPFRALNPQVVLLQYVDDLLVAAPTYRDCKEGTQKLLQELSKLGYRVSAKKAQLCQKEVTYLGYLLKEGKRWLTPARKATVMKIPPPTTPRQVREFLGKAGFCRLFIPGFASLAAPLYPLTKPSIPFIWTEEHQKAFDRIKEALLSAPALALPDLTKPFTLYVDERAGVARGVLTQTLGPWRRPVAYLSKKLDPVASGWPTCLKAVAAVALLLKDADKLTLGQNVTVIASHSLESIVRQPPDRWMTNARMTHYQSLLLNERVSFAPPAVLNPATLLPVESEATPVHRCSEILAEETGTRRDLKDQPLPGVPAWYTDGSSFIAEGKRRAGAAIVDGKRTVWASSLPEGTSAQKAELVALTQALRLAEGKDINIYTDSRYAFATAHIHGAIYKQRGWLTSAGKDIKNKEEILALLEAIHLPKRVAIIHCPGHQKGNDPVATGNRRADEAAKQAALSTRVLAETTKPAGKRTADGSEFEKRTADGSEFESPKKKAKVE

SEQ ID NO: 6273 - protein, 2092 aa, synthetic construct
MPAAKRVKLDGGDKKYSIGLDIGTNSVGWAVITDEYKVPSKKFKVLGNTDRHSIKKNLIGALLFDSGETAEATRLKRTARRRYTRRKNRICYLQEIFSNEMAKVDDSFFHRLEESFLVEEDKKHERHPIFGNIVDEVAYHEKYPTIYHLRKKLVDSTDKADLRLIYLALAHMIKFRGHFLIEGDLNPDNSDVDKLFIQLVQTYNQLFEENPINASGVDAKAILSARLSKSRRLENLIAQLPGEKKNGLFGNLIALSLGLTPNFKSNFDLAEDAKLQLSKDTYDDDLDNLLAQIGDQYADLFLAAKNLSDAILLSDILRVNTEITKAPLSASMIKRYDEHHQDLTLLKALVRQQLPEKYKEIFFDQSKNGYAGYIDGGASQEEFYKFIKPILEKMDGTEELLVKLNREDLLRKQRTFDNGSIPHQIHLGELHAILRRQEDFYPFLKDNREKIEKILTFRIPYYVGPLARGNSRFAWMTRKSEETITPWNFEEVVDKGASAQSFIERMTNFDKNLPNEKVLPKHSLLYEYFTVYNELTKVKYVTEGMRKPAFLSGEQKKAIVDLLFKTNRKVTVKQLKEDYFKKIECFDSVEISGVEDRFNASLGTYHDLLKIIKDKDFLDNEENEDILEDIVLTLTLFEDREMIEERLKTYAHLFDDKVMKQLKRRRYTGWGRLSRKLINGIRDKQSGKTILDFLKSDGFANRNFMQLIHDDSLTFKEDIQKAQVSGQGDSLHEHIANLAGSPAIKKGILQTVKVVDELVKVMGRHKPENIVIEMARENQTTQKGQKNSRERMKRIEEGIKELGSQILKEHPVENTQLQNEKLYLYYLQNGRDMYVDQELDINRLSDYDVDHIVPQSFLKDDSIDNKVLTRSDKARGKSDNVPSEEVVKKMKNYWRQLLNAKLITQRKFDNLTKAERGGLSELDKAGFIKRQLVETRQITKHVAQILDSRMNTKYDENDKLIREVKVITLKSKLVSDFRKDFQFYKVREINNYHHAHDAYLNAVVGTALIKKYPKLESEFVYGDYKVYDVRKMIAKSEQEIGKATAKYFFYSNIMNFFKTEITLANGEIRKRPLIETNGETGEIVWDKGRDFATVRKVLSMPQVNIVKKTEVQTGGFSKESILPKRNSDKLIARKKDWDPKKYGGFDSPTVAYSVLVVAKVEKGKSKKLKSVKELLGITIMERSSFEKNPIDFLEAKGYKEVKKDLIIKLPKYSLFELENGRKRMLASAGELQKGNELALPSKYVNFLYLASHYEKLKGSPEDNEQKQLFVEQHKHYLDEIIEQISEFSKRVILADANLDKVLSAYNKHRDKPIREQAENIIHLFTLTNLGAPAAFKYFDTTIDRKRYTSTKEVLDATLIHQSITGLYETRIDLSQLGGDGGGGGGGGGGGTLNIEDEYRLHETSKEPDVPLGSTWLSDFPQAWAETGGMGLAVRQAPLIIPLKATSTPVSIKQYPMSQEARLGIKPHIQRLLDQGILVPCQSPWNTPLLPVKKPGTNDYRPVQDLREVNKRVEDIHPTVPNPYNLLSGLPPSHQWYTVLDLKDAFFCLRLHPTSQPLFAFEWRDPEMGISGQLTWTRLPQGFKNSPTLFNEALHRDLADFRIQHPDLILLQYVDDLLLAATSEQDCQRGTRALLQTLGNLGYRASAKKAQICQKQVKYLGYLLKEGQRWLTEARKETVMGQPTPKTPRQLREFLGKAGFCRLFIPGFAEMAAPLYPLTKPGTLFNWGPDQQKAYQEIKQALLTAPALGLPDLTKPFELFVDEKQGYAKGVLTQKLGPWRRPVAYLSKKLDPVAAGWPPCLRMVAAIAVLTKDAGKLTMGQPLVILAPHAVEALVKQPPDRWLSNARMTHYQAMLLDTDRVQFGPVVALNPATLLPLPEKEAPHDCLEILAETHGTRPDLTDQPIPDADYTWYTDGSSFLQEGQRRAGAAVTTETEVIWARALPAGTSAQRAELIALTQALKMAEGKKLNVYTDSRYAFATAHVHGEIYRRRGWLTSEGREIKNKNEILALLKALFLPKRLSIIHCPGHQKGNSAEARGNRMADQAAREAAMKAVLETSTLLAGKRTADGSEFEKRTADGSEFESPKKKAKVE

SEQ ID NO: 6274 - protein, 2095 aa, synthetic construct
MPAAKRVKLDGGDKKYSIGLDIGTNSVGWAVITDEYKVPSKKFKVLGNTDRHSIKKNLIGALLFDSGETAEATRLKRTARRRYTRRKNRICYLQEIFSNEMAKVDDSFFHRLEESFLVEEDKKHERHPIFGNIVDEVAYHEKYPTIYHLRKKLVDSTDKADLRLIYLALAHMIKFRGHFLIEGDLNPDNSDVDKLFIQLVQTYNQLFEENPINASGVDAKAILSARLSKSRRLENLIAQLPGEKKNGLFGNLIALSLGLTPNFKSNFDLAEDAKLQLSKDTYDDDLDNLLAQIGDQYADLFLAAKNLSDAILLSDILRVNTEITKAPLSASMIKRYDEHHQDLTLLKALVRQQLPEKYKEIFFDQSKNGYAGYIDGGASQEEFYKFIKPILEKMDGTEELLVKLNREDLLRKQRTFDNGSIPHQIHLGELHAILRRQEDFYPFLKDNREKIEKILTFRIPYYVGPLARGNSRFAWMTRKSEETITPWNFEEVVDKGASAQSFIERMTNFDKNLPNEKVLPKHSLLYEYFTVYNELTKVKYVTEGMRKPAFLSGEQKKAIVDLLFKTNRKVTVKQLKEDYFKKIECFDSVEISGVEDRFNASLGTYHDLLKIIKDKDFLDNEENEDILEDIVLTLTLFEDREMIEERLKTYAHLFDDKVMKQLKRRRYTGWGRLSRKLINGIRDKQSGKTILDFLKSDGFANRNFMQLIHDDSLTFKEDIQKAQVSGQGDSLHEHIANLAGSPAIKKGILQTVKVVDELVKVMGRHKPENIVIEMARENQTTQKGQKNSRERMKRIEEGIKELGSQILKEHPVENTQLQNEKLYLYYLQNGRDMYVDQELDINRLSDYDVDHIVPQSFLKDDSIDNKVLTRSDKARGKSDNVPSEEVVKKMKNYWRQLLNAKLITQRKFDNLTKAERGGLSELDKAGFIKRQLVETRQITKHVAQILDSRMNTKYDENDKLIREVKVITLKSKLVSDFRKDFQFYKVREINNYHHAHDAYLNAVVGTALIKKYPKLESEFVYGDYKVYDVRKMIAKSEQEIGKATAKYFFYSNIMNFFKTEITLANGEIRKRPLIETNGETGEIVWDKGRDFATVRKVLSMPQVNIVKKTEVQTGGFSKESILPKRNSDKLIARKKDWDPKKYGGFDSPTVAYSVLVVAKVEKGKSKKLKSVKELLGITIMERSSFEKNPIDFLEAKGYKEVKKDLIIKLPKYSLFELENGRKRMLASAGELQKGNELALPSKYVNFLYLASHYEKLKGSPEDNEQKQLFVEQHKHYLDEIIEQISEFSKRVILADANLDKVLSAYNKHRDKPIREQAENIIHLFTLTNLGAPAAFKYFDTTIDRKRYTSTKEVLDATLIHQSITGLYETRIDLSQLGGDGGGGGGGGGGGGTAPLEEEYRLFLEAPIQNVTLLEQWKREIPKVWAEINPPGLASTQAPIHVQLLSTALPVRVRQYPITLEAKRSLRETIRKFRAAGILRPVHSPWNTPLLPVRKSGTSEYRMVQDLREVNKRVETIHPTVPNPYTLLSLLPPDRIWYSVLDLKDAFFCIPLAPESQLIFAFEWADAEEGESGQLTWTRLPQGFKNSPTLFDEALNRDLQGFRLDHPSVSLLQYVDDLLIAADTQAACLSATRDLLMTLAELGYRVSGKKAQLCQEEVTYLGFKIHKGSRSLSNSRTQAILQIPVPKTKRQVREFLGTIGYCRLWIPGFAELAQPLYAATRGGNDPLVWGEKEEEAFQSLKLALTQPPALALPSLDKPFQLFVEETSGAAKGVLTQALGPWKRPVAYLSKRLDPVAAGWPRCLRAIAAAALLTREASKLTFGQDIEITSSHNLESLLRSPPDKWLTNARITQYQVLLLDPPRVRFKQTAALNPATLLPETDDTLPIHHCLDTLDSLTSTRPDLTDQPLAQAEATLFTDGSSYIRDGKRYAGAAVVTLDSVIWAEPLPIGTSAQKAELIALTKALEWSKDKSVNIYTDSRYAFATLHVHGMIYRERGLLTAGGKAIKNAPEILALLTAVWLPKRVAVMHCKGHQKDDAPTSTGNRRADEVAREVAIRPLSTQATISAGKRTADGSEFEKRTADGSEFESPKKKAKVE

SEQ ID NO: 6275 - protein, 2095 aa, synthetic construct
MPAAKRVKLDGGDKKYSIGLDIGTNSVGWAVITDEYKVPSKKFKVLGNTDRHSIKKNLIGALLFDSGETAEATRLKRTARRRYTRRKNRICYLQEIFSNEMAKVDDSFFHRLEESFLVEEDKKHERHPIFGNIVDEVAYHEKYPTIYHLRKKLVDSTDKADLRLIYLALAHMIKFRGHFLIEGDLNPDNSDVDKLFIQLVQTYNQLFEENPINASGVDAKAILSARLSKSRRLENLIAQLPGEKKNGLFGNLIALSLGLTPNFKSNFDLAEDAKLQLSKDTYDDDLDNLLAQIGDQYADLFLAAKNLSDAILLSDILRVNTEITKAPLSASMIKRYDEHHQDLTLLKALVRQQLPEKYKEIFFDQSKNGYAGYIDGGASQEEFYKFIKPILEKMDGTEELLVKLNREDLLRKQRTFDNGSIPHQIHLGELHAILRRQEDFYPFLKDNREKIEKILTFRIPYYVGPLARGNSRFAWMTRKSEETITPWNFEEVVDKGASAQSFIERMTNFDKNLPNEKVLPKHSLLYEYFTVYNELTKVKYVTEGMRKPAFLSGEQKKAIVDLLFKTNRKVTVKQLKEDYFKKIECFDSVEISGVEDRFNASLGTYHDLLKIIKDKDFLDNEENEDILEDIVLTLTLFEDREMIEERLKTYAHLFDDKVMKQLKRRRYTGWGRLSRKLINGIRDKQSGKTILDFLKSDGFANRNFMQLIHDDSLTFKEDIQKAQVSGQGDSLHEHIANLAGSPAIKKGILQTVKVVDELVKVMGRHKPENIVIEMARENQTTQKGQKNSRERMKRIEEGIKELGSQILKEHPVENTQLQNEKLYLYYLQNGRDMYVDQELDINRLSDYDVDHIVPQSFLKDDSIDNKVLTRSDKARGKSDNVPSEEVVKKMKNYWRQLLNAKLITQRKFDNLTKAERGGLSELDKAGFIKRQLVETRQITKHVAQILDSRMNTKYDENDKLIREVKVITLKSKLVSDFRKDFQFYKVREINNYHHAHDAYLNAVVGTALIKKYPKLESEFVYGDYKVYDVRKMIAKSEQEIGKATAKYFFYSNIMNFFKTEITLANGEIRKRPLIETNGETGEIVWDKGRDFATVRKVLSMPQVNIVKKTEVQTGGFSKESILPKRNSDKLIARKKDWDPKKYGGFDSPTVAYSVLVVAKVEKGKSKKLKSVKELLGITIMERSSFEKNPIDFLEAKGYKEVKKDLIIKLPKYSLFELENGRKRMLASAGELQKGNELALPSKYVNFLYLASHYEKLKGSPEDNEQKQLFVEQHKHYLDEIIEQISEFSKRVILADANLDKVLSAYNKHRDKPIREQAENIIHLFTLTNLGAPAAFKYFDTTIDRKRYTSTKEVLDATLIHQSITGLYETRIDLSQLGGDGGGGGGGGGGGGTAPLEEEYRLFLEAPIQNVTLLEQWKREIPKVWAEINPPGLASTQAPIHVQLLSTALPVRVRQYPITLEAKRSLRETIRKFRAAGILRPVHSPWNTPLLPVRKSGTSEYRMVQDLREVNKRVETIHPTVPNPYTLLSLLPPDRIWYSVLDLKDAFFCIPLAPESQLIFAFEWADAEEGESGQLTWTRLPQGFKNSPTLFNEALNRDLQGFRLDHPSVSLLQYVDDLLIAADTQAACLSATRDLLMTLAELGYRVSGKKAQLCQEEVTYLGFKIHKGSRSLSNSRTQAILQIPVPKTKRQVREFLGKIGYCRLFIPGFAELAQPLYAATRPGNDPLVWGEKEEEAFQSLKLALTQPPALALPSLDKPFQLFVEETSGAAKGVLTQALGPWKRPVAYLSKRLDPVAAGWPRCLRAIAAAALLTREASKLTFGQDIEITSSHNLESLLRSPPDKWLTNARITQYQVLLLDPPRVRFKQTAALNPATLLPETDDTLPIHHCLDTLDSLTSTRPDLTDQPLAQAEATLFTDGSSYIRDGKRYAGAAVVTLDSVIWAEPLPIGTSAQKAELIALTKALEWSKDKSVNIYTDSRYAFATLHVHGMIYRERGWLTAGGKAIKNAPEILALLTAVWLPKRVAVMHCKGHQKDDAPTSTGNRRADEVAREVAIRPLSTQATISAGKRTADGSEFEKRTADGSEFESPKKKAKVE

SEQ ID NO: 6276 - protein, 2099 aa, synthetic construct
MPAAKRVKLDGGDKKYSIGLDIGTNSVGWAVITDEYKVPSKKFKVLGNTDRHSIKKNLIGALLFDSGETAEATRLKRTARRRYTRRKNRICYLQEIFSNEMAKVDDSFFHRLEESFLVEEDKKHERHPIFGNIVDEVAYHEKYPTIYHLRKKLVDSTDKADLRLIYLALAHMIKFRGHFLIEGDLNPDNSDVDKLFIQLVQTYNQLFEENPINASGVDAKAILSARLSKSRRLENLIAQLPGEKKNGLFGNLIALSLGLTPNFKSNFDLAEDAKLQLSKDTYDDDLDNLLAQIGDQYADLFLAAKNLSDAILLSDILRVNTEITKAPLSASMIKRYDEHHQDLTLLKALVRQQLPEKYKEIFFDQSKNGYAGYIDGGASQEEFYKFIKPILEKMDGTEELLVKLNREDLLRKQRTFDNGSIPHQIHLGELHAILRRQEDFYPFLKDNREKIEKILTFRIPYYVGPLARGNSRFAWMTRKSEETITPWNFEEVVDKGASAQSFIERMTNFDKNLPNEKVLPKHSLLYEYFTVYNELTKVKYVTEGMRKPAFLSGEQKKAIVDLLFKTNRKVTVKQLKEDYFKKIECFDSVEISGVEDRFNASLGTYHDLLKIIKDKDFLDNEENEDILEDIVLTLTLFEDREMIEERLKTYAHLFDDKVMKQLKRRRYTGWGRLSRKLINGIRDKQSGKTILDFLKSDGFANRNFMQLIHDDSLTFKEDIQKAQVSGQGDSLHEHIANLAGSPAIKKGILQTVKVVDELVKVMGRHKPENIVIEMARENQTTQKGQKNSRERMKRIEEGIKELGSQILKEHPVENTQLQNEKLYLYYLQNGRDMYVDQELDINRLSDYDVDHIVPQSFLKDDSIDNKVLTRSDKARGKSDNVPSEEVVKKMKNYWRQLLNAKLITQRKFDNLTKAERGGLSELDKAGFIKRQLVETRQITKHVAQILDSRMNTKYDENDKLIREVKVITLKSKLVSDFRKDFQFYKVREINNYHHAHDAYLNAVVGTALIKKYPKLESEFVYGDYKVYDVRKMIAKSEQEIGKATAKYFFYSNIMNFFKTEITLANGEIRKRPLIETNGETGEIVWDKGRDFATVRKVLSMPQVNIVKKTEVQTGGFSKESILPKRNSDKLIARKKDWDPKKYGGFDSPTVAYSVLVVAKVEKGKSKKLKSVKELLGITIMERSSFEKNPIDFLEAKGYKEVKKDLIIKLPKYSLFELENGRKRMLASAGELQKGNELALPSKYVNFLYLASHYEKLKGSPEDNEQKQLFVEQHKHYLDEIIEQISEFSKRVILADANLDKVLSAYNKHRDKPIREQAENIIHLFTLTNLGAPAAFKYFDTTIDRKRYTSTKEVLDATLIHQSITGLYETRIDLSQLGGDGGGGGGGGGGGGTVSLQDEHRLFDIPVTTSLPDVWLQDFPQAWAETGGLGRAKCQAPIIIDLKPTAVPVSIKQYPMSLEAHMGIRQHIIKFLELGVLRPCRSPWNTPLLPVKKPGTQDYRPVQDLREINKRTVDIHPTVPNPYNLLSTLKPDYSWYTVLDLKDAFFCLPLAPQSQELFAFEWKDPERGISGQLTWTRLPQGFKNSPTLFDEALHRDLTDFRTQHPEVTLLQYVDDLLLAAPTKKACTQGTRHLLQELGEKGYRASAKKAQICQTKVTYLGYILSEGKRWLTPGRIETVARIPPPRNPREVREFLGTAGFCRLWIPGFAELAAPLYALTKESTPFTWQTEHQLAFEALKKALLSAPALGLPDTSKPFTLFLDERQGIAKGVLTQKLGPWKRPVAYLSKKLDPVAAGWPPCLRIMAATAMLVKDSAKLTLGQPLTVITPHTLEAIVRQPPDRWITNARLTHYQALLLDTDRVQFGPPVTLNPATLLPVPENQPSPHDCRQVLAETHGTREDLKDQELPDADHTWYTDGSSYLDSGTRRAGAAVVDGHNTIWAQSLPPGTSAQKAELIALTKALELSKGKKANIYTDSRYAFATAHTHGSIYERRGLLTSEGKEIKNKAEIIALLKALFLPQEVAIIHCPGHQKGQDPVAVGNRQADRVARQAAMAEVLTLATEPDNTSHITAGKRTADGSEFEKRTADGSEFESPKKKAKVE

SEQ ID NO: 6277 - protein, 2091 aa, synthetic construct
MPAAKRVKLDGGDKKYSIGLDIGTNSVGWAVITDEYKVPSKKFKVLGNTDRHSIKKNLIGALLFDSGETAEATRLKRTARRRYTRRKNRICYLQEIFSNEMAKVDDSFFHRLEESFLVEEDKKHERHPIFGNIVDEVAYHEKYPTIYHLRKKLVDSTDKADLRLIYLALAHMIKFRGHFLIEGDLNPDNSDVDKLFIQLVQTYNQLFEENPINASGVDAKAILSARLSKSRRLENLIAQLPGEKKNGLFGNLIALSLGLTPNFKSNFDLAEDAKLQLSKDTYDDDLDNLLAQIGDQYADLFLAAKNLSDAILLSDILRVNTEITKAPLSASMIKRYDEHHQDLTLLKALVRQQLPEKYKEIFFDQSKNGYAGYIDGGASQEEFYKFIKPILEKMDGTEELLVKLNREDLLRKQRTFDNGSIPHQIHLGELHAILRRQEDFYPFLKDNREKIEKILTFRIPYYVGPLARGNSRFAWMTRKSEETITPWNFEEVVDKGASAQSFIERMTNFDKNLPNEKVLPKHSLLYEYFTVYNELTKVKYVTEGMRKPAFLSGEQKKAIVDLLFKTNRKVTVKQLKEDYFKKIECFDSVEISGVEDRFNASLGTYHDLLKIIKDKDFLDNEENEDILEDIVLTLTLFEDREMIEERLKTYAHLFDDKVMKQLKRRRYTGWGRLSRKLINGIRDKQSGKTILDFLKSDGFANRNFMQLIHDDSLTFKEDIQKAQVSGQGDSLHEHIANLAGSPAIKKGILQTVKVVDELVKVMGRHKPENIVIEMARENQTTQKGQKNSRERMKRIEEGIKELGSQILKEHPVENTQLQNEKLYLYYLQNGRDMYVDQELDINRLSDYDVDHIVPQSFLKDDSIDNKVLTRSDKARGKSDNVPSEEVVKKMKNYWRQLLNAKLITQRKFDNLTKAERGGLSELDKAGFIKRQLVETRQITKHVAQILDSRMNTKYDENDKLIREVKVITLKSKLVSDFRKDFQFYKVREINNYHHAHDAYLNAVVGTALIKKYPKLESEFVYGDYKVYDVRKMIAKSEQEIGKATAKYFFYSNIMNFFKTEITLANGEIRKRPLIETNGETGEIVWDKGRDFATVRKVLSMPQVNIVKKTEVQTGGFSKESILPKRNSDKLIARKKDWDPKKYGGFDSPTVAYSVLVVAKVEKGKSKKLKSVKELLGITIMERSSFEKNPIDFLEAKGYKEVKKDLIIKLPKYSLFELENGRKRMLASAGELQKGNELALPSKYVNFLYLASHYEKLKGSPEDNEQKQLFVEQHKHYLDEIIEQISEFSKRVILADANLDKVLSAYNKHRDKPIREQAENIIHLFTLTNLGAPAAFKYFDTTIDRKRYTSTKEVLDATLIHQSITGLYETRIDLSQLGGDGGGGGGGGGGGGVLNLEEEYRLHEKPVPSSIDPSWLQLFPTVWAERAGMGLANQVPPVVVELRSGASPVAVRQYPMSKEAREGIRPHIQKFLDLGVLVPCRSPWNTPLLPVKKPGTNDYRPVQDLREINKRVQDIHPTVPNPYNLLSSLPPSYTWYSVLDLKDAFFCLRLHPNSQPLFAFEWKDPEKGNTGQLTWTRLPQGFKNSPTLFNEALHRDLAPFRALNPQVVLLQYVDDLLVAAPTYEDCKKGTQKLLQELSKLGYRVSAKKAQLCQREVTYLGYLLKEGKRWLTPARKATVMKIPVPTTPRQVREFLGTAGFCRLWIPGFASLAAPLYPLTKPSIPFIWTEEHQQAFDHIKKALLSAPALALPDLTKPFTLYIDERAGVARGVLTQTLGPWRRPVAYLSKKLDPVASGWPTCLKAVAAVALLLKDADKLTLGQNVTVIASHSLESIVRQPPDRWMTNARMTHYQSLLLNERVSFAPPAVLNPATLLPVESEATPVHRCSEILAEETGTRRDLEDQPLPGVPTWYTDGSSFITEGKRRAGAPIVDGKRTVWASSLPEGTSAQKAELVALTQALRLAEGKNINIYTDSRYAFATAHIHGAIYKQRGWLTSAGKDIKNKEEILALLEAIHLPRRVAIIHCPGHQRGSNPVATGNRRADEAAKQAALSTRVLAGTTKPAGKRTADGSEFEKRTADGSEFESPKKKAKVE

SEQ ID NO: 6278 - protein, 2124 aa, synthetic construct
MPAAKRVKLDGGDKKYSIGLDIGTNSVGWAVITDEYKVPSKKFKVLGNTDRHSIKKNLIGALLFDSGETAEATRLKRTARRRYTRRKNRICYLQEIFSNEMAKVDDSFFHRLEESFLVEEDKKHERHPIFGNIVDEVAYHEKYPTIYHLRKKLVDSTDKADLRLIYLALAHMIKFRGHFLIEGDLNPDNSDVDKLFIQLVQTYNQLFEENPINASGVDAKAILSARLSKSRRLENLIAQLPGEKKNGLFGNLIALSLGLTPNFKSNFDLAEDAKLQLSKDTYDDDLDNLLAQIGDQYADLFLAAKNLSDAILLSDILRVNTEITKAPLSASMIKRYDEHHQDLTLLKALVRQQLPEKYKEIFFDQSKNGYAGYIDGGASQEEFYKFIKPILEKMDGTEELLVKLNREDLLRKQRTFDNGSIPHQIHLGELHAILRRQEDFYPFLKDNREKIEKILTFRIPYYVGPLARGNSRFAWMTRKSEETITPWNFEEVVDKGASAQSFIERMTNFDKNLPNEKVLPKHSLLYEYFTVYNELTKVKYVTEGMRKPAFLSGEQKKAIVDLLFKTNRKVTVKQLKEDYFKKIECFDSVEISGVEDRFNASLGTYHDLLKIIKDKDFLDNEENEDILEDIVLTLTLFEDREMIEERLKTYAHLFDDKVMKQLKRRRYTGWGRLSRKLINGIRDKQSGKTILDFLKSDGFANRNFMQLIHDDSLTFKEDIQKAQVSGQGDSLHEHIANLAGSPAIKKGILQTVKVVDELVKVMGRHKPENIVIEMARENQTTQKGQKNSRERMKRIEEGIKELGSQILKEHPVENTQLQNEKLYLYYLQNGRDMYVDQELDINRLSDYDVDHIVPQSFLKDDSIDNKVLTRSDKARGKSDNVPSEEVVKKMKNYWRQLLNAKLITQRKFDNLTKAERGGLSELDKAGFIKRQLVETRQITKHVAQILDSRMNTKYDENDKLIREVKVITLKSKLVSDFRKDFQFYKVREINNYHHAHDAYLNAVVGTALIKKYPKLESEFVYGDYKVYDVRKMIAKSEQEIGKATAKYFFYSNIMNFFKTEITLANGEIRKRPLIETNGETGEIVWDKGRDFATVRKVLSMPQVNIVKKTEVQTGGFSKESILPKRNSDKLIARKKDWDPKKYGGFDSPTVAYSVLVVAKVEKGKSKKLKSVKELLGITIMERSSFEKNPIDFLEAKGYKEVKKDLIIKLPKYSLFELENGRKRMLASAGELQKGNELALPSKYVNFLYLASHYEKLKGSPEDNEQKQLFVEQHKHYLDEIIEQISEFSKRVILADANLDKVLSAYNKHRDKPIREQAENIIHLFTLTNLGAPAAFKYFDTTIDRKRYTSTKEVLDATLIHQSITGLYETRIDLSQLGGDGGGGGGGGGGGGLLGRDLLTKLKAQIQFSTEGPQVTWEDRPAMCLVLNLEEEYRLHEKPVPPSIDPSWLQLFPMVWAEKAGMGLANQVPPVVVELKSDASPVAVRQYPMSKEAREGIRPHIQRFLDLGILVPCQSPWNTPLLPVKKPGTNDYRPVQDLREVNKRVQDIHPTVPNPYNLLSSLPPSHTWYSVLDLKDAFFCLKLHPNSQPLFAFEWRDPEKGNTGQLTWTRLPQGFKNSPTLFNEALHRDLASFRALNPQVVMLQYVDDLLVAAPTYRDCKEGTRRLLQELSKLGYRVSAKKAQLCREEVTYLGYLLKGGKRWLTPARKATVMKIPTPTTPRQVREFLGTAGFCRLWIPGFASLAAPLYPLTRPKVPFTWTEAHQEAFGRIKEALLSAPALALPDLTKPFALYVDEKEGVARGVLTQTLGPWRRPVAYLSKKLDPVASGWPTCLKAIAAVALLLKDADKLTLGQNVLVIAPHNLESIVRQPPDRWMTNARMTHYQSLLLNERVSFAPPAILNPATLLPVESDDTPIHICSEILAEETGTRPDLRDQPLPGVPAWYTDGSSFIMDGRRQAGAAIVDNKRTVWASNLPEGTSAQKAELIALTQALRLAEGKSINIYTDSRYAFATAHVHGAIYKQRGWLTSAGKDIKNKEEILALLEAIHLPKRVAIIHCPGHQRGTDPVATGNRKADEAAKQAAQSTRILTETTKNAGKRTADGSEFEKRTADGSEFESPKKKAKVE

SEQ ID NO: 6279 - protein, 2124 aa, synthetic construct
MPAAKRVKLDGGDKKYSIGLDIGTNSVGWAVITDEYKVPSKKFKVLGNTDRHSIKKNLIGALLFDSGETAEATRLKRTARRRYTRRKNRICYLQEIFSNEMAKVDDSFFHRLEESFLVEEDKKHERHPIFGNIVDEVAYHEKYPTIYHLRKKLVDSTDKADLRLIYLALAHMIKFRGHFLIEGDLNPDNSDVDKLFIQLVQTYNQLFEENPINASGVDAKAILSARLSKSRRLENLIAQLPGEKKNGLFGNLIALSLGLTPNFKSNFDLAEDAKLQLSKDTYDDDLDNLLAQIGDQYADLFLAAKNLSDAILLSDILRVNTEITKAPLSASMIKRYDEHHQDLTLLKALVRQQLPEKYKEIFFDQSKNGYAGYIDGGASQEEFYKFIKPILEKMDGTEELLVKLNREDLLRKQRTFDNGSIPHQIHLGELHAILRRQEDFYPFLKDNREKIEKILTFRIPYYVGPLARGNSRFAWMTRKSEETITPWNFEEVVDKGASAQSFIERMTNFDKNLPNEKVLPKHSLLYEYFTVYNELTKVKYVTEGMRKPAFLSGEQKKAIVDLLFKTNRKVTVKQLKEDYFKKIECFDSVEISGVEDRFNASLGTYHDLLKIIKDKDFLDNEENEDILEDIVLTLTLFEDREMIEERLKTYAHLFDDKVMKQLKRRRYTGWGRLSRKLINGIRDKQSGKTILDFLKSDGFANRNFMQLIHDDSLTFKEDIQKAQVSGQGDSLHEHIANLAGSPAIKKGILQTVKVVDELVKVMGRHKPENIVIEMARENQTTQKGQKNSRERMKRIEEGIKELGSQILKEHPVENTQLQNEKLYLYYLQNGRDMYVDQELDINRLSDYDVDHIVPQSFLKDDSIDNKVLTRSDKARGKSDNVPSEEVVKKMKNYWRQLLNAKLITQRKFDNLTKAERGGLSELDKAGFIKRQLVETRQITKHVAQILDSRMNTKYDENDKLIREVKVITLKSKLVSDFRKDFQFYKVREINNYHHAHDAYLNAVVGTALIKKYPKLESEFVYGDYKVYDVRKMIAKSEQEIGKATAKYFFYSNIMNFFKTEITLANGEIRKRPLIETNGETGEIVWDKGRDFATVRKVLSMPQVNIVKKTEVQTGGFSKESILPKRNSDKLIARKKDWDPKKYGGFDSPTVAYSVLVVAKVEKGKSKKLKSVKELLGITIMERSSFEKNPIDFLEAKGYKEVKKDLIIKLPKYSLFELENGRKRMLASAGELQKGNELALPSKYVNFLYLASHYEKLKGSPEDNEQKQLFVEQHKHYLDEIIEQISEFSKRVILADANLDKVLSAYNKHRDKPIREQAENIIHLFTLTNLGAPAAFKYFDTTIDRKRYTSTKEVLDATLIHQSITGLYETRIDLSQLGGDGGGGGGGGGGGGLLGRDLLTKLKAQIQFSTEGPQVTWEDRPAMCLVLNLEEEYRLHEKPVPPSIDPSWLQLFPMVWAEKAGMGLANQVPPVVVELKSDASPVAVRQYPMSKEAREGIRPHIQRFLDLGILVPCQSPWNTPLLPVKKPGTNDYRPVQDLREVNKRVQDIHPTVPNPYNLLSSLPPSHTWYSVLDLKDAFFCLKLHPNSQPLFAFEWRDPEKGNTGQLTWTRLPQGFKNSPTLFNEALHRDLASFRALNPQVVMLQYVDDLLVAAPTYRDCKEGTRRLLQELSKLGYRVSAKKAQLCREEVTYLGYLLKGGKRWLTPARKATVMKIPTPTTPRQVREFLGKAGFCRLFIPGFASLAAPLYPLTRPKVPFTWTEAHQEAFGRIKEALLSAPALALPDLTKPFALYVDEKEGVARGVLTQTLGPWRRPVAYLSKKLDPVASGWPTCLKAIAAVALLLKDADKLTLGQNVLVIAPHNLESIVRQPPDRWMTNARMTHYQSLLLNERVSFAPPAILNPATLLPVESDDTPIHICSEILAEETGTRPDLRDQPLPGVPAWYTDGSSFIMDGRRQAGAAIVDNKRTVWASNLPEGTSAQKAELIALTQALRLAEGKSINIYTDSRYAFATAHVHGAIYKQRGWLTSAGKDIKNKEEILALLEAIHLPKRVAIIHCPGHQRGTDPVATGNRKADEAAKQAAQSTRILTETTKNAGKRTADGSEFEKRTADGSEFESPKKKAKVE

SEQ ID NO: 6280 - protein, 2093 aa, synthetic construct
MPAAKRVKLDGGDKKYSIGLDIGTNSVGWAVITDEYKVPSKKFKVLGNTDRHSIKKNLIGALLFDSGETAEATRLKRTARRRYTRRKNRICYLQEIFSNEMAKVDDSFFHRLEESFLVEEDKKHERHPIFGNIVDEVAYHEKYPTIYHLRKKLVDSTDKADLRLIYLALAHMIKFRGHFLIEGDLNPDNSDVDKLFIQLVQTYNQLFEENPINASGVDAKAILSARLSKSRRLENLIAQLPGEKKNGLFGNLIALSLGLTPNFKSNFDLAEDAKLQLSKDTYDDDLDNLLAQIGDQYADLFLAAKNLSDAILLSDILRVNTEITKAPLSASMIKRYDEHHQDLTLLKALVRQQLPEKYKEIFFDQSKNGYAGYIDGGASQEEFYKFIKPILEKMDGTEELLVKLNREDLLRKQRTFDNGSIPHQIHLGELHAILRRQEDFYPFLKDNREKIEKILTFRIPYYVGPLARGNSRFAWMTRKSEETITPWNFEEVVDKGASAQSFIERMTNFDKNLPNEKVLPKHSLLYEYFTVYNELTKVKYVTEGMRKPAFLSGEQKKAIVDLLFKTNRKVTVKQLKEDYFKKIECFDSVEISGVEDRFNASLGTYHDLLKIIKDKDFLDNEENEDILEDIVLTLTLFEDREMIEERLKTYAHLFDDKVMKQLKRRRYTGWGRLSRKLINGIRDKQSGKTILDFLKSDGFANRNFMQLIHDDSLTFKEDIQKAQVSGQGDSLHEHIANLAGSPAIKKGILQTVKVVDELVKVMGRHKPENIVIEMARENQTTQKGQKNSRERMKRIEEGIKELGSQILKEHPVENTQLQNEKLYLYYLQNGRDMYVDQELDINRLSDYDVDHIVPQSFLKDDSIDNKVLTRSDKARGKSDNVPSEEVVKKMKNYWRQLLNAKLITQRKFDNLTKAERGGLSELDKAGFIKRQLVETRQITKHVAQILDSRMNTKYDENDKLIREVKVITLKSKLVSDFRKDFQFYKVREINNYHHAHDAYLNAVVGTALIKKYPKLESEFVYGDYKVYDVRKMIAKSEQEIGKATAKYFFYSNIMNFFKTEITLANGEIRKRPLIETNGETGEIVWDKGRDFATVRKVLSMPQVNIVKKTEVQTGGFSKESILPKRNSDKLIARKKDWDPKKYGGFDSPTVAYSVLVVAKVEKGKSKKLKSVKELLGITIMERSSFEKNPIDFLEAKGYKEVKKDLIIKLPKYSLFELENGRKRMLASAGELQKGNELALPSKYVNFLYLASHYEKLKGSPEDNEQKQLFVEQHKHYLDEIIEQISEFSKRVILADANLDKVLSAYNKHRDKPIREQAENIIHLFTLTNLGAPAAFKYFDTTIDRKRYTSTKEVLDATLIHQSITGLYETRIDLSQLGGDGGGGGGGGGGGGTLNLEDEYRLYETSAEPEVSPGSTWLSDFPQAWAETGGMGLAVRQAPLIIPLKATSTPVSIKQYPMSQEAKLGIKPHIQRLLDQGILVPCQSPWNTPLLPVKKPGTNDYRPVQDLREVNKRVEDIHPTVPNPYNLLSGLPPSHRWYTVLDLKDAFFCLRLHPTSQPLFAFEWRDPGMGISGQLTWTRLPQGFKNSPTLFNEALHRDLADFRIQHPDLILLQYVDDILLAATSELDCQQGTRALLLTLGNLGYRASAKKAQLCQKQVKYLGYLLKEGQRWLTEARKETVMGQPTPKTPRQLREFLGKAGFCRLFIPGFAEMAAPLYPLTKPGTLFNWGPDQQKAYQEIKQALLTAPALGLPDLTKPFELFVDEKQGYAKGVLTQKLGPWRRPVAYLSKKLDPVAAGWPPCLRMVAAIAVLRKDAGKLTMGQPLVILAPHAVEALVKQPPDRWLSNARMTHYQAMLLDTDRVQFGPVVALNPATLLPLPEEGAPHDCLEILAETHGTRPDLTDQPIPDADHTWYTDGSSFLQEGQRKAGAAVTTETEVIWARALPAGTSAQRAELIALTQALKMAEGKRLNVYTDSRYAFATAHIHGEIYRRRGWLTSEGREIKNKSEILALLKALFLPKRLSIIHCLGHQKGDSAEARGNRLADQAAREAAIKTPPDTSTLLAGKRTADGSEFEKRTADGSEFESPKKKAKVE

SEQ ID NO: 6281 - protein, 2093 aa, synthetic construct
MPAAKRVKLDGGDKKYSIGLDIGTNSVGWAVITDEYKVPSKKFKVLGNTDRHSIKKNLIGALLFDSGETAEATRLKRTARRRYTRRKNRICYLQEIFSNEMAKVDDSFFHRLEESFLVEEDKKHERHPIFGNIVDEVAYHEKYPTIYHLRKKLVDSTDKADLRLIYLALAHMIKFRGHFLIEGDLNPDNSDVDKLFIQLVQTYNQLFEENPINASGVDAKAILSARLSKSRRLENLIAQLPGEKKNGLFGNLIALSLGLTPNFKSNFDLAEDAKLQLSKDTYDDDLDNLLAQIGDQYADLFLAAKNLSDAILLSDILRVNTEITKAPLSASMIKRYDEHHQDLTLLKALVRQQLPEKYKEIFFDQSKNGYAGYIDGGASQEEFYKFIKPILEKMDGTEELLVKLNREDLLRKQRTFDNGSIPHQIHLGELHAILRRQEDFYPFLKDNREKIEKILTFRIPYYVGPLARGNSRFAWMTRKSEETITPWNFEEVVDKGASAQSFIERMTNFDKNLPNEKVLPKHSLLYEYFTVYNELTKVKYVTEGMRKPAFLSGEQKKAIVDLLFKTNRKVTVKQLKEDYFKKIECFDSVEISGVEDRFNASLGTYHDLLKIIKDKDFLDNEENEDILEDIVLTLTLFEDREMIEERLKTYAHLFDDKVMKQLKRRRYTGWGRLSRKLINGIRDKQSGKTILDFLKSDGFANRNFMQLIHDDSLTFKEDIQKAQVSGQGDSLHEHIANLAGSPAIKKGILQTVKVVDELVKVMGRHKPENIVIEMARENQTTQKGQKNSRERMKRIEEGIKELGSQILKEHPVENTQLQNEKLYLYYLQNGRDMYVDQELDINRLSDYDVDHIVPQSFLKDDSIDNKVLTRSDKARGKSDNVPSEEVVKKMKNYWRQLLNAKLITQRKFDNLTKAERGGLSELDKAGFIKRQLVETRQITKHVAQILDSRMNTKYDENDKLIREVKVITLKSKLVSDFRKDFQFYKVREINNYHHAHDAYLNAVVGTALIKKYPKLESEFVYGDYKVYDVRKMIAKSEQEIGKATAKYFFYSNIMNFFKTEITLANGEIRKRPLIETNGETGEIVWDKGRDFATVRKVLSMPQVNIVKKTEVQTGGFSKESILPKRNSDKLIARKKDWDPKKYGGFDSPTVAYSVLVVAKVEKGKSKKLKSVKELLGITIMERSSFEKNPIDFLEAKGYKEVKKDLIIKLPKYSLFELENGRKRMLASAGELQKGNELALPSKYVNFLYLASHYEKLKGSPEDNEQKQLFVEQHKHYLDEIIEQISEFSKRVILADANLDKVLSAYNKHRDKPIREQAENIIHLFTLTNLGAPAAFKYFDTTIDRKRYTSTKEVLDATLIHQSITGLYETRIDLSQLGGDGGGGGGGGGGGGLGIEDEYRLHETSTEPDVSLGSTWLSDFPQAWAETGGMGLAVRQAPLIIPLKATSTPVSIQQYPMSHEARLGIKPHIQRLLDQGILVPCQSPWNTPLLPVKKPGTNDYRPVQDLREVNKRVEDIHPTVPNPYNLLSGLPPSHQWYTVLDLKDAFFCLRLHPTSQPLFAFEWRDPGMGISGQLTWTRLPQGFKNSPTLFNEALHRDLADFRIQHPDLILLQYVDDILLAATSELDCQQGTRALLQTLGDLGYRASAKKAQICQKQVKYLGYLLREGQRWLTEARKETVMGQPVPKTPRQLREFLGKAGFCRLFIPGFAEMAAPLYPLTKPGTLFSWGPDQQKAYQEIKQALLTAPALGLPDLTKPFELFVDEKQGYAKGVLTQKLGPWRRPVAYLSKKLDPVAAGWPPCLRMVAAIAVLTKDAGKLTMGQPLVILAPHAVEALVKQPPDRWLSNARMTHYQAMLLDTDRVQFGPVVALNPATLLPLPEEGAPHDCLEILAETHGTRPDLTDQPIPDADHTWYTDGSSFLQEGQRKAGAAVTTETEVIWAGALPAGTSAQRAELIALTQALKMAEGKRLNVYTDSRYAFATAHIHGEIYRRRGWLTSEGREIKNKSEILALLKALFLPKRLSIIHCLGHQKGDSAEARGNRLADQAAREAAIKTPPDTSTLLIAGKRTADGSEFEKRTADGSEFESPKKKAKVE

SEQ ID NO: 6282 - protein, 2093 aa, synthetic construct; identical to SEQ ID NO: 6281

SEQ ID NO: 6283 - protein, 2093 aa, synthetic construct
MPAAKRVKLDGGDKKYSIGLDIGTNSVGWAVITDEYKVPSKKFKVLGNTDRHSIKKNLIGALLFDSGETAEATRLKRTARRRYTRRKNRICYLQEIFSNEMAKVDDSFFHRLEESFLVEEDKKHERHPIFGNIVDEVAYHEKYPTIYHLRKKLVDSTDKADLRLIYLALAHMIKFRGHFLIEGDLNPDNSDVDKLFIQLVQTYNQLFEENPINASGVDAKAILSARLSKSRRLENLIAQLPGEKKNGLFGNLIALSLGLTPNFKSNFDLAEDAKLQLSKDTYDDDLDNLLAQIGDQYADLFLAAKNLSDAILLSDILRVNTEITKAPLSASMIKRYDEHHQDLTLLKALVRQQLPEKYKEIFFDQSKNGYAGYIDGGASQEEFYKFIKPILEKMDGTEELLVKLNREDLLRKQRTFDNGSIPHQIHLGELHAILRRQEDFYPFLKDNREKIEKILTFRIPYYVGPLARGNSRFAWMTRKSEETITPWNFEEVVDKGASAQSFIERMTNFDKNLPNEKVLPKHSLLYEYFTVYNELTKVKYVTEGMRKPAFLSGEQKKAIVDLLFKTNRKVTVKQLKEDYFKKIECFDSVEISGVEDRFNASLGTYHDLLKIIKDKDFLDNEENEDILEDIVLTLTLFEDREMIEERLKTYAHLFDDKVMKQLKRRRYTGWGRLSRKLINGIRDKQSGKTILDFLKSDGFANRNFMQLIHDDSLTFKEDIQKAQVSGQGDSLHEHIANLAGSPAIKKGILQTVKVVDELVKVMGRHKPENIVIEMARENQTTQKGQKNSRERMKRIEEGIKELGSQILKEHPVENTQLQNEKLYLYYLQNGRDMYVDQELDINRLSDYDVDHIVPQSFLKDDSIDNKVLTRSDKARGKSDNVPSEEVVKKMKNYWRQLLNAKLITQRKFDNLTKAERGGLSELDKAGFIKRQLVETRQITKHVAQILDSRMNTKYDENDKLIREVKVITLKSKLVSDFRKDFQFYKVREINNYHHAHDAYLNAVVGTALIKKYPKLESEFVYGDYKVYDVRKMIAKSEQEIGKATAKYFFYSNIMNFFKTEITLANGEIRKRPLIETNGETGEIVWDKGRDFATVRKVLSMPQVNIVKKTEVQTGGFSKESILPKRNSDKLIARKKDWDPKKYGGFDSPTVAYSVLVVAKVEKGKSKKLKSVKELLGITIMERSSFEKNPIDFLEAKGYKEVKKDLIIKLPKYSLFELENGRKRMLASAGELQKGNELALPSKYVNFLYLASHYEKLKGSPEDNEQKQLFVEQHKHYLDEIIEQISEFSKRVILADANLDKVLSAYNKHRDKPIREQAENIIHLFTLTNLGAPAAFKYFDTTIDRKRYTSTKEVLDATLIHQSITGLYETRIDLSQLGGDGGGGGGGGGGGGTLNIEDEYRLHETSKEPDVSLGSTWLSDFPQAWAETGGMGLAVRQAPLIIPLKATSTPVSIKQYPMSQEARLGIKPHIQRLLDQGILVPCQSPWNTPLLPVKKPGTNDYRPVQDLREVNKRVEDIHPTVPNPYNLLSGLPPSHQWYTVLDLKDAFFCLRLHPTSQPLFAFEWRDPEMGISGQLTWTRLPQGFKNSPTLFNEALHRDLAGFRIQHPDLILLQYVDDLLLAATSELDCQQGTRALLQTLGDLGYRASAKKAQICQKQVKYLGYLLKEGQRWLTEARKETVMGQPIPKTPRQLREFLGTAGFCRLWIPGFAEMAAPLYPLTKPGTLFNWGPDQQKAFQEIKQALLTAPALGLPDLTKPFELFVDEKQGYAKGVLTQKLGPWRRPVAYLSKKLDPVAAGWPPCLRMVAAIAVLTKDAGKLTMGQPLVILAPHAVEALVKQPPDRWLSNARMTHYQALLLDTDRVQFGPVVALNPATLLPLPEEGLQHDCLDILAEAHGTRSDLMDQPLPDADHTWYTDGSSFLQEGQRKAGAAVTTETEVIWARALPAGTSAQRAELIALTQALKMAEGKKLNVYTDSRYAFATAHIHGEIYRRRGWLTSEGKEIKNKDEILALLKALFLPKRLSIIHCPGHQKGNSAEARGNRMADQAAREVATRETPETSTLLAGKRTADGSEFEKRTADGSEFESPKKKAKVE

SEQ ID NO: 6284 - protein, 2093 aa, synthetic construct
MPAAKRVKLDGGDKKYSIGLDIGTNSVGWAVITDEYKVPSKKFKVLGNTDRHSIKKNLIGALLFDSGETAEATRLKRTARRRYTRRKNRICYLQEIFSNEMAKVDDSFFHRLEESFLVEEDKKHERHPIFGNIVDEVAYHEKYPTIYHLRKKLVDSTDKADLRLIYLALAHMIKFRGHFLIEGDLNPDNSDVDKLFIQLVQTYNQLFEENPINASGVDAKAILSARLSKSRRLENLIAQLPGEKKNGLFGNLIALSLGLTPNFKSNFDLAEDAKLQLSKDTYDDDLDNLLAQIGDQYADLFLAAKNLSDAILLSDILRVNTEITKAPLSASMIKRYDEHHQDLTLLKALVRQQLPEKYKEIFFDQSKNGYAGYIDGGASQEEFYKFIKPILEKMDGTEELLVKLNREDLLRKQRTFDNGSIPHQIHLGELHAILRRQEDFYPFLKDNREKIEKILTFRIPYYVGPLARGNSRFAWMTRKSEETITPWNFEEVVDKGASAQSFIERMTNFDKNLPNEKVLPKHSLLYEYFTVYNELTKVKYVTEGMRKPAFLSGEQKKAIVDLLFKTNRKVTVKQLKEDYFKKIECFDSVEISGVEDRFNASLGTYHDLLKIIKDKDFLDNEENEDILEDIVLTLTLFEDREMIEERLKTYAHLFDDKVMKQLKRRRYTGWGRLSRKLINGIRDKQSGKTILDFLKSDGFANRNFMQLIHDDSLTFKEDIQKAQVSGQGDSLHEHIANLAGSPAIKKGILQTVKVVDELVKVMGRHKPENIVIEMARENQTTQKGQKNSRERMKRIEEGIKELGSQILKEHPVENTQLQNEKLYLYYLQNGRDMYVDQELDINRLSDYDVDHIVPQSFLKDDSIDNKVLTRSDKARGKSDNVPSEEVVKKMKNYWRQLLNAKLITQRKFDNLTKAERGGLSELDKAGFIKRQLVETRQITKHVAQILDSRMNTKYDENDKLIREVKVITLKSKLVSDFRKDFQFYKVREINNYHHAHDAYLNAVVGTALIKKYPKLESEFVYGDYKVYDVRKMIAKSEQEIGKATAKYFFYSNIMNFFKTEITLANGEIRKRPLIETNGETGEIVWDKGRDFATVRKVLSMPQVNIVKKTEVQTGGFSKESILPKRNSDKLIARKKDWDPKKYGGFDSPTVAYSVLVVAKVEKGKSKKLKSVKELLGITIMERSSFEKNPIDFLEAKGYKEVKKDLIIKLPKYSLFELENGRKRMLASAGELQKGNELALPSKYVNFLYLASHYEKLKGSPEDNEQKQLFVEQHKHYLDEIIEQISEFSKRVILADANLDKVLSAYNKHRDKPIREQAENIIHLFTLTNLGAPAAFKYFDTTIDRKRYTSTKEVLDATLIHQSITGLYETRIDLSQLGGDGGGGGGGGGGGGTLNIEDEHRLHETSKEPDVSLGSTWLSDFPQAWAETGGMGLAVRQAPLIIPLKATSTPVSIKQYPMSQEARLGIKPHIQRLLDQGILVPCQSPWNTPLLPVKKPGTNDYRPVQDLREVNKRVEDIHPTVPNPYNLLSGLPPSHQWYTVLDLKDAFFCLRLHPTSQPLFAFEWRDPEMGISGQLTWTRLPQGFKNSPTLFNEALHRDLADFRIQHPDLILLQYVDDLLLAATSELDCQQGTRALLQTLGNLGYRASAKKAQICQKQVKYLGYLLKEGQRWLTEARKETVMGQPTPKTPRQLREFLGKAGFCRLFIPGFAEMAAPLYPLTKPGTLFNWGPDQQKAYQEIKQALLTAPALGLPDLTKPFELFVDEKQGYAKGVLTQKLGPWRRPVAYLSKKLDPVAAGWPPCLRMVAAIAVLTKDAGKLTMGQPLVILAPHAVEALVKQPPDRWLSNARMTHYQALLLDTDRVQFGPVVALNPATLLPLPEEGLQHNCLDILAEAHGTRPDLTDQPLPDADHTWYTDGSSLLQEGQRKAGAAVTTETEVIWAKALPAGTSAQRAELIALTQALKMAEGKKLNVYTDSRYAFATAHIHGEIYRRRGWLTSEGKEIKNKDEILALLKALFLPKRLSIIHCPGHQKGHSAEARGNRMADQAARKAAITETPDTSTLLAGKRTADGSEFEKRTADGSEFESPKKKAKVE

SEQ ID NO: 6285 - protein, 2093 aa, synthetic construct; identical to SEQ ID NO: 6284

SEQ ID NO: 6286 - protein, 2091 aa, synthetic construct
MPAAKRVKLDGGDKKYSIGLDIGTNSVGWAVITDEYKVPSKKFKVLGNTDRHSIKKNLIGALLFDSGETAEATRLKRTARRRYTRRKNRICYLQEIFSNEMAKVDDSFFHRLEESFLVEEDKKHERHPIFGNIVDEVAYHEKYPTIYHLRKKLVDSTDKADLRLIYLALAHMIKFRGHFLIEGDLNPDNSDVDKLFIQLVQTYNQLFEENPINASGVDAKAILSARLSKSRRLENLIAQLPGEKKNGLFGNLIALSLGLTPNFKSNFDLAEDAKLQLSKDTYDDDLDNLLAQIGDQYADLFLAAKNLSDAILLSDILRVNTEITKAPLSASMIKRYDEHHQDLTLLKALVRQQLPEKYKEIFFDQSKNGYAGYIDGGASQEEFYKFIKPILEKMDGTEELLVKLNREDLLRKQRTFDNGSIPHQIHLGELHAILRRQEDFYPFLKDNREKIEKILTFRIPYYVGPLARGNSRFAWMTRKSEETITPWNFEEVVDKGASAQSFIERMTNFDKNLPNEKVLPKHSLLYEYFTVYNELTKVKYVTEGMRKPAFLSGEQKKAIVDLLFKTNRKVTVKQLKEDYFKKIECFDSVEISGVEDRFNASLGTYHDLLKIIKDKDFLDNEENEDILEDIVLTLTLFEDREMIEERLKTYAHLFDDKVMKQLKRRRYTGWGRLSRKLINGIRDKQSGKTILDFLKSDGFANRNFMQLIHDDSLTFKEDIQKAQVSGQGDSLHEHIANLAGSPAIKKGILQTVKVVDELVKVMGRHKPENIVIEMARENQTTQKGQKNSRERMKRIEEGIKELGSQILKEHPVENTQLQNEKLYLYYLQNGRDMYVDQELDINRLSDYDVDHIVPQSFLKDDSIDNKVLTRSDKARGKSDNVPSEEVVKKMKNYWRQLLNAKLITQRKFDNLTKAERGGLSELDKAGFIKRQLVETRQITKHVAQILDSRMNTKYDENDKLIREVKVITLKSKLVSDFRKDFQFYKVREINNYHHAHDAYLNAVVGTALIKKYPKLESEFVYGDYKVYDVRKMIAKSEQEIGKATAKYFFYSNIMNFFKTEITLANGEIRKRPLIETNGETGEIVWDKGRDFATVRKVLSMPQVNIVKKTEVQTGGFSKESILPKRNSDKLIARKKDWDPKKYGGFDSPTVAYSVLVVAKVEKGKSKKLKSVKELLGITIMERSSFEKNPIDFLEAKGYKEVKKDLIIKLPKYSLFELENGRKRMLASAGELQKGNELALPSKYVNFLYLASHYEKLKGSPEDNEQKQLFVEQHKHYLDEIIEQISEFSKRVILADANLDKVLSAYNKHRDKPIREQAENIIHLFTLTNLGAPAAFKYFDTTIDRKRYTSTKEVLDATLIHQSITGLYETRIDLSQLGGDGGGGGGGGGGGGVLNLEEEYRLHEKPVPSSIDPSWLQLFPTVWAERAGMGLANQVPPVVVELRSGASPVAVRQYPMSKEAREGIRPHIQRFLDLGVLVPCQSPWNTPLLPVKKPGTNDYRPVQDLREINKRVQDIHPTVPNPYNLLSSLPPSHTWYSVLDLKDAFFCLKLHPNSQPLFAFEWRDPEKGNTGQLTWTRLPQGFKNSPTLFNEALHRDLAPFRALNPQVVLLQYVDDLLVAAPTYRDCKEGTQKLLQELSKLGYRVSAKKAQLCQKEVTYLGYLLKEGKRWLTPARKATVMKIPPPTTPRQVREFLGKAGFCRLFIPGFASLAAPLYPLTKPSIPFIWTEEHQKAFDRIKEALLSAPALALPDLTKPFTLYVDERAGVARGVLTQTLGPWRRPVAYLSKKLDPVASGWPTCLKAVAAVALLLKDADKLTLGQNVTVIASHSLESIVRQPPDRWMTNARMTHYQSLLLNERVSFAPPAVLNPATLLPVESEATPVHRCSEILAEETGTRRDLKDQPLPGVPAWYTDGSSFIAEGKRRAGAAIVDGKRTVWASSLPEGTSAQKAELVALTQALRLAEGKDINIYTDSRYAFATAHIHGAIYKQRGWLTSAGKDIKNKEEILALLEAIHLPKRVAIIHCPGHQKGNDPVATGNRRADEAAKQAALSTRVLAETTKPAGKRTADGSEFEKRTADGSEFESPKKKAKVE

SEQ ID NO: 6287 - protein, 2093 aa, synthetic construct
MPAAKRVKLDGGDKKYSIGLDIGTNSVGWAVITDEYKVPSKKFKVLGNTDRHSIKKNLIGALLFDSGETAEATRLKRTARRRYTRRKNRICYLQEIFSNEMAKVDDSFFHRLEESFLVEEDKKHERHPIFGNIVDEVAYHEKYPTIYHLRKKLVDSTDKADLRLIYLALAHMIKFRGHFLIEGDLNPDNSDVDKLFIQLVQTYNQLFEENPINASGVDAKAILSARLSKSRRLENLIAQLPGEKKNGLFGNLIALSLGLTPNFKSNFDLAEDAKLQLSKDTYDDDLDNLLAQIGDQYADLFLAAKNLSDAILLSDILRVNTEITKAPLSASMIKRYDEHHQDLTLLKALVRQQLPEKYKEIFFDQSKNGYAGYIDGGASQEEFYKFIKPILEKMDGTEELLVKLNREDLLRKQRTFDNGSIPHQIHLGELHAILRRQEDFYPFLKDNREKIEKILTFRIPYYVGPLARGNSRFAWMTRKSEETITPWNFEEVVDKGASAQSFIERMTNFDKNLPNEKVLPKHSLLYEYFTVYNELTKVKYVTEGMRKPAFLSGEQKKAIVDLLFKTNRKVTVKQLKEDYFKKIECFDSVEISGVEDRFNASLGTYHDLLKIIKDKDFLDNEENEDILEDIVLTLTLFEDREMIEERLKTYAHLFDDKVMKQLKRRRYTGWGRLSRKLINGIRDKQSGKTILDFLKSDGFANRNFMQLIHDDSLTFKEDIQKAQVSGQGDSLHEHIANLAGSPAIKKGILQTVKVVDELVKVMGRHKPENIVIEMARENQTTQKGQKNSRERMKRIEEGIKELGSQILKEHPVENTQLQNEKLYLYYLQNGRDMYVDQELDINRLSDYDVDHIVPQSFLKDDSIDNKVLTRSDKARGKSDNVPSEEVVKKMKNYWRQLLNAKLITQRKFDNLTKAERGGLSELDKAGFIKRQLVETRQITKHVAQILDSRMNTKYDENDKLIREVKVITLKSKLVSDFRKDFQFYKVREINNYHHAHDAYLNAVVGTALIKKYPKLESEFVYGDYKVYDVRKMIAKSEQEIGKATAKYFFYSNIMNFFKTEITLANGEIRKRPLIETNGETGEIVWDKGRDFATVRKVLSMPQVNIVKKTEVQTGGFSKESILPKRNSDKLIARKKDWDPKKYGGFDSPTVAYSVLVVAKVEKGKSKKLKSVKELLGITIMERSSFEKNPIDFLEAKGYKEVKKDLIIKLPKYSLFELENGRKRMLASAGELQKGNELALPSKYVNFLYLASHYEKLKGSPEDNEQKQLFVEQHKHYLDEIIEQISEFSKRVILADANLDKVLSAYNKHRDKPIREQAENIIHLFTLTNLGAPAAFKYFDTTIDRKRYTSTKEVLDATLIHQSITGLYETRIDLSQLGGDGGGGGGGGGGGGTLNIEDEYRLHETSKEPDVPLGSTWLSDFPQAWAETGGMGLAVRQAPLIIPLKATSTPVSIKQYPMSQEARLGIKPHIQRLLDQGILVPCQSPWNTPLLPVKKPGTNDYRPVQDLREVNKRVEDIHPTVPNPYNLLSGLPPSHQWYTVLDLKDAFFCLRLHPTSQPLFAFEWRDPEMGISGQLTWTRLPQGFKNSPTLFNEALHRDLADFRIQHPDLILLQYVDDLLLAATSEQDCQRGTRALLQTLGNLGYRASAKKAQICQKQVKYLGYLLKEGQRWLTEARKETVMGQPTPKTPRQLREFLGTAGFCRLWIPGFAEMAAPLYPLTKPGTLFNWGPDQQKAYQEIKQALLTAPALGLPDLTKPFELFVDEKQGYAKGVLTQKLGPWRRPVAYLSKKLDPVAAGWPPCLRMVAAIAVLTKDAGKLTMGQPLVILAPHAVEALVKQPPDRWLSNARMTHYQAMLLDTDRVQFGPVVALNPATLLPLPEKEAPHDCLEILAETHGTRPDLTDQPIPDADYTWYTDGSSFLQEGQRRAGAAVTTETEVIWARALPAGTSAQRAELIALTQALKMAEGKKLNVYTDSRYAFATAHVHGEIYRRRGWLTSEGREIKNKNEILALLKALFLPKRLSIIHCPGHQKGNSAEARGNRMADQAAREAAMKAVLETSTLLAGKRTADGSEFEKRTADGSEFESPKKKAKVE

SEQ ID NO: 6288 - protein, 2093 aa, synthetic construct
MPAAKRVKLDGGDKKYSIGLDIGTNSVGWAVITDEYKVPSKKFKVLGNTDRHSIKKNLIGALLFDSGETAEATRLKRTARRRYTRRKNRICYLQEIFSNEMAKVDDSFFHRLEESFLVEEDKKHERHPIFGNIVDEVAYHEKYPTIYHLRKKLVDSTDKADLRLIYLALAHMIKFRGHFLIEGDLNPDNSDVDKLFIQLVQTYNQLFEENPINASGVDAKAILSARLSKSRRLENLIAQLPGEKKNGLFGNLIALSLGLTPNFKSNFDLAEDAKLQLSKDTYDDDLDNLLAQIGDQYADLFLAAKNLSDAILLSDILRVNTEITKAPLSASMIKRYDEHHQDLTLLKALVRQQLPEKYKEIFFDQSKNGYAGYIDGGASQEEFYKFIKPILEKMDGTEELLVKLNREDLLRKQRTFDNGSIPHQIHLGELHAILRRQEDFYPFLKDNREKIEKILTFRIPYYVGPLARGNSRFAWMTRKSEETITPWNFEEVVDKGASAQSFIERMTNFDKNLPNEKVLPKHSLLYEYFTVYNELTKVKYVTEGMRKPAFLSGEQKKAIVDLLFKTNRKVTVKQLKEDYFKKIECFDSVEISGVEDRFNASLGTYHDLLKIIKDKDFLDNEENEDILEDIVLTLTLFEDREMIEERLKTYAHLFDDKVMKQLKRRRYTGWGRLSRKLINGIRDKQSGKTILDFLKSDGFANRNFMQLIHDDSLTFKEDIQKAQVSGQGDSLHEHIANLAGSPAIKKGILQTVKVVDELVKVMGRHKPENIVIEMARENQTTQKGQKNSRERMKRIEEGIKELGSQILKEHPVENTQLQNEKLYLYYLQNGRDMYVDQELDINRLSDYDVDHIVPQSFLKDDSIDNKVLTRSDKARGKSDNVPSEEVVKKMKNYWRQLLNAKLITQRKFDNLTKAERGGLSELDKAGFIKRQLVETRQITKHVAQILDSRMNTKYDENDKLIREVKVITLKSKLVSDFRKDFQFYKVREINNYHHAHDAYLNAVVGTALIKKYPKLESEFVYGDYKVYDVRKMIAKSEQEIGKATAKYFFYSNIMNFFKTEITLANGEIRKRPLIETNGETGEIVWDKGRDFATVRKVLSMPQVNIVKKTEVQTGGFSKESILPKRNSDKLIARKKDWDPKKYGGFDSPTVAYSVLVVAKVEKGKSKKLKSVKELLGITIMERSSFEKNPIDFLEAKGYKEVKKDLIIKLPKYSLFELENGRKRMLASAGELQKGNELALPSKYVNFLYLASHYEKLKGSPEDNEQKQLFVEQHKHYLDEIIEQISEFSKRVILADANLDKVLSAYNKHRDKPIREQAENIIHLFTLTNLGAPAAFKYFDTTIDRKRYTSTKEVLDATLIHQSITGLYETRIDLSQLGGDGGGGGGGGGGGGTLNIEDEYRLHETSKEPDVPLGSTWLSDFPQAWAETGGMGLAVRQAPLIIPLKATSTPVSIKQYPMSQEARLGIKPHIQRLLDQGILVPCQSPWNTPLLPVKKPGTNDYRPVQDLREVNKRVEDIHPTVPNPYNLLSGLPPSHQWYTVLDLKDAFFCLRLHPTSQPLFAFEWRDPEMGISGQLTWTRLPQGFKNSPTLFNEALHRDLADFRIQHPDLILLQYVDDLLLAATSEQDCQRGTRALLQTLGNLGYRASAKKAQICQKQVKYLGYLLKEGQRWLTEARKETVMGQPTPKTPRQLREFLGKAGFCRLFIPGFAEMAAPLYPLTKPGTLFNWGPDQQKAYQEIKQALLTAPALGLPDLTKPFELFVDEKQGYAKGVLTQKLGPWRRPVAYLSKKLDPVAAGWPPCLRMVAAIAVLTKDAGKLTMGQPLVILAPHAVEALVKQPPDRWLSNARMTHYQAMLLDTDRVQFGPVVALNPATLLPLPEKEAPHDCLEILAETHGTRPDLTDQPIPDADYTWYTDGSSFLQEGQRRAGAAVTTETEVIWARALPAGTSAQRAELIALTQALKMAEGKKLNVYTDSRYAFATAHVHGEIYRRRGWLTSEGREIKNKNEILALLKALFLPKRLSIIHCPGHQKGNSAEARGNRMADQAAREAAMKAVLETSTLLAGKRTADGSEFEKRTADGSEFESPKKKAKVE

SEQ ID NO: 6289 - protein, 2090 aa, synthetic construct
MPAAKRVKLDGGDKKYSIGLDIGTNSVGWAVITDEYKVPSKKFKVLGNTDRHSIKKNLIGALLFDSGETAEATRLKRTARRRYTRRKNRICYLQEIFSNEMAKVDDSFFHRLEESFLVEEDKKHERHPIFGNIVDEVAYHEKYPTIYHLRKKLVDSTDKADLRLIYLALAHMIKFRGHFLIEGDLNPDNSDVDKLFIQLVQTYNQLFEENPINASGVDAKAILSARLSKSRRLENLIAQLPGEKKNGLFGNLIALSLGLTPNFKSNFDLAEDAKLQLSKDTYDDDLDNLLAQIGDQYADLFLAAKNLSDAILLSDILRVNTEITKAPLSASMIKRYDEHHQDLTLLKALVRQQLPEKYKEIFFDQSKNGYAGYIDGGASQEEFYKFIKPILEKMDGTEELLVKLNREDLLRKQRTFDNGSIPHQIHLGELHAILRRQEDFYPFLKDNREKIEKILTFRIPYYVGPLARGNSRFAWMTRKSEETITPWNFEEVVDKGASAQSFIERMTNFDKNLPNEKVLPKHSLLYEYFTVYNELTKVKYVTEGMRKPAFLSGEQKKAIVDLLFKTNRKVTVKQLKEDYFKKIECFDSVEISGVEDRFNASLGTYHDLLKIIKDKDFLDNEENEDILEDIVLTLTLFEDREMIEERLKTYAHLFDDKVMKQLKRRRYTGWGRLSRKLINGIRDKQSGKTILDFLKSDGFANRNFMQLIHDDSLTFKEDIQKAQVSGQGDSLHEHIANLAGSPAIKKGILQTVKVVDELVKVMGRHKPENIVIEMARENQTTQKGQKNSRERMKRIEEGIKELGSQILKEHPVENTQLQNEKLYLYYLQNGRDMYVDQELDINRLSDYDVDHIVPQSFLKDDSIDNKVLTRSDKARGKSDNVPSEEVVKKMKNYWRQLLNAKLITQRKFDNLTKAERGGLSELDKAGFIKRQLVETRQITKHVAQILDSRMNTKYDENDKLIREVKVITLKSKLVSDFRKDFQFYKVREINNYHHAHDAYLNAVVGTALIKKYPKLESEFVYGDYKVYDVRKMIAKSEQEIGKATAKYFFYSNIMNFFKTEITLANGEIRKRPLIETNGETGEIVWDKGRDFATVRKVLSMPQVNIVKKTEVQTGGFSKESILPKRNSDKLIARKKDWDPKKYGGFDSPTVAYSVLVVAKVEKGKSKKLKSVKELLGITIMERSSFEKNPIDFLEAKGYKEVKKDLIIKLPKYSLFELENGRKRMLASAGELQKGNELALPSKYVNFLYLASHYEKLKGSPEDNEQKQLFVEQHKHYLDEIIEQISEFSKRVILADANLDKVLSAYNKHRDKPIREQAENIIHLFTLTNLGAPAAFKYFDTTIDRKRYTSTKEVLDATLIHQSITGLYETRIDLSQLGGDGGGSSGGTAPLEEEYRLFLEAPIQNVTLLEQWKREIPKVWAEINPPGLASTQAPIHVQLLSTALPVRVRQYPITLEAKRSLRETIRKFRAAGILRPVHSPWNTPLLPVRKSGTSEYRMVQDLREVNKRVETIHPTVPNPYTLLSLLPPDRIWYSVLDLKDAFFCIPLAPESQLIFAFEWADAEEGESGQLTWTRLPQGFKNSPTLFNEALNRDLQGFRLDHPSVSLLQYVDDLLIAADTQAACLSATRDLLMTLAELGYRVSGKKAQLCQEEVTYLGFKIHKGSRSLSNSRTQAILQIPVPKTKRQVREFLGTIGYCRLWIPGFAELAQPLYAATRPGNDPLVWGEKEEEAFQSLKLALTQPPALALPSLDKPFQLFVEETSGAAKGVLTQALGPWKRPVAYLSKRLDPVAAGWPRCLRAIAAAALLTREASKLTFGQDIEITSSHNLESLLRSPPDKWLTNARITQYQVLLLDPPRVRFKQTAALNPATLLPETDDTLPIHHCLDTLDSLTSTRPDLTDQPLAQAEATLFTDGSSYIRDGKRYAGAAVVTLDSVIWAEPLPIGTSAQKAELIALTKALEWSKDKSVNIYTDSRYAFATLHVHGMIYRERGWLTAGGKAIKNAPEILALLTAVWLPKRVAVMHCKGHQKDDAPTSTGNRRADEVAREVAIRPLSTQATISAGKRTADGSEFEKRTADGSEFESPKKKAKVE

SEQ ID NO: 6290 - protein, 2210 aa, synthetic construct
MPAAKRVKLDGGDKKYSIGLDIGTNSVGWAVITDEYKVPSKKFKVLGNTDRHSIKKNLIGALLFDSGETAEATRLKRTARRRYTRRKNRICYLQEIFSNEMAKVDDSFFHRLEESFLVEEDKKHERHPIFGNIVDEVAYHEKYPTIYHLRKKLVDSTDKADLRLIYLALAHMIKFRGHFLIEGDLNPDNSDVDKLFIQLVQTYNQLFEENPINASGVDAKAILSARLSKSRRLENLIAQLPGEKKNGLFGNLIALSLGLTPNFKSNFDLAEDAKLQLSKDTYDDDLDNLLAQIGDQYADLFLAAKNLSDAILLSDILRVNTEITKAPLSASMIKRYDEHHQDLTLLKALVRQQLPEKYKEIFFDQSKNGYAGYIDGGASQEEFYKFIKPILEKMDGTEELLVKLNREDLLRKQRTFDNGSIPHQIHLGELHAILRRQEDFYPFLKDNREKIEKILTFRIPYYVGPLARGNSRFAWMTRKSEETITPWNFEEVVDKGASAQSFIERMTNFDKNLPNEKVLPKHSLLYEYFTVYNELTKVKYVTEGMRKPAFLSGEQKKAIVDLLFKTNRKVTVKQLKEDYFKKIECFDSVEISGVEDRFNASLGTYHDLLKIIKDKDFLDNEENEDILEDIVLTLTLFEDREMIEERLKTYAHLFDDKVMKQLKRRRYTGWGRLSRKLINGIRDKQSGKTILDFLKSDGFANRNFMQLIHDDSLTFKEDIQKAQVSGQGDSLHEHIANLAGSPAIKKGILQTVKVVDELVKVMGRHKPENIVIEMARENQTTQKGQKNSRERMKRIEEGIKELGSQILKEHPVENTQLQNEKLYLYYLQNGRDMYVDQELDINRLSDYDVDHIVPQSFLKDDSIDNKVLTRSDKARGKSDNVPSEEVVKKMKNYWRQLLNAKLITQRKFDNLTKAERGGLSELDKAGFIKRQLVETRQITKHVAQILDSRMNTKYDENDKLIREVKVITLKSKLVSDFRKDFQFYKVREINNYHHAHDAYLNAVVGTALIKKYPKLESEFVYGDYKVYDVRKMIAKSEQEIGKATAKYFFYSNIMNFFKTEITLANGEIRKRPLIETNGETGEIVWDKGRDFATVRKVLSMPQVNIVKKTEVQTGGFSKESILPKRNSDKLIARKKDWDPKKYGGFDSPTVAYSVLVVAKVEKGKSKKLKSVKELLGITIMERSSFEKNPIDFLEAKGYKEVKKDLIIKLPKYSLFELENGRKRMLASAGELQKGNELALPSKYVNFLYLASHYEKLKGSPEDNEQKQLFVEQHKHYLDEIIEQISEFSKRVILADANLDKVLSAYNKHRDKPIREQAENIIHLFTLTNLGAPAAFKYFDTTIDRKRYTSTKEVLDATLIHQSITGLYETRIDLSQLGGDGGGSSGGTLGDQGSRGSDPLPEPRVTLTVEGIPTEFLVNTGAEHSVLTKPMGKMGSKRTVVAGATGSKVYPWTTKRLLKIGQKQVTHSFLVIPECPAPLLGRDLLTKLKAQIQFSTEGPQVTWEDRPAMCLVLNLEEEYRLHEKPVPPSIDPSWLQLFPMVWAEKAGMGLANQVPPVVVELKSDASPVAVRQYPMSKEAREGIRPHIQRFLDLGILVPCQSPWNTPLLPVKKPGTNDYRPVQDLREVNKRVQDIHPTVPNPYNLLSSLPPSHTWYSVLDLKDAFFCLKLHPNSQPLFAFEWRDPEKGNTGQLTWTRLPQGFKNSPTLFNEALHRDLASFRALNPQVVMLQYVDDLLVAAPTYRDCKEGTRRLLQELSKLGYRVSAKKAQLCREEVTYLGYLLKGGKRWLTPARKATVMKIPTPTTPRQVREFLGTAGFCRLWIPGFASLAAPLYPLTRPKVPFTWTEAHQEAFGRIKEALLSAPALALPDLTKPFALYVDEKEGVARGVLTQTLGPWRRPVAYLSKKLDPVASGWPTCLKAIAAVALLLKDADKLTLGQNVLVIAPHNLESIVRQPPDRWMTNARMTHYQSLLLNERVSFAPPAILNPATLLPVESDDTPIHICSEILAEETGTRPDLRDQPLPGVPAWYTDGSSFIMDGRRQAGAAIVDNKRTVWASNLPEGTSAQKAELIALTQALRLAEGKSINIYTDSRYAFATAHVHGAIYKQRGWLTSAGKDIKNKEEILALLEAIHLPKRVAIIHCPGHQRGTDPVATGNRKADEAAKQAAQSTRILTETTKNAGKRTADGSEFEKRTADGSEFESPKKKAKVE

SEQ ID NO: 6291 - protein, 2088 aa, synthetic construct
MPAAKRVKLDGGDKKYSIGLDIGTNSVGWAVITDEYKVPSKKFKVLGNTDRHSIKKNLIGALLFDSGETAEATRLKRTARRRYTRRKNRICYLQEIFSNEMAKVDDSFFHRLEESFLVEEDKKHERHPIFGNIVDEVAYHEKYPTIYHLRKKLVDSTDKADLRLIYLALAHMIKFRGHFLIEGDLNPDNSDVDKLFIQLVQTYNQLFEENPINASGVDAKAILSARLSKSRRLENLIAQLPGEKKNGLFGNLIALSLGLTPNFKSNFDLAEDAKLQLSKDTYDDDLDNLLAQIGDQYADLFLAAKNLSDAILLSDILRVNTEITKAPLSASMIKRYDEHHQDLTLLKALVRQQLPEKYKEIFFDQSKNGYAGYIDGGASQEEFYKFIKPILEKMDGTEELLVKLNREDLLRKQRTFDNGSIPHQIHLGELHAILRRQEDFYPFLKDNREKIEKILTFRIPYYVGPLARGNSRFAWMTRKSEETITPWNFEEVVDKGASAQSFIERMTNFDKNLPNEKVLPKHSLLYEYFTVYNELTKVKYVTEGMRKPAFLSGEQKKAIVDLLFKTNRKVTVKQLKEDYFKKIECFDSVEISGVEDRFNASLGTYHDLLKIIKDKDFLDNEENEDILEDIVLTLTLFEDREMIEERLKTYAHLFDDKVMKQLKRRRYTGWGRLSRKLINGIRDKQSGKTILDFLKSDGFANRNFMQLIHDDSLTFKEDIQKAQVSGQGDSLHEHIANLAGSPAIKKGILQTVKVVDELVKVMGRHKPENIVIEMARENQTTQKGQKNSRERMKRIEEGIKELGSQILKEHPVENTQLQNEKLYLYYLQNGRDMYVDQELDINRLSDYDVDHIVPQSFLKDDSIDNKVLTRSDKARGKSDNVPSEEVVKKMKNYWRQLLNAKLITQRKFDNLTKAERGGLSELDKAGFIKRQLVETRQITKHVAQILDSRMNTKYDENDKLIREVKVITLKSKLVSDFRKDFQFYKVREINNYHHAHDAYLNAVVGTALIKKYPKLESEFVYGDYKVYDVRKMIAKSEQEIGKATAKYFFYSNIMNFFKTEITLANGEIRKRPLIETNGETGEIVWDKGRDFATVRKVLSMPQVNIVKKTEVQTGGFSKESILPKRNSDKLIARKKDWDPKKYGGFDSPTVAYSVLVVAKVEKGKSKKLKSVKELLGITIMERSSFEKNPIDFLEAKGYKEVKKDLIIKLPKYSLFELENGRKRMLASAGELQKGNELALPSKYVNFLYLASHYEKLKGSPEDNEQKQLFVEQHKHYLDEIIEQISEFSKRVILADANLDKVLSAYNKHRDKPIREQAENIIHLFTLTNLGAPAAFKYFDTTIDRKRYTSTKEVLDATLIHQSITGLYETRIDLSQLGGDGGGSSGGTLNLEDEYRLYETSAEPEVSPGSTWLSDFPQAWAETGGMGLAVRQAPLIIPLKATSTPVSIKQYPMSQEAKLGIKPHIQRLLDQGILVPCQSPWNTPLLPVKKPGTNDYRPVQDLREVNKRVEDIHPTVPNPYNLLSGLPPSHRWYTVLDLKDAFFCLRLHPTSQPLFAFEWRDPGMGISGQLTWTRLPQGFKNSPTLFNEALHRDLADFRIQHPDLILLQYVDDILLAATSELDCQQGTRALLLTLGNLGYRASAKKAQLCQKQVKYLGYLLKEGQRWLTEARKETVMGQPTPKTPRQLREFLGKAGFCRLFIPGFAEMAAPLYPLTKPGTLFNWGPDQQKAYQEIKQALLTAPALGLPDLTKPFELFVDEKQGYAKGVLTQKLGPWRRPVAYLSKKLDPVAAGWPPCLRMVAAIAVLRKDAGKLTMGQPLVILAPHAVEALVKQPPDRWLSNARMTHYQAMLLDTDRVQFGPVVALNPATLLPLPEEGAPHDCLEILAETHGTRPDLTDQPIPDADHTWYTDGSSFLQEGQRKAGAAVTTETEVIWARALPAGTSAQRAELIALTQALKMAEGKRLNVYTDSRYAFATAHIHGEIYRRRGWLTSEGREIKNKSEILALLKALFLPKRLSIIHCLGHQKGDSAEARGNRLADQAAREAAIKTPPDTSTLLAGKRTADGSEFEKRTADGSEFESPKKKAKVE

SEQ ID NO: 6292 - protein, 2088 aa, synthetic construct
MPAAKRVKLDGGDKKYSIGLDIGTNSVGWAVITDEYKVPSKKFKVLGNTDRHSIKKNLIGALLFDSGETAEATRLKRTARRRYTRRKNRICYLQEIFSNEMAKVDDSFFHRLEESFLVEEDKKHERHPIFGNIVDEVAYHEKYPTIYHLRKKLVDSTDKADLRLIYLALAHMIKFRGHFLIEGDLNPDNSDVDKLFIQLVQTYNQLFEENPINASGVDAKAILSARLSKSRRLENLIAQLPGEKKNGLFGNLIALSLGLTPNFKSNFDLAEDAKLQLSKDTYDDDLDNLLAQIGDQYADLFLAAKNLSDAILLSDILRVNTEITKAPLSASMIKRYDEHHQDLTLLKALVRQQLPEKYKEIFFDQSKNGYAGYIDGGASQEEFYKFIKPILEKMDGTEELLVKLNREDLLRKQRTFDNGSIPHQIHLGELHAILRRQEDFYPFLKDNREKIEKILTFRIPYYVGPLARGNSRFAWMTRKSEETITPWNFEEVVDKGASAQSFIERMTNFDKNLPNEKVLPKHSLLYEYFTVYNELTKVKYVTEGMRKPAFLSGEQKKAIVDLLFKTNRKVTVKQLKEDYFKKIECFDSVEISGVEDRFNASLGTYHDLLKIIKDKDFLDNEENEDILEDIVLTLTLFEDREMIEERLKTYAHLFDDKVMKQLKRRRYTGWGRLSRKLINGIRDKQSGKTILDFLKSDGFANRNFMQLIHDDSLTFKEDIQKAQVSGQGDSLHEHIANLAGSPAIKKGILQTVKVVDELVKVMGRHKPENIVIEMARENQTTQKGQKNSRERMKRIEEGIKELGSQILKEHPVENTQLQNEKLYLYYLQNGRDMYVDQELDINRLSDYDVDHIVPQSFLKDDSIDNKVLTRSDKARGKSDNVPSEEVVKKMKNYWRQLLNAKLITQRKFDNLTKAERGGLSELDKAGFIKRQLVETRQITKHVAQILDSRMNTKYDENDKLIREVKVITLKSKLVSDFRKDFQFYKVREINNYHHAHDAYLNAVVGTALIKKYPKLESEFVYGDYKVYDVRKMIAKSEQEIGKATAKYFFYSNIMNFFKTEITLANGEIRKRPLIETNGETGEIVWDKGRDFATVRKVLSMPQVNIVKKTEVQTGGFSKESILPKRNSDKLIARKKDWDPKKYGGFDSPTVAYSVLVVAKVEKGKSKKLKSVKELLGITIMERSSFEKNPIDFLEAKGYKEVKKDLIIKLPKYSLFELENGRKRMLASAGELQKGNELALPSKYVNFLYLASHYEKLKGSPEDNEQKQLFVEQHKHYLDEIIEQISEFSKRVILADANLDKVLSAYNKHRDKPIREQAENIIHLFTLTNLGAPAAFKYFDTTIDRKRYTSTKEVLDATLIHQSITGLYETRIDLSQLGGDGGGSSGGTLGIEDEYRLHETSTEPDVSLGSTWLSDFPQAWAETGGMGLAVRQAPLIIPLKATSTPVSIQQYPMSHEARLGIKPHIQRLLDQGILVPCQSPWNTPLLPVKKPGTNDYRPVQDLREVNKRVEDIHPTVPNPYNLLSGLPPSHQWYTVLDLKDAFFCLRLHPTSQPLFAFEWRDPGMGISGQLTWTRLPQGFKNSPTLFNEALHRDLADFRIQHPDLILLQYVDDILLAATSELDCQQGTRALLQTLGDLGYRASAKKAQICQKQVKYLGYLLREGQRWLTEARKETVMGQPVPKTPRQLREFLGTAGFCRLWIPGFAEMAAPLYPLTKPGTLFSWGPDQQKAYQEIKQALLTAPALGLPDLTKPFELFVDEKQGYAKGVLTQKLGPWRRPVAYLSKKLDPVAAGWPPCLRMVAAIAVLTKDAGKLTMGQPLVILAPHAVEALVKQPPDRWLSNARMTHYQAMLLDTDRVQFGPVVALNPATLLPLPEEGAPHDCLEILAETHGTRPDLTDQPIPDADHTWYTDGSSFLQEGQRKAGAAVTTETEVIWAGALPAGTSAQRAELIALTQALKMAEGKRLNVYTDSRYAFATAHIHGEIYRRRGWLTSEGREIKNKSEILALLKALFLPKRLSIIHCLGHQKGDSAEARGNRLADQAAREAAIKTPPDTSTLLAGKRTADGSEFEKRTADGSEFESPKKKAKVE

SEQ ID NO: 6293 - protein, 2080 aa, synthetic construct
MPAAKRVKLDGGDKKYSIGLDIGTNSVGWAVITDEYKVPSKKFKVLGNTDRHSIKKNLIGALLFDSGETAEATRLKRTARRRYTRRKNRICYLQEIFSNEMAKVDDSFFHRLEESFLVEEDKKHERHPIFGNIVDEVAYHEKYPTIYHLRKKLVDSTDKADLRLIYLALAHMIKFRGHFLIEGDLNPDNSDVDKLFIQLVQTYNQLFEENPINASGVDAKAILSARLSKSRRLENLIAQLPGEKKNGLFGNLIALSLGLTPNFKSNFDLAEDAKLQLSKDTYDDDLDNLLAQIGDQYADLFLAAKNLSDAILLSDILRVNTEITKAPLSASMIKRYDEHHQDLTLLKALVRQQLPEKYKEIFFDQSKNGYAGYIDGGASQEEFYKFIKPILEKMDGTEELLVKLNREDLLRKQRTFDNGSIPHQIHLGELHAILRRQEDFYPFLKDNREKIEKILTFRIPYYVGPLARGNSRFAWMTRKSEETITPWNFEEVVDKGASAQSFIERMTNFDKNLPNEKVLPKHSLLYEYFTVYNELTKVKYVTEGMRKPAFLSGEQKKAIVDLLFKTNRKVTVKQLKEDYFKKIECFDSVEISGVEDRFNASLGTYHDLLKIIKDKDFLDNEENEDILEDIVLTLTLFEDREMIEERLKTYAHLFDDKVMKQLKRRRYTGWGRLSRKLINGIRDKQSGKTILDFLKSDGFANRNFMQLIHDDSLTFKEDIQKAQVSGQGDSLHEHIANLAGSPAIKKGILQTVKVVDELVKVMGRHKPENIVIEMARENQTTQKGQKNSRERMKRIEEGIKELGSQILKEHPVENTQLQNEKLYLYYLQNGRDMYVDQELDINRLSDYDVDHIVPQSFLKDDSIDNKVLTRSDKARGKSDNVPSEEVVKKMKNYWRQLLNAKLITQRKFDNLTKAERGGLSELDKAGFIKRQLVETRQITKHVAQILDSRMNTKYDENDKLIREVKVITLKSKLVSDFRKDFQFYKVREINNYHHAHDAYLNAVVGTALIKKYPKLESEFVYGDYKVYDVRKMIAKSEQEIGKATAKYFFYSNIMNFFKTEITLANGEIRKRPLIETNGETGEIVWDKGRDFATVRKVLSMPQVNIVKKTEVQTGGFSKESILPKRNSDKLIARKKDWDPKKYGGFDSPTVAYSVLVVAKVEKGKSKKLKSVKELLGITIMERSSFEKNPIDFLEAKGYKEVKKDLIIKLPKYSLFELENGRKRMLASAGELQKGNELALPSKYVNFLYLASHYEKLKGSPEDNEQKQLFVEQHKHYLDEIIEQISEFSKRVILADANLDKVLSAYNKHRDKPIREQAENIIHLFTLTNLGAPAAFKYFDTTIDRKRYTSTKEVLDATLIHQSITGLYETRIDLSQLGGDGGGSSGGLDDEYRLYSPLVKPDQNIQFWLEQFPQAWAETAGMGLAKQVPPQVIQLKASATPVSVRQYPLSKEAQEGIRPHVQRLIQQGILVPVQSPWNTPLLPVRKPGTNDYRPVQDLREVNKRVQDIHPTVPNPYNLLCALPPQRSWYTVLDLKDAFFCLRLHPTSQPLFAFEWRDPGTGRTGQLTWTRLPQGFKNSPTIFNEALHRDLANFRIQHPQVTLLQYVDDLLLAGATKQDCLEGTKALLLELSDLGYRASAKKAQICRREVTYLGYSLRDGQRWLTEARKKTVVQIPAPTTAKQVREFLGKAGFCRLFIPGFATLAAPLYPLTKPKGEFSWAPEHQKAFDAIKKALLSAPALALPDVTKPFTLYVDERKGVARGVLTQTLGPWRRPVAYLSKKLDPVASGWPVCLKAIAAVAILVKDADKLTLGQNITVIAPHALENIVRQPPDRWMTNARMTHYQSLLLTERVTFAPPAALNPATLLPEETDEPVTHDCHQLLIEETGVRKDLTDIPLTGEVLTWFTDGSSYVVEGKRMAGAAVVDGTRTIWASSLPEGTSAQKAELMALTQALRLAEGKSINIYTDSRYAFATAHVHGAIYKQRGWLTSAGREIKNKEEILSLLEALHLPKRLAIIHCPGHQKAKDPISRGNQMADRVAKQAAQGVNLLPAGKRTADGSEFEKRTADGSEFESPKKKAKVE

SEQ ID NO: 6294 - protein, 2080 aa, synthetic construct; identical to SEQ ID NO: 6293

SEQ ID NO: 6295 - protein, 2168 aa, synthetic construct
MPAAKRVKLDGGDKKYSIGLDIGTNSVGWAVITDEYKVPSKKFKVLGNTDRHSIKKNLIGALLFDSGETAEATRLKRTARRRYTRRKNRICYLQEIFSNEMAKVDDSFFHRLEESFLVEEDKKHERHPIFGNIVDEVAYHEKYPTIYHLRKKLVDSTDKADLRLIYLALAHMIKFRGHFLIEGDLNPDNSDVDKLFIQLVQTYNQLFEENPINASGVDAKAILSARLSKSRRLENLIAQLPGEKKNGLFGNLIALSLGLTPNFKSNFDLAEDAKLQLSKDTYDDDLDNLLAQIGDQYADLFLAAKNLSDAILLSDILRVNTEITKAPLSASMIKRYDEHHQDLTLLKALVRQQLPEKYKEIFFDQSKNGYAGYIDGGASQEEFYKFIKPILEKMDGTEELLVKLNREDLLRKQRTFDNGSIPHQIHLGELHAILRRQEDFYPFLKDNREKIEKILTFRIPYYVGPLARGNSRFAWMTRKSEETITPWNFEEVVDKGASAQSFIERMTNFDKNLPNEKVLPKHSLLYEYFTVYNELTKVKYVTEGMRKPAFLSGEQKKAIVDLLFKTNRKVTVKQLKEDYFKKIECFDSVEISGVEDRFNASLGTYHDLLKIIKDKDFLDNEENEDILEDIVLTLTLFEDREMIEERLKTYAHLFDDKVMKQLKRRRYTGWGRLSRKLINGIRDKQSGKTILDFLKSDGFANRNFMQLIHDDSLTFKEDIQKAQVSGQGDSLHEHIANLAGSPAIKKGILQTVKVVDELVKVMGRHKPENIVIEMARENQTTQKGQKNSRERMKRIEEGIKELGSQILKEHPVENTQLQNEKLYLYYLQNGRDMYVDQELDINRLSDYDVDHIVPQSFLKDDSIDNKVLTRSDKARGKSDNVPSEEVVKKMKNYWRQLLNAKLITQRKFDNLTKAERGGLSELDKAGFIKRQLVETRQITKHVAQILDSRMNTKYDENDKLIREVKVITLKSKLVSDFRKDFQFYKVREINNYHHAHDAYLNAVVGTALIKKYPKLESEFVYGDYKVYDVRKMIAKSEQEIGKATAKYFFYSNIMNFFKTEITLANGEIRKRPLIETNGETGEIVWDKGRDFATVRKVLSMPQVNIVKKTEVQTGGFSKESILPKRNSDKLIARKKDWDPKKYGGFDSPTVAYSVLVVAKVEKGKSKKLKSVKELLGITIMERSSFEKNPIDFLEAKGYKEVKKDLIIKLPKYSLFELENGRKRMLASAGELQKGNELALPSKYVNFLYLASHYEKLKGSPEDNEQKQLFVEQHKHYLDEIIEQISEFSKRVILADANLDKVLSAYNKHRDKPIREQAENIIHLFTLTNLGAPAAFKYFDTTIDRKRYTSTKEVLDATLIHQSITGLYETRIDLSQLGGDGGGSSGGMDPLQLLQPLEAEIKGTKLKAHWNSGATITCVPQAFLEEEVPIKNIWIKTIHGEKEQPVYYLTFKIQGRKVEAEVISSPYDYILVSPSDIPWLMKKPLQLTTLVPLQEYEERLLKQTMLTGSYKEKLQSLFLKYDALWQHWENQVGHRRIKPHHIATGTVNPRPQKQYPINPKAKASIQTVINDLLKQGVLIQQNSIMNTPVYPVPKPDGKWRMVLDYREVNKTIPLIAAQNQHSAGILSSIFRGKYKTTLDLSNGFWAHSITPESYWLTAFTWLGQQYCWTRLPQGFLNSPALFNADVVDLLKEVPNVQVYVDDIYISHDDPREHLEQLEKVFSLLLNAGYVVSLKKSEIAQHEVEFLGFNITKEGRGLTETFKQKLLNITPPRDLKQLQSILGLLNFARNFIPNFSELVKPLYNIIATAPGKYITWTTDNSQQLQNIISMLNSAENLEERNPEVRLIMKVNTSPSAGYIRFYNEFAKRPIMYLNYVYTKAEVKFTNTEKLLTTIHKGLIKALDLGMGQEILVYSPIVSMTKIQKTPLPERKALPIRWITWMSYLEDPRIQFHYDKTLPELQQVPTVTDDIIAKIKHPSEFSMVFYTDGSAIKHPNVNKSHNAGMGIAQVQFKPEFTVINTWSIPLGDHTAQLAEVAAVEFACKKALKIDGPVLIVTDSFYVAESVNKELPYWQSNGFFNNKKKPLKHVSKWKSIADCIQLKPDIIIIHEKGHQPTASTFHTEGNNLADKLATQGSYVVNAGKRTADGSEFEKRTADGSEFESPKKKAKVE

SEQ ID NO: 6296 - protein, 2079 aa, synthetic construct
MPAAKRVKLDGGDKKYSIGLDIGTNSVGWAVITDEYKVPSKKFKVLGNTDRHSIKKNLIGALLFDSGETAEATRLKRTARRRYTRRKNRICYLQEIFSNEMAKVDDSFFHRLEESFLVEEDKKHERHPIFGNIVDEVAYHEKYPTIYHLRKKLVDSTDKADLRLIYLALAHMIKFRGHFLIEGDLNPDNSDVDKLFIQLVQTYNQLFEENPINASGVDAKAILSARLSKSRRLENLIAQLPGEKKNGLFGNLIALSLGLTPNFKSNFDLAEDAKLQLSKDTYDDDLDNLLAQIGDQYADLFLAAKNLSDAILLSDILRVNTEITKAPLSASMIKRYDEHHQDLTLLKALVRQQLPEKYKEIFFDQSKNGYAGYIDGGASQEEFYKFIKPILEKMDGTEELLVKLNREDLLRKQRTFDNGSIPHQIHLGELHAILRRQEDFYPFLKDNREKIEKILTFRIPYYVGPLARGNSRFAWMTRKSEETITPWNFEEVVDKGASAQSFIERMTNFDKNLPNEKVLPKHSLLYEYFTVYNELTKVKYVTEGMRKPAFLSGEQKKAIVDLLFKTNRKVTVKQLKEDYFKKIECFDSVEISGVEDRFNASLGTYHDLLKIIKDKDFLDNEENEDILEDIVLTLTLFEDREMIEERLKTYAHLFDDKVMKQLKRRRYTGWGRLSRKLINGIRDKQSGKTILDFLKSDGFANRNFMQLIHDDSLTFKEDIQKAQVSGQGDSLHEHIANLAGSPAIKKGILQTVKVVDELVKVMGRHKPENIVIEMARENQTTQKGQKNSRERMKRIEEGIKELGSQILKEHPVENTQLQNEKLYLYYLQNGRDMYVDQELDINRLSDYDVDHIVPQSFLKDDSIDNKVLTRSDKARGKSDNVPSEEVVKKMKNYWRQLLNAKLITQRKFDNLTKAERGGLSELDKAGFIKRQLVETRQITKHVAQILDSRMNTKYDENDKLIREVKVITLKSKLVSDFRKDFQFYKVREINNYHHAHDAYLNAVVGTALIKKYPKLESEFVYGDYKVYDVRKMIAKSEQEIGKATAKYFFYSNIMNFFKTEITLANGEIRKRPLIETNGETGEIVWDKGRDFATVRKVLSMPQVNIVKKTEVQTGGFSKESILPKRNSDKLIARKKDWDPKKYGGFDSPTVAYSVLVVAKVEKGKSKKLKSVKELLGITIMERSSFEKNPIDFLEAKGYKEVKKDLIIKLPKYSLFELENGRKRMLASAGELQKGNELALPSKYVNFLYLASHYEKLKGSPEDNEQKQLFVEQHKHYLDEIIEQISEFSKRVILADANLDKVLSAYNKHRDKPIREQAENIIHLFTLTNLGAPAAFKYFDTTIDRKRYTSTKEVLDATLIHQSITGLYETRIDLSQLGGDGGGSSGGVPWLTQQPLQLTILVPLQEYQDRILNKTALPEEQKQQLKALFTKYDNLWQHWENQVGHRKIRPHNIATGDYPPRPQKQYPINPKAKPSIQIVIDDLLKQGVLTPQNSTMNTPVYPVPKPDGRWRMVLDYREVNKTIPLTAAQNQHSAGILATIVRQKYKTTLDLANGFWAHPITPDSYWLTAFTWQGKQYCWTRLPQGFLNSPALFTADAVDLLKEVPNVQVYVDDIYLSHDNPHEHIQQLEKVFQILLQAGYVVSLKKSEIGQRTVEFLGFNITKEGRGLTDTFKTKLLNVTPPKDLKQLQSILGLLNFARNFIPNFAELVQTLYNLIASSKGKYIEWTEDNTKQLNKVIEALNTASNLEERLPDQRLVIKVNTSPSAGYVRYYNESGKKPIMYLNYVFSKAELKFSMLEKLLTTMHKALIKAMDLAMGQEILVYSPIVSMTKIQKTPLPERKALPIRWITWMTYLEDPRIQFHYDKTLPELKHIPDVYTSSIPPLKHPSQYEGVFCTDGSAIKSPDPTKSNNAGMGIVHAIYNPEYKILNQWSIPLGHHTAQMAEIAAVEFACKKALKVPGPVLVITDSFYVAESANKELPYWKSNGFVNNKKEPLKHISKWKSIAECLSIKPDITIQHEKGHQPINTSIHTEGNALADKLATQGSYVVNAGKRTADGSEFEKRTADGSEFESPKKKAKVE

SEQ ID NO: 6297 - protein, 2088 aa, synthetic construct
MPAAKRVKLDGGDKKYSIGLDIGTNSVGWAVITDEYKVPSKKFKVLGNTDRHSIKKNLIGALLFDSGETAEATRLKRTARRRYTRRKNRICYLQEIFSNEMAKVDDSFFHRLEESFLVEEDKKHERHPIFGNIVDEVAYHEKYPTIYHLRKKLVDSTDKADLRLIYLALAHMIKFRGHFLIEGDLNPDNSDVDKLFIQLVQTYNQLFEENPINASGVDAKAILSARLSKSRRLENLIAQLPGEKKNGLFGNLIALSLGLTPNFKSNFDLAEDAKLQLSKDTYDDDLDNLLAQIGDQYADLFLAAKNLSDAILLSDILRVNTEITKAPLSASMIKRYDEHHQDLTLLKALVRQQLPEKYKEIFFDQSKNGYAGYIDGGASQEEFYKFIKPILEKMDGTEELLVKLNREDLLRKQRTFDNGSIPHQIHLGELHAILRRQEDFYPFLKDNREKIEKILTFRIPYYVGPLARGNSRFAWMTRKSEETITPWNFEEVVDKGASAQSFIERMTNFDKNLPNEKVLPKHSLLYEYFTVYNELTKVKYVTEGMRKPAFLSGEQKKAIVDLLFKTNRKVTVKQLKEDYFKKIECFDSVEISGVEDRFNASLGTYHDLLKIIKDKDFLDNEENEDILEDIVLTLTLFEDREMIEERLKTYAHLFDDKVMKQLKRRRYTGWGRLSRKLINGIRDKQSGKTILDFLKSDGFANRNFMQLIHDDSLTFKEDIQKAQVSGQGDSLHEHIANLAGSPAIKKGILQTVKVVDELVKVMGRHKPENIVIEMARENQTTQKGQKNSRERMKRIEEGIKELGSQILKEHPVENTQLQNEKLYLYYLQNGRDMYVDQELDINRLSDYDVDHIVPQSFLKDDSIDNKVLTRSDKARGKSDNVPSEEVVKKMKNYWRQLLNAKLITQRKFDNLTKAERGGLSELDKAGFIKRQLVETRQITKHVAQILDSRMNTKYDENDKLIREVKVITLKSKLVSDFRKDFQFYKVREINNYHHAHDAYLNAVVGTALIKKYPKLESEFVYGDYKVYDVRKMIAKSEQEIGKATAKYFFYSNIMNFFKTEITLANGEIRKRPLIETNGETGEIVWDKGRDFATVRKVLSMPQVNIVKKTEVQTGGFSKESILPKRNSDKLIARKKDWDPKKYGGFDSPTVAYSVLVVAKVEKGKSKKLKSVKELLGITIMERSSFEKNPIDFLEAKGYKEVKKDLIIKLPKYSLFELENGRKRMLASAGELQKGNELALPSKYVNFLYLASHYEKLKGSPEDNEQKQLFVEQHKHYLDEIIEQISEFSKRVILADANLDKVLSAYNKHRDKPIREQAENIIHLFTLTNLGAPAAFKYFDTTIDRKRYTSTKEVLDATLIHQSITGLYETRIDLSQLGGDGGGSSGGTLNIEDEYRLHETSKEPDVPLGSTWLSDFPQAWAETGGMGLAVRQAPLIIPLKATSTPVSIKQYPMSQEARLGIKPHIQRLLDQGILVPCQSPWNTPLLPVKKPGTNDYRPVQDLREVNKRVEDIHPTVPNPYNLLSGLPPSHQWYTVLDLKDAFFCLRLHPTSQPLFAFEWRDPEMGISGQLTWTRLPQGFKNSPTLFNEALHRDLADFRIQHPDLILLQYVDDLLLAATSEQDCQRGTRALLQTLGNLGYRASAKKAQICQKQVKYLGYLLKEGQRWLTEARKETVMGQPTPKTPRQLREFLGTAGFCRLWIPGFAEMAAPLYPLTKPGTLFNWGPDQQKAYQEIKQALLTAPALGLPDLTKPFELFVDEKQGYAKGVLTQKLGPWRRPVAYLSKKLDPVAAGWPPCLRMVAAIAVLTKDAGKLTMGQPLVILAPHAVEALVKQPPDRWLSNARMTHYQAMLLDTDRVQFGPVVALNPATLLPLPEKEAPHDCLEILAETHGTRPDLTDQPIPDADYTWYTDGSSFLQEGQRRAGAAVTTETEVIWARALPAGTSAQRAELIALTQALKMAEGKKLNVYTDSRYAFATAHVHGEIYRRRGWLTSEGREIKNKNEILALLKALFLPKRLSIIHCPGHQKGNSAEARGNRMADQAAREAAMKAVLETSTLLAGKRTADGSEFEKRTADGSEFESPKKKAKVE

SEQ ID NO: 6298 - protein, 2089 aa, synthetic construct
MPAAKRVKLDGGDKKYSIGLDIGTNSVGWAVITDEYKVPSKKFKVLGNTDRHSIKKNLIGALLFDSGETAEATRLKRTARRRYTRRKNRICYLQEIFSNEMAKVDDSFFHRLEESFLVEEDKKHERHPIFGNIVDEVAYHEKYPTIYHLRKKLVDSTDKADLRLIYLALAHMIKFRGHFLIEGDLNPDNSDVDKLFIQLVQTYNQLFEENPINASGVDAKAILSARLSKSRRLENLIAQLPGEKKNGLFGNLIALSLGLTPNFKSNFDLAEDAKLQLSKDTYDDDLDNLLAQIGDQYADLFLAAKNLSDAILLSDILRVNTEITKAPLSASMIKRYDEHHQDLTLLKALVRQQLPEKYKEIFFDQSKNGYAGYIDGGASQEEFYKFIKPILEKMDGTEELLVKLNREDLLRKQRTFDNGSIPHQIHLGELHAILRRQEDFYPFLKDNREKIEKILTFRIPYYVGPLARGNSRFAWMTRKSEETITPWNFEEVVDKGASAQSFIERMTNFDKNLPNEKVLPKHSLLYEYFTVYNELTKVKYVTEGMRKPAFLSGEQKKAIVDLLFKTNRKVTVKQLKEDYFKKIECFDSVEISGVEDRFNASLGTYHDLLKIIKDKDFLDNEENEDILEDIVLTLTLFEDREMIEERLKTYAHLFDDKVMKQLKRRRYTGWGRLSRKLINGIRDKQSGKTILDFLKSDGFANRNFMQLIHDDSLTFKEDIQKAQVSGQGDSLHEHIANLAGSPAIKKGILQTVKVVDELVKVMGRHKPENIVIEMARENQTTQKGQKNSRERMKRIEEGIKELGSQILKEHPVENTQLQNEKLYLYYLQNGRDMYVDQELDINRLSDYDVDHIVPQSFLKDDSIDNKVLTRSDKARGKSDNVPSEEVVKKMKNYWRQLLNAKLITQRKFDNLTKAERGGLSELDKAGFIKRQLVETRQITKHVAQILDSRMNTKYDENDKLIREVKVITLKSKLVSDFRKDFQFYKVREINNYHHAHDAYLNAVVGTALIKKYPKLESEFVYGDYKVYDVRKMIAKSEQEIGKATAKYFFYSNIMNFFKTEITLANGEIRKRPLIETNGETGEIVWDKGRDFATVRKVLSMPQVNIVKKTEVQTGGFSKESILPKRNSDKLIARKKDWDPKKYGGFDSPTVAYSVLVVAKVEKGKSKKLKSVKELLGITIMERSSFEKNPIDFLEAKGYKEVKKDLIIKLPKYSLFELENGRKRMLASAGELQKGNELALPSKYVNFLYLASHYEKLKGSPEDNEQKQLFVEQHKHYLDEIIEQISEFSKRVILADANLDKVLSAYNKHRDKPIREQAENIIHLFTLTNLGAPAAFKYFDTTIDRKRYTSTKEVLDATLIHQSITGLYETRIDLSQLGGDGGGSSGSSGGVLNLEEEYRLHEKPVPSSIDPSWLQLFPTVWAERAGMGLANQVPPVVVELRSGASPVAVRQYPMSKEAREGIRPHIQKFLDLGVLVPCRSPWNTPLLPVKKPGTNDYRPVQDLREINKRVQDIHPTVPNPYNLLSSLPPSYTWYSVLDLKDAFFCLRLHPNSQPLFAFEWKDPEKGNTGQLTWTRLPQGFKNSPTLFDEALHRDLAPFRALNPQVVLLQYVDDLLVAAPTYEDCKKGTQKLLQELSKLGYRVSAKKAQLCQREVTYLGYLLKEGKRWLTPARKATVMKIPVPTTPRQVREFLGTAGFCRLWIPGFASLAAPLYPLTKESIPFIWTEEHQQAFDHIKKALLSAPALALPDLTKPFTLYIDERAGVARGVLTQTLGPWRRPVAYLSKKLDPVASGWPTCLKAVAAVALLLKDADKLTLGQNVTVIASHSLESIVRQPPDRWMTNARMTHYQSLLLNERVSFAPPAVLNPATLLPVESEATPVHRCSEILAEETGTRRDLEDQPLPGVPTWYTDGSSFITEGKRRAGAPIVDGKRTVWASSLPEGTSAQKAELVALTQALRLAEGKNINIYTDSRYAFATAHIHGAIYKQRGLLTSAGKDIKNKEEILALLEAIHLPRRVAIIHCPGHQRGSNPVATGNRRADEAAKQAALSTRVLAGTTKPAGKRTADGSEFEKRTADGSEFESPKKKAKVE

SEQ ID NO: 6299 - protein, 2213 aa, synthetic construct
MPAAKRVKLDGGDKKYSIGLDIGTNSVGWAVITDEYKVPSKKFKVLGNTDRHSIKKNLIGALLFDSGETAEATRLKRTARRRYTRRKNRICYLQEIFSNEMAKVDDSFFHRLEESFLVEEDKKHERHPIFGNIVDEVAYHEKYPTIYHLRKKLVDSTDKADLRLIYLALAHMIKFRGHFLIEGDLNPDNSDVDKLFIQLVQTYNQLFEENPINASGVDAKAILSARLSKSRRLENLIAQLPGEKKNGLFGNLIALSLGLTPNFKSNFDLAEDAKLQLSKDTYDDDLDNLLAQIGDQYADLFLAAKNLSDAILLSDILRVNTEITKAPLSASMIKRYDEHHQDLTLLKALVRQQLPEKYKEIFFDQSKNGYAGYIDGGASQEEFYKFIKPILEKMDGTEELLVKLNREDLLRKQRTFDNGSIPHQIHLGELHAILRRQEDFYPFLKDNREKIEKILTFRIPYYVGPLARGNSRFAWMTRKSEETITPWNFEEVVDKGASAQSFIERMTNFDKNLPNEKVLPKHSLLYEYFTVYNELTKVKYVTEGMRKPAFLSGEQKKAIVDLLFKTNRKVTVKQLKEDYFKKIECFDSVEISGVEDRFNASLGTYHDLLKIIKDKDFLDNEENEDILEDIVLTLTLFEDREMIEERLKTYAHLFDDKVMKQLKRRRYTGWGRLSRKLINGIRDKQSGKTILDFLKSDGFANRNFMQLIHDDSLTFKEDIQKAQVSGQGDSLHEHIANLAGSPAIKKGILQTVKVVDELVKVMGRHKPENIVIEMARENQTTQKGQKNSRERMKRIEEGIKELGSQILKEHPVENTQLQNEKLYLYYLQNGRDMYVDQELDINRLSDYDVDHIVPQSFLKDDSIDNKVLTRSDKARGKSDNVPSEEVVKKMKNYWRQLLNAKLITQRKFDNLTKAERGGLSELDKAGFIKRQLVETRQITKHVAQILDSRMNTKYDENDKLIREVKVITLKSKLVSDFRKDFQFYKVREINNYHHAHDAYLNAVVGTALIKKYPKLESEFVYGDYKVYDVRKMIAKSEQEIGKATAKYFFYSNIMNFFKTEITLANGEIRKRPLIETNGETGEIVWDKGRDFATVRKVLSMPQVNIVKKTEVQTGGFSKESILPKRNSDKLIARKKDWDPKKYGGFDSPTVAYSVLVVAKVEKGKSKKLKSVKELLGITIMERSSFEKNPIDFLEAKGYKEVKKDLIIKLPKYSLFELENGRKRMLASAGELQKGNELALPSKYVNFLYLASHYEKLKGSPEDNEQKQLFVEQHKHYLDEIIEQISEFSKRVILADANLDKVLSAYNKHRDKPIREQAENIIHLFTLTNLGAPAAFKYFDTTIDRKRYTSTKEVLDATLIHQSITGLYETRIDLSQLGGDGGGSSGSSGGTLGDQGSRGSDPLPEPRVTLTVEGIPTEFLVNTGAEHSVLTKPMGKMGSKRTVVAGATGSKVYPWTTKRLLKIGQKQVTHSFLVIPECPAPLLGRDLLTKLKAQIQFSTEGPQVTWEDRPAMCLVLNLEEEYRLHEKPVPPSIDPSWLQLFPMVWAEKAGMGLANQVPPVVVELKSDASPVAVRQYPMSKEAREGIRPHIQRFLDLGILVPCQSPWNTPLLPVKKPGTNDYRPVQDLREVNKRVQDIHPTVPNPYNLLSSLPPSHTWYSVLDLKDAFFCLKLHPNSQPLFAFEWRDPEKGNTGQLTWTRLPQGFKNSPTLFNEALHRDLASFRALNPQVVMLQYVDDLLVAAPTYRDCKEGTRRLLQELSKLGYRVSAKKAQLCREEVTYLGYLLKGGKRWLTPARKATVMKIPTPTTPRQVREFLGTAGFCRLWIPGFASLAAPLYPLTRPKVPFTWTEAHQEAFGRIKEALLSAPALALPDLTKPFALYVDEKEGVARGVLTQTLGPWRRPVAYLSKKLDPVASGWPTCLKAIAAVALLLKDADKLTLGQNVLVIAPHNLESIVRQPPDRWMTNARMTHYQSLLLNERVSFAPPAILNPATLLPVESDDTPIHICSEILAEETGTRPDLRDQPLPGVPAWYTDGSSFIMDGRRQAGAAIVDNKRTVWASNLPEGTSAQKAELIALTQALRLAEGKSINIYTDSRYAFATAHVHGAIYKQRGWLTSAGKDIKNKEEILALLEAIHLPKRVAIIHCPGHQRGTDPVATGNRKADEAAKQAAQSTRILTETTKNAGKRTADGSEFEKRTADGSEFESPKKKAKVE

SEQ ID NO: 6300 - protein, 2091 aa, synthetic construct
MPAAKRVKLDGGDKKYSIGLDIGTNSVGWAVITDEYKVPSKKFKVLGNTDRHSIKKNLIGALLFDSGETAEATRLKRTARRRYTRRKNRICYLQEIFSNEMAKVDDSFFHRLEESFLVEEDKKHERHPIFGNIVDEVAYHEKYPTIYHLRKKLVDSTDKADLRLIYLALAHMIKFRGHFLIEGDLNPDNSDVDKLFIQLVQTYNQLFEENPINASGVDAKAILSARLSKSRRLENLIAQLPGEKKNGLFGNLIALSLGLTPNFKSNFDLAEDAKLQLSKDTYDDDLDNLLAQIGDQYADLFLAAKNLSDAILLSDILRVNTEITKAPLSASMIKRYDEHHQDLTLLKALVRQQLPEKYKEIFFDQSKNGYAGYIDGGASQEEFYKFIKPILEKMDGTEELLVKLNREDLLRKQRTFDNGSIPHQIHLGELHAILRRQEDFYPFLKDNREKIEKILTFRIPYYVGPLARGNSRFAWMTRKSEETITPWNFEEVVDKGASAQSFIERMTNFDKNLPNEKVLPKHSLLYEYFTVYNELTKVKYVTEGMRKPAFLSGEQKKAIVDLLFKTNRKVTVKQLKEDYFKKIECFDSVEISGVEDRFNASLGTYHDLLKIIKDKDFLDNEENEDILEDIVLTLTLFEDREMIEERLKTYAHLFDDKVMKQLKRRRYTGWGRLSRKLINGIRDKQSGKTILDFLKSDGFANRNFMQLIHDDSLTFKEDIQKAQVSGQGDSLHEHIANLAGSPAIKKGILQTVKVVDELVKVMGRHKPENIVIEMARENQTTQKGQKNSRERMKRIEEGIKELGSQILKEHPVENTQLQNEKLYLYYLQNGRDMYVDQELDINRLSDYDVDHIVPQSFLKDDSIDNKVLTRSDKARGKSDNVPSEEVVKKMKNYWRQLLNAKLITQRKFDNLTKAERGGLSELDKAGFIKRQLVETRQITKHVAQILDSRMNTKYDENDKLIREVKVITLKSKLVSDFRKDFQFYKVREINNYHHAHDAYLNAVVGTALIKKYPKLESEFVYGDYKVYDVRKMIAKSEQEIGKATAKYFFYSNIMNFFKTEITLANGEIRKRPLIETNGETGEIVWDKGRDFATVRKVLSMPQVNIVKKTEVQTGGFSKESILPKRNSDKLIARKKDWDPKKYGGFDSPTVAYSVLVVAKVEKGKSKKLKSVKELLGITIMERSSFEKNPIDFLEAKGYKEVKKDLIIKLPKYSLFELENGRKRMLASAGELQKGNELALPSKYVNFLYLASHYEKLKGSPEDNEQKQLFVEQHKHYLDEIIEQISEFSKRVILADANLDKVLSAYNKHRDKPIREQAENIIHLFTLTNLGAPAAFKYFDTTIDRKRYTSTKEVLDATLIHQSITGLYETRIDLSQLGGDGGGSSGSSGGTLGIEDEYRLHETSTEPDVSLGSTWLSDFPQAWAETGGMGLAVRQAPLIIPLKATSTPVSIQQYPMSHEARLGIKPHIQRLLDQGILVPCQSPWNTPLLPVKKPGTNDYRPVQDLREVNKRVEDIHPTVPNPYNLLSGLPPSHQWYTVLDLKDAFFCLRLHPTSQPLFAFEWRDPGMGISGQLTWTRLPQGFKNSPTLFNEALHRDLADFRIQHPDLILLQYVDDILLAATSELDCQQGTRALLQTLGDLGYRASAKKAQICQKQVKYLGYLLREGQRWLTEARKETVMGQPVPKTPRQLREFLGTAGFCRLWIPGFAEMAAPLYPLTKPGTLFSWGPDQQKAYQEIKQALLTAPALGLPDLTKPFELFVDEKQGYAKGVLTQKLGPWRRPVAYLSKKLDPVAAGWPPCLRMVAAIAVLTKDAGKLTMGQPLVILAPHAVEALVKQPPDRWLSNARMTHYQAMLLDTDRVQFGPVVALNPATLLPLPEEGAPHDCLEILAETHGTRPDLTDQPIPDADHTWYTDGSSFLQEGQRKAGAAVTTETEVIWAGALPAGTSAQRAELIALTQALKMAEGKRLNVYTDSRYAFATAHIHGEIYRRRGWLTSEGREIKNKSEILALLKALFLPKRLSIIHCLGHQKGDSAEARGNRLADQAAREAAIKTPPDTSTLLAGKRTADGSEFEKRTADGSEFESPKKKAKVE

SEQ ID NO: 6301 - protein, 2091 aa, synthetic construct
MPAAKRVKLDGGDKKYSIGLDIGTNSVGWAVITDEYKVPSKKFKVLGNTDRHSIKKNLIGALLFDSGETAEATRLKRTARRRYTRRKNRICYLQEIFSNEMAKVDDSFFHRLEESFLVEEDKKHERHPIFGNIVDEVAYHEKYPTIYHLRKKLVDSTDKADLRLIYLALAHMIKFRGHFLIEGDLNPDNSDVDKLFIQLVQTYNQLFEENPINASGVDAKAILSARLSKSRRLENLIAQLPGEKKNGLFGNLIALSLGLTPNFKSNFDLAEDAKLQLSKDTYDDDLDNLLAQIGDQYADLFLAAKNLSDAILLSDILRVNTEITKAPLSASMIKRYDEHHQDLTLLKALVRQQLPEKYKEIFFDQSKNGYAGYIDGGASQEEFYKFIKPILEKMDGTEELLVKLNREDLLRKQRTFDNGSIPHQIHLGELHAILRRQEDFYPFLKDNREKIEKILTFRIPYYVGPLARGNSRFAWMTRKSEETITPWNFEEVVDKGASAQSFIERMTNFDKNLPNEKVLPKHSLLYEYFTVYNELTKVKYVTEGMRKPAFLSGEQKKAIVDLLFKTNRKVTVKQLKEDYFKKIECFDSVEISGVEDRFNASLGTYHDLLKIIKDKDFLDNEENEDILEDIVLTLTLFEDREMIEERLKTYAHLFDDKVMKQLKRRRYTGWGRLSRKLINGIRDKQSGKTILDFLKSDGFANRNFMQLIHDDSLTFKEDIQKAQVSGQGDSLHEHIANLAGSPAIKKGILQTVKVVDELVKVMGRHKPENIVIEMARENQTTQKGQKNSRERMKRIEEGIKELGSQILKEHPVENTQLQNEKLYLYYLQNGRDMYVDQELDINRLSDYDVDHIVPQSFLKDDSIDNKVLTRSDKARGKSDNVPSEEVVKKMKNYWRQLLNAKLITQRKFDNLTKAERGGLSELDKAGFIKRQLVETRQITKHVAQILDSRMNTKYDENDKLIREVKVITLKSKLVSDFRKDFQFYKVREINNYHHAHDAYLNAVVGTALIKKYPKLESEFVYGDYKVYDVRKMIAKSEQEIGKATAKYFFYSNIMNFFKTEITLANGEIRKRPLIETNGETGEIVWDKGRDFATVRKVLSMPQVNIVKKTEVQTGGFSKESILPKRNSDKLIARKKDWDPKKYGGFDSPTVAYSVLVVAKVEKGKSKKLKSVKELLGITIMERSSFEKNPIDFLEAKGYKEVKKDLIIKLPKYSLFELENGRKRMLASAGELQKGNELALPSKYVNFLYLASHYEKLKGSPEDNEQKQLFVEQHKHYLDEIIEQISEFSKRVILADANLDKVLSAYNKHRDKPIREQAENIIHLFTLTNLGAPAAFKYFDTTIDRKRYTSTKEVLDATLIHQSITGLYETRIDLSQLGGDGGGSSGSSGGTLNIEDEHRLHETSKEPDVSLGSTWLSDFPQAWAETGGMGLAVRQAPLIIPLKATSTPVSIKQYPMSQEARLGIKPHIQRLLDQGILVPCQSPWNTPLLPVKKPGTNDYRPVQDLREVNKRVEDIHPTVPNPYNLLSGLPPSHQWYTVLDLKDAFFCLRLHPTSQPLFAFEWRDPEMGISGQLTWTRLPQGFKNSPTLFDEALHRDLADFRIQHPDLILLQYVDDLLLAATSELDCQQGTRALLQTLGNLGYRASAKKAQICQKQVKYLGYLLKEGQRWLTEARKETVMGQPTPKTPRQLREFLGTAGFCRLWIPGFAEMAAPLYPLTKTGTLFNWGPDQQKAYQEIKQALLTAPALGLPDLTKPFELFVDEKQGYAKGVLTQKLGPWRRPVAYLSKKLDPVAAGWPPCLRMVAAIAVLTKDAGKLTMGQPLVILAPHAVEALVKQPPDRWLSNARMTHYQALLLDTDRVQFGPVVALNPATLLPLPEEGLQHNCLDILAEAHGTRPDLTDQPLPDADHTWYTDGSSLLQEGQRKAGAAVTTETEVIWAKALPAGTSAQRAELIALTQALKMAEGKKLNVYTDSRYAFATAHIHGEIYRRRGLLTSEGKEIKNKDEILALLKALFLPKRLSIIHCPGHQKGHSAEARGNRMADQAARKAAITETPDTSTLLAGKRTADGSEFEKRTADGSEFESPKKKAKVE

SEQ ID NO: 6302 - protein, 2089 aa, synthetic construct
MPAAKRVKLDGGDKKYSIGLDIGTNSVGWAVITDEYKVPSKKFKVLGNTDRHSIKKNLIGALLFDSGETAEATRLKRTARRRYTRRKNRICYLQEIFSNEMAKVDDSFFHRLEESFLVEEDKKHERHPIFGNIVDEVAYHEKYPTIYHLRKKLVDSTDKADLRLIYLALAHMIKFRGHFLIEGDLNPDNSDVDKLFIQLVQTYNQLFEENPINASGVDAKAILSARLSKSRRLENLIAQLPGEKKNGLFGNLIALSLGLTPNFKSNFDLAEDAKLQLSKDTYDDDLDNLLAQIGDQYADLFLAAKNLSDAILLSDILRVNTEITKAPLSASMIKRYDEHHQDLTLLKALVRQQLPEKYKEIFFDQSKNGYAGYIDGGASQEEFYKFIKPILEKMDGTEELLVKLNREDLLRKQRTFDNGSIPHQIHLGELHAILRRQEDFYPFLKDNREKIEKILTFRIPYYVGPLARGNSRFAWMTRKSEETITPWNFEEVVDKGASAQSFIERMTNFDKNLPNEKVLPKHSLLYEYFTVYNELTKVKYVTEGMRKPAFLSGEQKKAIVDLLFKTNRKVTVKQLKEDYFKKIECFDSVEISGVEDRFNASLGTYHDLLKIIKDKDFLDNEENEDILEDIVLTLTLFEDREMIEERLKTYAHLFDDKVMKQLKRRRYTGWGRLSRKLINGIRDKQSGKTILDFLKSDGFANRNFMQLIHDDSLTFKEDIQKAQVSGQGDSLHEHIANLAGSPAIKKGILQTVKVVDELVKVMGRHKPENIVIEMARENQTTQKGQKNSRERMKRIEEGIKELGSQILKEHPVENTQLQNEKLYLYYLQNGRDMYVDQELDINRLSDYDVDHIVPQSFLKDDSIDNKVLTRSDKARGKSDNVPSEEVVKKMKNYWRQLLNAKLITQRKFDNLTKAERGGLSELDKAGFIKRQLVETRQITKHVAQILDSRMNTKYDENDKLIREVKVITLKSKLVSDFRKDFQFYKVREINNYHHAHDAYLNAVVGTALIKKYPKLESEFVYGDYKVYDVRKMIAKSEQEIGKATAKYFFYSNIMNFFKTEITLANGEIRKRPLIETNGETGEIVWDKGRDFATVRKVLSMPQVNIVKKTEVQTGGFSKESILPKRNSDKLIARKKDWDPKKYGGFDSPTVAYSVLVVAKVEKGKSKKLKSVKELLGITIMERSSFEKNPIDFLEAKGYKEVKKDLIIKLPKYSLFELENGRKRMLASAGELQKGNELALPSKYVNFLYLASHYEKLKGSPEDNEQKQLFVEQHKHYLDEIIEQISEFSKRVILADANLDKVLSAYNKHRDKPIREQAENIIHLFTLTNLGAPAAFKYFDTTIDRKRYTSTKEVLDATLIHQSITGLYETRIDLSQLGGDGGGSSGSSGGVLNLEEEYRLHEKPVPSSIDPSWLQLFPTVWAERAGMGLANQVPPVVVELRSGASPVAVRQYPMSKEAREGIRPHIQRFLDLGVLVPCQSPWNTPLLPVKKPGTNDYRPVQDLREINKRVQDIHPTVPNPYNLLSSLPPSHTWYSVLDLKDAFFCLKLHPNSQPLFAFEWRDPEKGNTGQLTWTRLPQGFKNSPTLFNEALHRDLAPFRALNPQVVLLQYVDDLLVAAPTYRDCKEGTQKLLQELSKLGYRVSAKKAQLCQKEVTYLGYLLKEGKRWLTPARKATVMKIPPPTTPRQVREFLGTAGFCRLWIPGFASLAAPLYPLTKPSIPFIWTEEHQKAFDRIKEALLSAPALALPDLTKPFTLYVDERAGVARGVLTQTLGPWRRPVAYLSKKLDPVASGWPTCLKAVAAVALLLKDADKLTLGQNVTVIASHSLESIVRQPPDRWMTNARMTHYQSLLLNERVSFAPPAVLNPATLLPVESEATPVHRCSEILAEETGTRRDLKDQPLPGVPAWYTDGSSFIAEGKRRAGAAIVDGKRTVWASSLPEGTSAQKAELVALTQALRLAEGKDINIYTDSRYAFATAHIHGAIYKQRGWLTSAGKDIKNKEEILALLEAIHLPKRVAIIHCPGHQKGNDPVATGNRRADEAAKQAALSTRVLAETTKPAGKRTADGSEFEKRTADGSEFESPKKKAKVE

SEQ ID NO: 6303 - protein, 2091 aa, synthetic construct
MPAAKRVKLDGGDKKYSIGLDIGTNSVGWAVITDEYKVPSKKFKVLGNTDRHSIKKNLIGALLFDSGETAEATRLKRTARRRYTRRKNRICYLQEIFSNEMAKVDDSFFHRLEESFLVEEDKKHERHPIFGNIVDEVAYHEKYPTIYHLRKKLVDSTDKADLRLIYLALAHMIKFRGHFLIEGDLNPDNSDVDKLFIQLVQTYNQLFEENPINASGVDAKAILSARLSKSRRLENLIAQLPGEKKNGLFGNLIALSLGLTPNFKSNFDLAEDAKLQLSKDTYDDDLDNLLAQIGDQYADLFLAAKNLSDAILLSDILRVNTEITKAPLSASMIKRYDEHHQDLTLLKALVRQQLPEKYKEIFFDQSKNGYAGYIDGGASQEEFYKFIKPILEKMDGTEELLVKLNREDLLRKQRTFDNGSIPHQIHLGELHAILRRQEDFYPFLKDNREKIEKILTFRIPYYVGPLARGNSRFAWMTRKSEETITPWNFEEVVDKGASAQSFIERMTNFDKNLPNEKVLPKHSLLYEYFTVYNELTKVKYVTEGMRKPAFLSGEQKKAIVDLLFKTNRKVTVKQLKEDYFKKIECFDSVEISGVEDRFNASLGTYHDLLKIIKDKDFLDNEENEDILEDIVLTLTLFEDREMIEERLKTYAHLFDDKVMKQLKRRRYTGWGRLSRKLINGIRDKQSGKTILDFLKSDGFANRNFMQLIHDDSLTFKEDIQKAQVSGQGDSLHEHIANLAGSPAIKKGILQTVKVVDELVKVMGRHKPENIVIEMARENQTTQKGQKNSRERMKRIEEGIKELGSQILKEHPVENTQLQNEKLYLYYLQNGRDMYVDQELDINRLSDYDVDHIVPQSFLKDDSIDNKVLTRSDKARGKSDNVPSEEVVKKMKNYWRQLLNAKLITQRKFDNLTKAERGGLSELDKAGFIKRQLVETRQITKHVAQILDSRMNTKYDENDKLIREVKVITLKSKLVSDFRKDFQFYKVREINNYHHAHDAYLNAVVGTALIKKYPKLESEFVYGDYKVYDVRKMIAKSEQEIGKATAKYFFYSNIMNFFKTEITLANGEIRKRPLIETNGETGEIVWDKGRDFATVRKVLSMPQVNIVKKTEVQTGGFSKESILPKRNSDKLIARKKDWDPKKYGGFDSPTVAYSVLVVAKVEKGKSKKLKSVKELLGITIMERSSFEKNPIDFLEAKGYKEVKKDLIIKLPKYSLFELENGRKRMLASAGELQKGNELALPSKYVNFLYLASHYEKLKGSPEDNEQKQLFVEQHKHYLDEIIEQISEFSKRVILADANLDKVLSAYNKHRDKPIREQAENIIHLFTLTNLGAPAAFKYFDTTIDRKRYTSTKEVLDATLIHQSITGLYETRIDLSQLGGDGGGSSGSSGGTLNIEDEYRLHETSKEPDVPLGSTWLSDFPQAWAETGGMGLAVRQAPLIIPLKATSTPVSIKQYPMSQEARLGIKPHIQRLLDQGILVPCQSPWNTPLLPVKKPGTNDYRPVQDLREVNKRVEDIHPTVPNPYNLLSGLPPSHQWYTVLDLKDAFFCLRLHPTSQPLFAFEWRDPEMGISGQLTWTRLPQGFKNSPTLFNEALHRDLADFRIQHPDLILLQYVDDLLLAATSEQDCQRGTRALLQTLGNLGYRASAKKAQICQKQVKYLGYLLKEGQRWLTEARKETVMGQPTPKTPRQLREFLGTAGFCRLWIPGFAEMAAPLYPLTKPGTLFNWGPDQQKAYQEIKQALLTAPALGLPDLTKPFELFVDEKQGYAKGVLTQKLGPWRRPVAYLSKKLDPVAAGWPPCLRMVAAIAVLTKDAGKLTMGQPLVILAPHAVEALVKQPPDRWLSNARMTHYQAMLLDTDRVQFGPVVALNPATLLPLPEKEAPHDCLEILAETHGTRPDLTDQPIPDADYTWYTDGSSFLQEGQRRAGAAVTTETEVIWARALPAGTSAQRAELIALTQALKMAEGKKLNVYTDSRYAFATAHVHGEIYRRRGWLTSEGREIKNKNEILALLKALFLPKRLSIIHCPGHQKGNSAEARGNRMADQAAREAAMKAVLETSTLLAGKRTADGSEFEKRTADGSEFESPKKKAKVE

SEQ ID NO: 6304 - protein, 2096 aa, synthetic construct
MPAAKRVKLDGGDKKYSIGLDIGTNSVGWAVITDEYKVPSKKFKVLGNTDRHSIKKNLIGALLFDSGETAEATRLKRTARRRYTRRKNRICYLQEIFSNEMAKVDDSFFHRLEESFLVEEDKKHERHPIFGNIVDEVAYHEKYPTIYHLRKKLVDSTDKADLRLIYLALAHMIKFRGHFLIEGDLNPDNSDVDKLFIQLVQTYNQLFEENPINASGVDAKAILSARLSKSRRLENLIAQLPGEKKNGLFGNLIALSLGLTPNFKSNFDLAEDAKLQLSKDTYDDDLDNLLAQIGDQYADLFLAAKNLSDAILLSDILRVNTEITKAPLSASMIKRYDEHHQDLTLLKALVRQQLPEKYKEIFFDQSKNGYAGYIDGGASQEEFYKFIKPILEKMDGTEELLVKLNREDLLRKQRTFDNGSIPHQIHLGELHAILRRQEDFYPFLKDNREKIEKILTFRIPYYVGPLARGNSRFAWMTRKSEETITPWNFEEVVDKGASAQSFIERMTNFDKNLPNEKVLPKHSLLYEYFTVYNELTKVKYVTEGMRKPAFLSGEQKKAIVDLLFKTNRKVTVKQLKEDYFKKIECFDSVEISGVEDRFNASLGTYHDLLKIIKDKDFLDNEENEDILEDIVLTLTLFEDREMIEERLKTYAHLFDDKVMKQLKRRRYTGWGRLSRKLINGIRDKQSGKTILDFLKSDGFANRNFMQLIHDDSLTFKEDIQKAQVSGQGDSLHEHIANLAGSPAIKKGILQTVKVVDELVKVMGRHKPENIVIEMARENQTTQKGQKNSRERMKRIEEGIKELGSQILKEHPVENTQLQNEKLYLYYLQNGRDMYVDQELDINRLSDYDVDHIVPQSFLKDDSIDNKVLTRSDKARGKSDNVPSEEVVKKMKNYWRQLLNAKLITQRKFDNLTKAERGGLSELDKAGFIKRQLVETRQITKHVAQILDSRMNTKYDENDKLIREVKVITLKSKLVSDFRKDFQFYKVREINNYHHAHDAYLNAVVGTALIKKYPKLESEFVYGDYKVYDVRKMIAKSEQEIGKATAKYFFYSNIMNFFKTEITLANGEIRKRPLIETNGETGEIVWDKGRDFATVRKVLSMPQVNIVKKTEVQTGGFSKESILPKRNSDKLIARKKDWDPKKYGGFDSPTVAYSVLVVAKVEKGKSKKLKSVKELLGITIMERSSFEKNPIDFLEAKGYKEVKKDLIIKLPKYSLFELENGRKRMLASAGELQKGNELALPSKYVNFLYLASHYEKLKGSPEDNEQKQLFVEQHKHYLDEIIEQISEFSKRVILADANLDKVLSAYNKHRDKPIREQAENIIHLFTLTNLGAPAAFKYFDTTIDRKRYTSTKEVLDATLIHQSITGLYETRIDLSQLGGDGGGSSGSSGSSGGTAPLEEEYRLFLEAPIQNVTLLEQWKREIPKVWAEINPPGLASTQAPIHVQLLSTALPVRVRQYPITLEAKRSLRETIRKFRAAGILRPVHSPWNTPLLPVRKSGTSEYRMVQDLREVNKRVETIHPTVPNPYTLLSLLPPDRIWYSVLDLKDAFFCIPLAPESQLIFAFEWADAEEGESGQLTWTRLPQGFKNSPTLFNEALNRDLQGFRLDHPSVSLLQYVDDLLIAADTQAACLSATRDLLMTLAELGYRVSGKKAQLCQEEVTYLGFKIHKGSRSLSNSRTQAILQIPVPKTKRQVREFLGTIGYCRLWIPGFAELAQPLYAATRPGNDPLVWGEKEEEAFQSLKLALTQPPALALPSLDKPFQLFVEETSGAAKGVLTQALGPWKRPVAYLSKRLDPVAAGWPRCLRAIAAAALLTREASKLTFGQDIEITSSHNLESLLRSPPDKWLTNARITQYQVLLLDPPRVRFKQTAALNPATLLPETDDTLPIHHCLDTLDSLTSTRPDLTDQPLAQAEATLFTDGSSYIRDGKRYAGAAVVTLDSVIWAEPLPIGTSAQKAELIALTKALEWSKDKSVNIYTDSRYAFATLHVHGMIYRERGWLTAGGKAIKNAPEILALLTAVWLPKRVAVMHCKGHQKDDAPTSTGNRRADEVAREVAIRPLSTQATISAGKRTADGSEFEKRTADGSEFESPKKKAKVE

SEQ ID NO: 6305 - protein, 2096 aa, synthetic construct
MPAAKRVKLDGGDKKYSIGLDIGTNSVGWAVITDEYKVPSKKFKVLGNTDRHSIKKNLIGALLFDSGETAEATRLKRTARRRYTRRKNRICYLQEIFSNEMAKVDDSFFHRLEESFLVEEDKKHERHPIFGNIVDEVAYHEKYPTIYHLRKKLVDSTDKADLRLIYLALAHMIKFRGHFLIEGDLNPDNSDVDKLFIQLVQTYNQLFEENPINASGVDAKAILSARLSKSRRLENLIAQLPGEKKNGLFGNLIALSLGLTPNFKSNFDLAEDAKLQLSKDTYDDDLDNLLAQIGDQYADLFLAAKNLSDAILLSDILRVNTEITKAPLSASMIKRYDEHHQDLTLLKALVRQQLPEKYKEIFFDQSKNGYAGYIDGGASQEEFYKFIKPILEKMDGTEELLVKLNREDLLRKQRTFDNGSIPHQIHLGELHAILRRQEDFYPFLKDNREKIEKILTFRIPYYVGPLARGNSRFAWMTRKSEETITPWNFEEVVDKGASAQSFIERMTNFDKNLPNEKVLPKHSLLYEYFTVYNELTKVKYVTEGMRKPAFLSGEQKKAIVDLLFKTNRKVTVKQLKEDYFKKIECFDSVEISGVEDRFNASLGTYHDLLKIIKDKDFLDNEENEDILEDIVLTLTLFEDREMIEERLKTYAHLFDDKVMKQLKRRRYTGWGRLSRKLINGIRDKQSGKTILDFLKSDGFANRNFMQLIHDDSLTFKEDIQKAQVSGQGDSLHEHIANLAGSPAIKKGILQTVKVVDELVKVMGRHKPENIVIEMARENQTTQKGQKNSRERMKRIEEGIKELGSQILKEHPVENTQLQNEKLYLYYLQNGRDMYVDQELDINRLSDYDVDHIVPQSFLKDDSIDNKVLTRSDKARGKSDNVPSEEVVKKMKNYWRQLLNAKLITQRKFDNLTKAERGGLSELDKAGFIKRQLVETRQITKHVAQILDSRMNTKYDENDKLIREVKVITLKSKLVSDFRKDFQFYKVREINNYHHAHDAYLNAVVGTALIKKYPKLESEFVYGDYKVYDVRKMIAKSEQEIGKATAKYFFYSNIMNFFKTEITLANGEIRKRPLIETNGETGEIVWDKGRDFATVRKVLSMPQVNIVKKTEVQTGGFSKESILPKRNSDKLIARKKDWDPKKYGGFDSPTVAYSVLVVAKVEKGKSKKLKSVKELLGITIMERSSFEKNPIDFLEAKGYKEVKKDLIIKLPKYSLFELENGRKRMLASAGELQKGNELALPSKYVNFLYLASHYEKLKGSPEDNEQKQLFVEQHKHYLDEIIEQISEFSKRVILADANLDKVLSAYNKHRDKPIREQAENIIHLFTLTNLGAPAAFKYFDTTIDRKRYTSTKEVLDATLIHQSITGLYETRIDLSQLGGDGGGSSGSSGSSGGTAPLEEEYRLFLEAPIQNVTLLEQWKREIPKVWAEINPPGLASTQAPIHVQLLSTALPVRVRQYPITLEAKRSLRETIRKFRAAGILRPVHSPWNTPLLPVRKSGTSEYRMVQDLREVNKRVETIHPTVPNPYTLLSLLPPDRIWYSVLDLKDAFFCIPLAPESQLIFAFEWADAEEGESGQLTWTRLPQGFKNSPTLFNEALNRDLQGFRLDHPSVSLLQYVDDLLIAADTQAACLSATRDLLMTLAELGYRVSGKKAQLCQEEVTYLGFKIHKGSRSLSNSRTQAILQIPVPKTKRQVREFLGKIGYCRLFIPGFAELAQPLYAATRPGNDPLVWGEKEEEAFQSLKLALTQPPALALPSLDKPFQLFVEETSGAAKGVLTQALGPWKRPVAYLSKRLDPVAAGWPRCLRAIAAAALLTREASKLTFGQDIEITSSHNLESLLRSPPDKWLTNARITQYQVLLLDPPRVRFKQTAALNPATLLPETDDTLPIHHCLDTLDSLTSTRPDLTDQPLAQAEATLFTDGSSYIRDGKRYAGAAVVTLDSVIWAEPLPIGTSAQKAELIALTKALEWSKDKSVNIYTDSRYAFATLHVHGMIYRERGWLTAGGKAIKNAPEILALLTAVWLPKRVAVMHCKGHQKDDAPTSTGNRRADEVAREVAIRPLSTQATISAGKRTADGSEFEKRTADGSEFESPKKKAKVE

SEQ ID NO: 6306 - protein, 2085 aa, synthetic construct
MPAAKRVKLDGGDKKYSIGLDIGTNSVGWAVITDEYKVPSKKFKVLGNTDRHSIKKNLIGALLFDSGETAEATRLKRTARRRYTRRKNRICYLQEIFSNEMAKVDDSFFHRLEESFLVEEDKKHERHPIFGNIVDEVAYHEKYPTIYHLRKKLVDSTDKADLRLIYLALAHMIKFRGHFLIEGDLNPDNSDVDKLFIQLVQTYNQLFEENPINASGVDAKAILSARLSKSRRLENLIAQLPGEKKNGLFGNLIALSLGLTPNFKSNFDLAEDAKLQLSKDTYDDDLDNLLAQIGDQYADLFLAAKNLSDAILLSDILRVNTEITKAPLSASMIKRYDEHHQDLTLLKALVRQQLPEKYKEIFFDQSKNGYAGYIDGGASQEEFYKFIKPILEKMDGTEELLVKLNREDLLRKQRTFDNGSIPHQIHLGELHAILRRQEDFYPFLKDNREKIEKILTFRIPYYVGPLARGNSRFAWMTRKSEETITPWNFEEVVDKGASAQSFIERMTNFDKNLPNEKVLPKHSLLYEYFTVYNELTKVKYVTEGMRKPAFLSGEQKKAIVDLLFKTNRKVTVKQLKEDYFKKIECFDSVEISGVEDRFNASLGTYHDLLKIIKDKDFLDNEENEDILEDIVLTLTLFEDREMIEERLKTYAHLFDDKVMKQLKRRRYTGWGRLSRKLINGIRDKQSGKTILDFLKSDGFANRNFMQLIHDDSLTFKEDIQKAQVSGQGDSLHEHIANLAGSPAIKKGILQTVKVVDELVKVMGRHKPENIVIEMARENQTTQKGQKNSRERMKRIEEGIKELGSQILKEHPVENTQLQNEKLYLYYLQNGRDMYVDQELDINRLSDYDVDHIVPQSFLKDDSIDNKVLTRSDKARGKSDNVPSEEVVKKMKNYWRQLLNAKLITQRKFDNLTKAERGGLSELDKAGFIKRQLVETRQITKHVAQILDSRMNTKYDENDKLIREVKVITLKSKLVSDFRKDFQFYKVREINNYHHAHDAYLNAVVGTALIKKYPKLESEFVYGDYKVYDVRKMIAKSEQEIGKATAKYFFYSNIMNFFKTEITLANGEIRKRPLIETNGETGEIVWDKGRDFATVRKVLSMPQVNIVKKTEVQTGGFSKESILPKRNSDKLIARKKDWDPKKYGGFDSPTVAYSVLVVAKVEKGKSKKLKSVKELLGITIMERSSFEKNPIDFLEAKGYKEVKKDLIIKLPKYSLFELENGRKRMLASAGELQKGNELALPSKYVNFLYLASHYEKLKGSPEDNEQKQLFVEQHKHYLDEIIEQISEFSKRVILADANLDKVLSAYNKHRDKPIREQAENIIHLFTLTNLGAPAAFKYFDTTIDRKRYTSTKEVLDATLIHQSITGLYETRIDLSQLGGDGGGSSGSSGSSGGVPWILKKPLELTIKLDLEEQQGTLLNNSILSKKGKEELKQLFEKYSALWQSWENQVGHRRIRPHKIATGTVKPTPQKQYHINPKAKPDIQIVINDLLKQGVLIQKESTMNTPVYPVPKPNGRWRMVLDYRAVNKVTPLIAVQNQHSYGILGSLFKGRYKTTIDLSNGFWAHPIVPEDYWITAFTWQGKQYCWTVLPQGFLNSPGLFTGDVVDLLQGIPNVEVYVDDVYISHDSEKEHLEYLDILFNRLKEAGYIISLKKSNIANSIVDFLGFQITNEGRGLTDTFKEKLENITAPTTLKQLQSILGLLNFARNFIPDFTELIAPLYALIPKSTKNYVPWQIEHSTTLETLITKLNGAEYLQGRKGDKTLIMKVNASYTTGYIRYYNEGEKKPISYVSIVFSKTELKFTELEKLLTTVHKGLLKALDLSMGQNIHVYSPIVSMQNIQKTPQTAKKALASRWLSWLSYLEDPRIRFFYDPQMPALKDLPAVDTGKDNKKHPSNFQHIFYTDGSAITSPTKEGHLNAGMGIVYFINKDGNLQKQQEWSISLGNHTAQFAEIAAFEFALKKCLPLGGNILVVTDSNYVAKAYNEELDVWASNGFVNNRKKPLKHISKWKSVADLKRLRPDVVVTHEPGHQKLDSSPHAYGNNLADQLATQASFKVHAGKRTADGSEFEKRTADGSEFESPKKKAKVE

SEQ ID NO: 6307 - protein, 2125 aa, synthetic construct
MPAAKRVKLDGGDKKYSIGLDIGTNSVGWAVITDEYKVPSKKFKVLGNTDRHSIKKNLIGALLFDSGETAEATRLKRTARRRYTRRKNRICYLQEIFSNEMAKVDDSFFHRLEESFLVEEDKKHERHPIFGNIVDEVAYHEKYPTIYHLRKKLVDSTDKADLRLIYLALAHMIKFRGHFLIEGDLNPDNSDVDKLFIQLVQTYNQLFEENPINASGVDAKAILSARLSKSRRLENLIAQLPGEKKNGLFGNLIALSLGLTPNFKSNFDLAEDAKLQLSKDTYDDDLDNLLAQIGDQYADLFLAAKNLSDAILLSDILRVNTEITKAPLSASMIKRYDEHHQDLTLLKALVRQQLPEKYKEIFFDQSKNGYAGYIDGGASQEEFYKFIKPILEKMDGTEELLVKLNREDLLRKQRTFDNGSIPHQIHLGELHAILRRQEDFYPFLKDNREKIEKILTFRIPYYVGPLARGNSRFAWMTRKSEETITPWNFEEVVDKGASAQSFIERMTNFDKNLPNEKVLPKHSLLYEYFTVYNELTKVKYVTEGMRKPAFLSGEQKKAIVDLLFKTNRKVTVKQLKEDYFKKIECFDSVEISGVEDRFNASLGTYHDLLKIIKDKDFLDNEENEDILEDIVLTLTLFEDREMIEERLKTYAHLFDDKVMKQLKRRRYTGWGRLSRKLINGIRDKQSGKTILDFLKSDGFANRNFMQLIHDDSLTFKEDIQKAQVSGQGDSLHEHIANLAGSPAIKKGILQTVKVVDELVKVMGRHKPENIVIEMARENQTTQKGQKNSRERMKRIEEGIKELGSQILKEHPVENTQLQNEKLYLYYLQNGRDMYVDQELDINRLSDYDVDHIVPQSFLKDDSIDNKVLTRSDKARGKSDNVPSEEVVKKMKNYWRQLLNAKLITQRKFDNLTKAERGGLSELDKAGFIKRQLVETRQITKHVAQILDSRMNTKYDENDKLIREVKVITLKSKLVSDFRKDFQFYKVREINNYHHAHDAYLNAVVGTALIKKYPKLESEFVYGDYKVYDVRKMIAKSEQEIGKATAKYFFYSNIMNFFKTEITLANGEIRKRPLIETNGETGEIVWDKGRDFATVRKVLSMPQVNIVKKTEVQTGGFSKESILPKRNSDKLIARKKDWDPKKYGGFDSPTVAYSVLVVAKVEKGKSKKLKSVKELLGITIMERSSFEKNPIDFLEAKGYKEVKKDLIIKLPKYSLFELENGRKRMLASAGELQKGNELALPSKYVNFLYLASHYEKLKGSPEDNEQKQLFVEQHKHYLDEIIEQISEFSKRVILADANLDKVLSAYNKHRDKPIREQAENIIHLFTLTNLGAPAAFKYFDTTIDRKRYTSTKEVLDATLIHQSITGLYETRIDLSQLGGDGGGSSGSSGSSGGLLGRDLLTKLKAQIQFSTEGPQVTWEDRPAMCLVLNLEEEYRLHEKPVPPSIDPSWLQLFPMVWAEKAGMGLANQVPPVVVELKSDASPVAVRQYPMSKEAREGIRPHIQRFLDLGILVPCQSPWNTPLLPVKKPGTNDYRPVQDLREVNKRVQDIHPTVPNPYNLLSSLPPSHTWYSVLDLKDAFFCLKLHPNSQPLFAFEWRDPEKGNTGQLTWTRLPQGFKNSPTLFNEALHRDLASFRALNPQVVMLQYVDDLLVAAPTYRDCKEGTRRLLQELSKLGYRVSAKKAQLCREEVTYLGYLLKGGKRWLTPARKATVMKIPTPTTPRQVREFLGTAGFCRLWIPGFASLAAPLYPLTRPKVPFTWTEAHQEAFGRIKEALLSAPALALPDLTKPFALYVDEKEGVARGVLTQTLGPWRRPVAYLSKKLDPVASGWPTCLKAIAAVALLLKDADKLTLGQNVLVIAPHNLESIVRQPPDRWMTNARMTHYQSLLLNERVSFAPPAILNPATLLPVESDDTPIHICSEILAEETGTRPDLRDQPLPGVPAWYTDGSSFIMDGRRQAGAAIVDNKRTVWASNLPEGTSAQKAELIALTQALRLAEGKSINIYTDSRYAFATAHVHGAIYKQRGWLTSAGKDIKNKEEILALLEAIHLPKRVAIIHCPGHQRGTDPVATGNRKADEAAKQAAQSTRILTETTKNAGKRTADGSEFEKRTADGSEFESPKKKAKVE

SEQ ID NO: 6308 - protein, 2094 aa, synthetic construct
MPAAKRVKLDGGDKKYSIGLDIGTNSVGWAVITDEYKVPSKKFKVLGNTDRHSIKKNLIGALLFDSGETAEATRLKRTARRRYTRRKNRICYLQEIFSNEMAKVDDSFFHRLEESFLVEEDKKHERHPIFGNIVDEVAYHEKYPTIYHLRKKLVDSTDKADLRLIYLALAHMIKFRGHFLIEGDLNPDNSDVDKLFIQLVQTYNQLFEENPINASGVDAKAILSARLSKSRRLENLIAQLPGEKKNGLFGNLIALSLGLTPNFKSNFDLAEDAKLQLSKDTYDDDLDNLLAQIGDQYADLFLAAKNLSDAILLSDILRVNTEITKAPLSASMIKRYDEHHQDLTLLKALVRQQLPEKYKEIFFDQSKNGYAGYIDGGASQEEFYKFIKPILEKMDGTEELLVKLNREDLLRKQRTFDNGSIPHQIHLGELHAILRRQEDFYPFLKDNREKIEKILTFRIPYYVGPLARGNSRFAWMTRKSEETITPWNFEEVVDKGASAQSFIERMTNFDKNLPNEKVLPKHSLLYEYFTVYNELTKVKYVTEGMRKPAFLSGEQKKAIVDLLFKTNRKVTVKQLKEDYFKKIECFDSVEISGVEDRFNASLGTYHDLLKIIKDKDFLDNEENEDILEDIVLTLTLFEDREMIEERLKTYAHLFDDKVMKQLKRRRYTGWGRLSRKLINGIRDKQSGKTILDFLKSDGFANRNFMQLIHDDSLTFKEDIQKAQVSGQGDSLHEHIANLAGSPAIKKGILQTVKVVDELVKVMGRHKPENIVIEMARENQTTQKGQKNSRERMKRIEEGIKELGSQILKEHPVENTQLQNEKLYLYYLQNGRDMYVDQELDINRLSDYDVDHIVPQSFLKDDSIDNKVLTRSDKARGKSDNVPSEEVVKKMKNYWRQLLNAKLITQRKFDNLTKAERGGLSELDKAGFIKRQLVETRQITKHVAQILDSRMNTKYDENDKLIREVKVITLKSKLVSDFRKDFQFYKVREINNYHHAHDAYLNAVVGTALIKKYPKLESEFVYGDYKVYDVRKMIAKSEQEIGKATAKYFFYSNIMNFFKTEITLANGEIRKRPLIETNGETGEIVWDKGRDFATVRKVLSMPQVNIVKKTEVQTGGFSKESILPKRNSDKLIARKKDWDPKKYGGFDSPTVAYSVLVVAKVEKGKSKKLKSVKELLGITIMERSSFEKNPIDFLEAKGYKEVKKDLIIKLPKYSLFELENGRKRMLASAGELQKGNELALPSKYVNFLYLASHYEKLKGSPEDNEQKQLFVEQHKHYLDEIIEQISEFSKRVILADANLDKVLSAYNKHRDKPIREQAENIIHLFTLTNLGAPAAFKYFDTTIDRKRYTSTKEVLDATLIHQSITGLYETRIDLSQLGGDGGGSSGSSGSSGGTLNLEDEYRLYETSAEPEVSPGSTWLSDFPQAWAETGGMGLAVRQAPLIIPLKATSTPVSIKQYPMSQEAKLGIKPHIQRLLDQGILVPCQSPWNTPLLPVKKPGTNDYRPVQDLREVNKRVEDIHPTVPNPYNLLSGLPPSHRWYTVLDLKDAFFCLRLHPTSQPLFAFEWRDPGMGISGQLTWTRLPQGFKNSPTLFNEALHRDLADFRIQHPDLILLQYVDDILLAATSELDCQQGTRALLLTLGNLGYRASAKKAQLCQKQVKYLGYLLKEGQRWLTEARKETVMGQPTPKTPRQLREFLGTAGFCRLWIPGFAEMAAPLYPLTKPGTLFNWGPDQQKAYQEIKQALLTAPALGLPDLTKPFELFVDEKQGYAKGVLTQKLGPWRRPVAYLSKKLDPVAAGWPPCLRMVAAIAVLRKDAGKLTMGQPLVILAPHAVEALVKQPPDRWLSNARMTHYQAMLLDTDRVQFGPVVALNPATLLPLPEEGAPHDCLEILAETHGTRPDLTDQPIPDADHTWYTDGSSFLQEGQRKAGAAVTTETEVIWARALPAGTSAQRAELIALTQALKMAEGKRLNVYTDSRYAFATAHIHGEIYRRRGWLTSEGREIKNKSEILALLKALFLPKRLSIIHCLGHQKGDSAEARGNRLADQAAREAAIKTPPDTSTLLAGKRTADGSEFEKRTADGSEFESPKKKAKVE

SEQ ID NO: 6309 - protein, 2094 aa, synthetic construct
MPAAKRVKLDGGDKKYSIGLDIGTNSVGWAVITDEYKVPSKKFKVLGNTDRHSIKKNLIGALLFDSGETAEATRLKRTARRRYTRRKNRICYLQEIFSNEMAKVDDSFFHRLEESFLVEEDKKHERHPIFGNIVDEVAYHEKYPTIYHLRKKLVDSTDKADLRLIYLALAHMIKFRGHFLIEGDLNPDNSDVDKLFIQLVQTYNQLFEENPINASGVDAKAILSARLSKSRRLENLIAQLPGEKKNGLFGNLIALSLGLTPNFKSNFDLAEDAKLQLSKDTYDDDLDNLLAQIGDQYADLFLAAKNLSDAILLSDILRVNTEITKAPLSASMIKRYDEHHQDLTLLKALVRQQLPEKYKEIFFDQSKNGYAGYIDGGASQEEFYKFIKPILEKMDGTEELLVKLNREDLLRKQRTFDNGSIPHQIHLGELHAILRRQEDFYPFLKDNREKIEKILTFRIPYYVGPLARGNSRFAWMTRKSEETITPWNFEEVVDKGASAQSFIERMTNFDKNLPNEKVLPKHSLLYEYFTVYNELTKVKYVTEGMRKPAFLSGEQKKAIVDLLFKTNRKVTVKQLKEDYFKKIECFDSVEISGVEDRFNASLGTYHDLLKIIKDKDFLDNEENEDILEDIVLTLTLFEDREMIEERLKTYAHLFDDKVMKQLKRRRYTGWGRLSRKLINGIRDKQSGKTILDFLKSDGFANRNFMQLIHDDSLTFKEDIQKAQVSGQGDSLHEHIANLAGSPAIKKGILQTVKVVDELVKVMGRHKPENIVIEMARENQTTQKGQKNSRERMKRIEEGIKELGSQILKEHPVENTQLQNEKLYLYYLQNGRDMYVDQELDINRLSDYDVDHIVPQSFLKDDSIDNKVLTRSDKARGKSDNVPSEEVVKKMKNYWRQLLNAKLITQRKFDNLTKAERGGLSELDKAGFIKRQLVETRQITKHVAQILDSRMNTKYDENDKLIREVKVITLKSKLVSDFRKDFQFYKVREINNYHHAHDAYLNAVVGTALIKKYPKLESEFVYGDYKVYDVRKMIAKSEQEIGKATAKYFFYSNIMNFFKTEITLANGEIRKRPLIETNGETGEIVWDKGRDFATVRKVLSMPQVNIVKKTEVQTGGFSKESILPKRNSDKLIARKKDWDPKKYGGFDSPTVAYSVLVVAKVEKGKSKKLKSVKELLGITIMERSSFEKNPIDFLEAKGYKEVKKDLIIKLPKYSLFELENGRKRMLASAGELQKGNELALPSKYVNFLYLASHYEKLKGSPEDNEQKQLFVEQHKHYLDEIIEQISEFSKRVILADANLDKVLSAYNKHRDKPIREQAENIIHLFTLTNLGAPAAFKYFDTTIDRKRYTSTKEVLDATLIHQSITGLYETRIDLSQLGGDGGGSSGSSGSSGGTLGIEDEYRLHETSTEPDVSLGSTWLSDFPQAWAETGGMGLAVRQAPLIIPLKATSTPVSIQQYPMSHEARLGIKPHIQRLLDQGILVPCQSPWNTPLLPVKKPGTNDYRPVQDLREVNKRVEDIHPTVPNPYNLLSGLPPSHQWYTVLDLKDAFFCLRLHPTSQPLFAFEWRDPGMGISGQLTWTRLPQGFKNSPTLFDEALHRDLADFRIQHPDLILLQYVDDILLAATSELDCQQGTRALLQTLGDLGYRASAKKAQICQKQVKYLGYLLREGQRWLTEARKETVMGQPVPKTPRQLREFLGTAGFCRLWIPGFAEMAAPLYPLTKTGTLFSWGPDQQKAYQEIKQALLTAPALGLPDLTKPFELFVDEKQGYAKGVLTQKLGPWRRPVAYLSKKLDPVAAGWPPCLRMVAAIAVLTKDAGKLTMGQPLVILAPHAVEALVKQPPDRWLSNARMTHYQAMLLDTDRVQFGPVVALNPATLLPLPEEGAPHDCLEILAETHGTRPDLTDQPIPDADHTWYTDGSSFLQEGQRKAGAAVTTETEVIWAGALPAGTSAQRAELIALTQALKMAEGKRLNVYTDSRYAFATAHIHGEIYRRRGLLTSEGREIKNKSEILALLKALFLPKRLSIIHCLGHQKGDSAEARGNRLADQAAREAAIKTPPDTSTLLAGKRTADGSEFEKRTADGSEFESPKKKAKVE

SEQ ID NO: 6310 - protein, 2094 aa, synthetic construct
MPAAKRVKLDGGDKKYSIGLDIGTNSVGWAVITDEYKVPSKKFKVLGNTDRHSIKKNLIGALLFDSGETAEATRLKRTARRRYTRRKNRICYLQEIFSNEMAKVDDSFFHRLEESFLVEEDKKHERHPIFGNIVDEVAYHEKYPTIYHLRKKLVDSTDKADLRLIYLALAHMIKFRGHFLIEGDLNPDNSDVDKLFIQLVQTYNQLFEENPINASGVDAKAILSARLSKSRRLENLIAQLPGEKKNGLFGNLIALSLGLTPNFKSNFDLAEDAKLQLSKDTYDDDLDNLLAQIGDQYADLFLAAKNLSDAILLSDILRVNTEITKAPLSASMIKRYDEHHQDLTLLKALVRQQLPEKYKEIFFDQSKNGYAGYIDGGASQEEFYKFIKPILEKMDGTEELLVKLNREDLLRKQRTFDNGSIPHQIHLGELHAILRRQEDFYPFLKDNREKIEKILTFRIPYYVGPLARGNSRFAWMTRKSEETITPWNFEEVVDKGASAQSFIERMTNFDKNLPNEKVLPKHSLLYEYFTVYNELTKVKYVTEGMRKPAFLSGEQKKAIVDLLFKTNRKVTVKQLKEDYFKKIECFDSVEISGVEDRFNASLGTYHDLLKIIKDKDFLDNEENEDILEDIVLTLTLFEDREMIEERLKTYAHLFDDKVMKQLKRRRYTGWGRLSRKLINGIRDKQSGKTILDFLKSDGFANRNFMQLIHDDSLTFKEDIQKAQVSGQGDSLHEHIANLAGSPAIKKGILQTVKVVDELVKVMGRHKPENIVIEMARENQTTQKGQKNSRERMKRIEEGIKELGSQILKEHPVENTQLQNEKLYLYYLQNGRDMYVDQELDINRLSDYDVDHIVPQSFLKDDSIDNKVLTRSDKARGKSDNVPSEEVVKKMKNYWRQLLNAKLITQRKFDNLTKAERGGLSELDKAGFIKRQLVETRQITKHVAQILDSRMNTKYDENDKLIREVKVITLKSKLVSDFRKDFQFYKVREINNYHHAHDAYLNAVVGTALIKKYPKLESEFVYGDYKVYDVRKMIAKSEQEIGKATAKYFFYSNIMNFFKTEITLANGEIRKRPLIETNGETGEIVWDKGRDFATVRKVLSMPQVNIVKKTEVQTGGFSKESILPKRNSDKLIARKKDWDPKKYGGFDSPTVAYSVLVVAKVEKGKSKKLKSVKELLGITIMERSSFEKNPIDFLEAKGYKEVKKDLIIKLPKYSLFELENGRKRMLASAGELQKGNELALPSKYVNFLYLASHYEKLKGSPEDNEQKQLFVEQHKHYLDEIIEQISEFSKRVILADANLDKVLSAYNKHRDKPIREQAENIIHLFTLTNLGAPAAFKYFDTTIDRKRYTSTKEVLDATLIHQSITGLYETRIDLSQLGGDGGGSSGSSGSSGGTLNIEDEYRLHETSKEPDVSLGSTWLSDFPQAWAETGGMGLAVRQAPLIIPLKATSTPVSIKQYPMSQEARLGIKPHIQRLLDQGILVPCQSPWNTPLLPVKKPGTNDYRPVQDLREVNKRVEDIHPTVPNPYNLLSGLPPSHQWYTVLDLKDAFFCLRLHPTSQPLFAFEWRDPEMGISGQLTWTRLPQGFKNSPTLFNEALHRDLAGFRIQHPDLILLQYVDDLLLAATSELDCQQGTRALLQTLGDLGYRASAKKAQICQKQVKYLGYLLKEGQRWLTEARKETVMGQPIPKTPRQLREFLGTAGFCRLWIPGFAEMAAPLYPLTKPGTLFNWGPDQQKAFQEIKQALLTAPALGLPDLTKPFELFVDEKQGYAKGVLTQKLGPWRRPVAYLSKKLDPVAAGWPPCLRMVAAIAVLTKDAGKLTMGQPLVILAPHAVEALVKQPPDRWLSNARMTHYQALLLDTDRVQFGPVVALNPATLLPLPEEGLQHDCLDILAEAHGTRSDLMDQPLPDADHTWYTDGSSFLQEGQRKAGAAVTTETEVIWARALPAGTSAQRAELIALTQALKMAEGKKLNVYTDSRYAFATAHIHGEIYRRRGWLTSEGKEIKNKDEILALLKALFLPKRLSIIHCPGHQKGNSAEARGNRMADQAAREVATRETPETSTLLAGKRTADGSEFEKRTADGSEFESPKKKAKVE

SEQ ID NO: 6311 - protein, 2094 aa, synthetic construct; identical to SEQ ID NO: 4505

SEQ ID NO: 6312 - protein, 2094 aa, synthetic construct; identical to SEQ ID NO: 4505

SEQ ID NO: 6313 - protein, 2088 aa, synthetic construct
MPAAKRVKLDGGDKKYSIGLDIGTNSVGWAVITDEYKVPSKKFKVLGNTDRHSIKKNLIGALLFDSGETAEATRLKRTARRRYTRRKNRICYLQEIFSNEMAKVDDSFFHRLEESFLVEEDKKHERHPIFGNIVDEVAYHEKYPTIYHLRKKLVDSTDKADLRLIYLALAHMIKFRGHFLIEGDLNPDNSDVDKLFIQLVQTYNQLFEENPINASGVDAKAILSARLSKSRRLENLIAQLPGEKKNGLFGNLIALSLGLTPNFKSNFDLAEDAKLQLSKDTYDDDLDNLLAQIGDQYADLFLAAKNLSDAILLSDILRVNTEITKAPLSASMIKRYDEHHQDLTLLKALVRQQLPEKYKEIFFDQSKNGYAGYIDGGASQEEFYKFIKPILEKMDGTEELLVKLNREDLLRKQRTFDNGSIPHQIHLGELHAILRRQEDFYPFLKDNREKIEKILTFRIPYYVGPLARGNSRFAWMTRKSEETITPWNFEEVVDKGASAQSFIERMTNFDKNLPNEKVLPKHSLLYEYFTVYNELTKVKYVTEGMRKPAFLSGEQKKAIVDLLFKTNRKVTVKQLKEDYFKKIECFDSVEISGVEDRFNASLGTYHDLLKIIKDKDFLDNEENEDILEDIVLTLTLFEDREMIEERLKTYAHLFDDKVMKQLKRRRYTGWGRLSRKLINGIRDKQSGKTILDFLKSDGFANRNFMQLIHDDSLTFKEDIQKAQVSGQGDSLHEHIANLAGSPAIKKGILQTVKVVDELVKVMGRHKPENIVIEMARENQTTQKGQKNSRERMKRIEEGIKELGSQILKEHPVENTQLQNEKLYLYYLQNGRDMYVDQELDINRLSDYDVDHIVPQSFLKDDSIDNKVLTRSDKARGKSDNVPSEEVVKKMKNYWRQLLNAKLITQRKFDNLTKAERGGLSELDKAGFIKRQLVETRQITKHVAQILDSRMNTKYDENDKLIREVKVITLKSKLVSDFRKDFQFYKVREINNYHHAHDAYLNAVVGTALIKKYPKLESEFVYGDYKVYDVRKMIAKSEQEIGKATAKYFFYSNIMNFFKTEITLANGEIRKRPLIETNGETGEIVWDKGRDFATVRKVLSMPQVNIVKKTEVQTGGFSKESILPKRNSDKLIARKKDWDPKKYGGFDSPTVAYSVLVVAKVEKGKSKKLKSVKELLGITIMERSSFEKNPIDFLEAKGYKEVKKDLIIKLPKYSLFELENGRKRMLASAGELQKGNELALPSKYVNFLYLASHYEKLKGSPEDNEQKQLFVEQHKHYLDEIIEQISEFSKRVILADANLDKVLSAYNKHRDKPIREQAENIIHLFTLTNLGAPAAFKYFDTTIDRKRYTSTKEVLDATLIHQSITGLYETRIDLSQLGGDGGGSSGSSGSSGGTLQLDDEYRLYSPLVKPDQNIQFWLEQFPQAWAETAGMGLAKQVPPQVIQLKASATPVSVRQYPLSKEAQEGIRPHVQRLIQQGILVPVQSPWNTPLLPVRKPGTNDYRPVQDLREVNKRVQDIHPTVPNPYNLLCALPPQRSWYTVLDLKDAFFCLRLHPTSQPLFAFEWRDPGTGRTGQLTWTRLPQGFKNSPTIFDEALHRDLANFRIQHPQVTLLQYVDDLLLAGATKQDCLEGTKALLLELSDLGYRASAKKAQICRREVTYLGYSLRDGQRWLTEARKKTVVQIPAPTTAKQVREFLGTAGFCRLWIPGFATLAAPLYPLTKEKGEFSWAPEHQKAFDAIKKALLSAPALALPDVTKPFTLYVDERKGVARGVLTQTLGPWRRPVAYLSKKLDPVASGWPVCLKAIAAVAILVKDADKLTLGQNITVIAPHALENIVRQPPDRWMTNARMTHYQSLLLTERVTFAPPAALNPATLLPEETDEPVTHDCHQLLIEETGVRKDLTDIPLTGEVLTWFTDGSSYVVEGKRMAGAAVVDGTRTIWASSLPEGTSAQKAELMALTQALRLAEGKSINIYTDSRYAFATAHVHGAIYKQRGLLTSAGREIKNKEEILSLLEALHLPKRLAIIHCPGHQKAKDPISRGNQMADRVAKQAAQGVNLLAGKRTADGSEFEKRTADGSEFESPKKKAKVE

SEQ ID NO: 6314 - protein, 2088 aa, synthetic construct; identical to SEQ ID NO: 6313

SEQ ID NO: 6315 - protein, 2099 aa, synthetic construct
MPAAKRVKLDGGDKKYSIGLDIGTNSVGWAVITDEYKVPSKKFKVLGNTDRHSIKKNLIGALLFDSGETAEATRLKRTARRRYTRRKNRICYLQEIFSNEMAKVDDSFFHRLEESFLVEEDKKHERHPIFGNIVDEVAYHEKYPTIYHLRKKLVDSTDKADLRLIYLALAHMIKFRGHFLIEGDLNPDNSDVDKLFIQLVQTYNQLFEENPINASGVDAKAILSARLSKSRRLENLIAQLPGEKKNGLFGNLIALSLGLTPNFKSNFDLAEDAKLQLSKDTYDDDLDNLLAQIGDQYADLFLAAKNLSDAILLSDILRVNTEITKAPLSASMIKRYDEHHQDLTLLKALVRQQLPEKYKEIFFDQSKNGYAGYIDGGASQEEFYKFIKPILEKMDGTEELLVKLNREDLLRKQRTFDNGSIPHQIHLGELHAILRRQEDFYPFLKDNREKIEKILTFRIPYYVGPLARGNSRFAWMTRKSEETITPWNFEEVVDKGASAQSFIERMTNFDKNLPNEKVLPKHSLLYEYFTVYNELTKVKYVTEGMRKPAFLSGEQKKAIVDLLFKTNRKVTVKQLKEDYFKKIECFDSVEISGVEDRFNASLGTYHDLLKIIKDKDFLDNEENEDILEDIVLTLTLFEDREMIEERLKTYAHLFDDKVMKQLKRRRYTGWGRLSRKLINGIRDKQSGKTILDFLKSDGFANRNFMQLIHDDSLTFKEDIQKAQVSGQGDSLHEHIANLAGSPAIKKGILQTVKVVDELVKVMGRHKPENIVIEMARENQTTQKGQKNSRERMKRIEEGIKELGSQILKEHPVENTQLQNEKLYLYYLQNGRDMYVDQELDINRLSDYDVDHIVPQSFLKDDSIDNKVLTRSDKARGKSDNVPSEEVVKKMKNYWRQLLNAKLITQRKFDNLTKAERGGLSELDKAGFIKRQLVETRQITKHVAQILDSRMNTKYDENDKLIREVKVITLKSKLVSDFRKDFQFYKVREINNYHHAHDAYLNAVVGTALIKKYPKLESEFVYGDYKVYDVRKMIAKSEQEIGKATAKYFFYSNIMNFFKTEITLANGEIRKRPLIETNGETGEIVWDKGRDFATVRKVLSMPQVNIVKKTEVQTGGFSKESILPKRNSDKLIARKKDWDPKKYGGFDSPTVAYSVLVVAKVEKGKSKKLKSVKELLGITIMERSSFEKNPIDFLEAKGYKEVKKDLIIKLPKYSLFELENGRKRMLASAGELQKGNELALPSKYVNFLYLASHYEKLKGSPEDNEQKQLFVEQHKHYLDEIIEQISEFSKRVILADANLDKVLSAYNKHRDKPIREQAENIIHLFTLTNLGAPAAFKYFDTTIDRKRYTSTKEVLDATLIHQSITGLYETRIDLSQLGGDGGGSSGSSGSSGSSGGTAPLEEEYRLFLEAPIQNVTLLEQWKREIPKVWAEINPPGLASTQAPIHVQLLSTALPVRVRQYPITLEAKRSLRETIRKFRAAGILRPVHSPWNTPLLPVRKSGTSEYRMVQDLREVNKRVETIHPTVPNPYTLLSLLPPDRIWYSVLDLKDAFFCIPLAPESQLIFAFEWADAEEGESGQLTWTRLPQGFKNSPTLFDEALNRDLQGFRLDHPSVSLLQYVDDLLIAADTQAACLSATRDLLMTLAELGYRVSGKKAQLCQEEVTYLGFKIHKGSRSLSNSRTQAILQIPVPKTKRQVREFLGTIGYCRLWIPGFAELAQPLYAATRGGNDPLVWGEKEEEAFQSLKLALTQPPALALPSLDKPFQLFVEETSGAAKGVLTQALGPWKRPVAYLSKRLDPVAAGWPRCLRAIAAAALLTREASKLTFGQDIEITSSHNLESLLRSPPDKWLTNARITQYQVLLLDPPRVRFKQTAALNPATLLPETDDTLPIHHCLDTLDSLTSTRPDLTDQPLAQAEATLFTDGSSYIRDGKRYAGAAVVTLDSVIWAEPLPIGTSAQKAELIALTKALEWSKDKSVNIYTDSRYAFATLHVHGMIYRERGLLTAGGKAIKNAPEILALLTAVWLPKRVAVMHCKGHQKDDAPTSTGNRRADEVAREVAIRPLSTQATISAGKRTADGSEFEKRTADGSEFESPKKKAKVE

SEQ ID NO: 6316 - protein, 2099 aa, synthetic construct
MPAAKRVKLDGGDKKYSIGLDIGTNSVGWAVITDEYKVPSKKFKVLGNTDRHSIKKNLIGALLFDSGETAEATRLKRTARRRYTRRKNRICYLQEIFSNEMAKVDDSFFHRLEESFLVEEDKKHERHPIFGNIVDEVAYHEKYPTIYHLRKKLVDSTDKADLRLIYLALAHMIKFRGHFLIEGDLNPDNSDVDKLFIQLVQTYNQLFEENPINASGVDAKAILSARLSKSRRLENLIAQLPGEKKNGLFGNLIALSLGLTPNFKSNFDLAEDAKLQLSKDTYDDDLDNLLAQIGDQYADLFLAAKNLSDAILLSDILRVNTEITKAPLSASMIKRYDEHHQDLTLLKALVRQQLPEKYKEIFFDQSKNGYAGYIDGGASQEEFYKFIKPILEKMDGTEELLVKLNREDLLRKQRTFDNGSIPHQIHLGELHAILRRQEDFYPFLKDNREKIEKILTFRIPYYVGPLARGNSRFAWMTRKSEETITPWNFEEVVDKGASAQSFIERMTNFDKNLPNEKVLPKHSLLYEYFTVYNELTKVKYVTEGMRKPAFLSGEQKKAIVDLLFKTNRKVTVKQLKEDYFKKIECFDSVEISGVEDRFNASLGTYHDLLKIIKDKDFLDNEENEDILEDIVLTLTLFEDREMIEERLKTYAHLFDDKVMKQLKRRRYTGWGRLSRKLINGIRDKQSGKTILDFLKSDGFANRNFMQLIHDDSLTFKEDIQKAQVSGQGDSLHEHIANLAGSPAIKKGILQTVKVVDELVKVMGRHKPENIVIEMARENQTTQKGQKNSRERMKRIEEGIKELGSQILKEHPVENTQLQNEKLYLYYLQNGRDMYVDQELDINRLSDYDVDHIVPQSFLKDDSIDNKVLTRSDKARGKSDNVPSEEVVKKMKNYWRQLLNAKLITQRKFDNLTKAERGGLSELDKAGFIKRQLVETRQITKHVAQILDSRMNTKYDENDKLIREVKVITLKSKLVSDFRKDFQFYKVREINNYHHAHDAYLNAVVGTALIKKYPKLESEFVYGDYKVYDVRKMIAKSEQEIGKATAKYFFYSNIMNFFKTEITLANGEIRKRPLIETNGETGEIVWDKGRDFATVRKVLSMPQVNIVKKTEVQTGGFSKESILPKRNSDKLIARKKDWDPKKYGGFDSPTVAYSVLVVAKVEKGKSKKLKSVKELLGITIMERSSFEKNPIDFLEAKGYKEVKKDLIIKLPKYSLFELENGRKRMLASAGELQKGNELALPSKYVNFLYLASHYEKLKGSPEDNEQKQLFVEQHKHYLDEIIEQISEFSKRVILADANLDKVLSAYNKHRDKPIREQAENIIHLFTLTNLGAPAAFKYFDTTIDRKRYTSTKEVLDATLIHQSITGLYETRIDLSQLGGDGGGSSGSSGSSGSSGGTAPLEEEYRLFLEAPIQNVTLLEQWKREIPKVWAEINPPGLASTQAPIHVQLLSTALPVRVRQYPITLEAKRSLRETIRKFRAAGILRPVHSPWNTPLLPVRKSGTSEYRMVQDLREVNKRVETIHPTVPNPYTLLSLLPPDRIWYSVLDLKDAFFCIPLAPESQLIFAFEWADAEEGESGQLTWTRLPQGFKNSPTLFNEALNRDLQGFRLDHPSVSLLQYVDDLLIAADTQAACLSATRDLLMTLAELGYRVSGKKAQLCQEEVTYLGFKIHKGSRSLSNSRTQAILQIPVPKTKRQVREFLGTIGYCRLWIPGFAELAQPLYAATRPGNDPLVWGEKEEEAFQSLKLALTQPPALALPSLDKPFQLFVEETSGAAKGVLTQALGPWKRPVAYLSKRLDPVAAGWPRCLRAIAAAALLTREASKLTFGQDIEITSSHNLESLLRSPPDKWLTNARITQYQVLLLDPPRVRFKQTAALNPATLLPETDDTLPIHHCLDTLDSLTSTRPDLTDQPLAQAEATLFTDGSSYIRDGKRYAGAAVVTLDSVIWAEPLPIGTSAQKAELIALTKALEWSKDKSVNIYTDSRYAFATLHVHGMIYRERGWLTAGGKAIKNAPEILALLTAVWLPKRVAVMHCKGHQKDDAPTSTGNRRADEVAREVAIRPLSTQATISAGKRTADGSEFEKRTADGSEFESPKKKAKVE

SEQ ID NO: 6317 - protein, 2103 aa, synthetic construct
MPAAKRVKLDGGDKKYSIGLDIGTNSVGWAVITDEYKVPSKKFKVLGNTDRHSIKKNLIGALLFDSGETAEATRLKRTARRRYTRRKNRICYLQEIFSNEMAKVDDSFFHRLEESFLVEEDKKHERHPIFGNIVDEVAYHEKYPTIYHLRKKLVDSTDKADLRLIYLALAHMIKFRGHFLIEGDLNPDNSDVDKLFIQLVQTYNQLFEENPINASGVDAKAILSARLSKSRRLENLIAQLPGEKKNGLFGNLIALSLGLTPNFKSNFDLAEDAKLQLSKDTYDDDLDNLLAQIGDQYADLFLAAKNLSDAILLSDILRVNTEITKAPLSASMIKRYDEHHQDLTLLKALVRQQLPEKYKEIFFDQSKNGYAGYIDGGASQEEFYKFIKPILEKMDGTEELLVKLNREDLLRKQRTFDNGSIPHQIHLGELHAILRRQEDFYPFLKDNREKIEKILTFRIPYYVGPLARGNSRFAWMTRKSEETITPWNFEEVVDKGASAQSFIERMTNFDKNLPNEKVLPKHSLLYEYFTVYNELTKVKYVTEGMRKPAFLSGEQKKAIVDLLFKTNRKVTVKQLKEDYFKKIECFDSVEISGVEDRFNASLGTYHDLLKIIKDKDFLDNEENEDILEDIVLTLTLFEDREMIEERLKTYAHLFDDKVMKQLKRRRYTGWGRLSRKLINGIRDKQSGKTILDFLKSDGFANRNFMQLIHDDSLTFKEDIQKAQVSGQGDSLHEHIANLAGSPAIKKGILQTVKVVDELVKVMGRHKPENIVIEMARENQTTQKGQKNSRERMKRIEEGIKELGSQILKEHPVENTQLQNEKLYLYYLQNGRDMYVDQELDINRLSDYDVDHIVPQSFLKDDSIDNKVLTRSDKARGKSDNVPSEEVVKKMKNYWRQLLNAKLITQRKFDNLTKAERGGLSELDKAGFIKRQLVETRQITKHVAQILDSRMNTKYDENDKLIREVKVITLKSKLVSDFRKDFQFYKVREINNYHHAHDAYLNAVVGTALIKKYPKLESEFVYGDYKVYDVRKMIAKSEQEIGKATAKYFFYSNIMNFFKTEITLANGEIRKRPLIETNGETGEIVWDKGRDFATVRKVLSMPQVNIVKKTEVQTGGFSKESILPKRNSDKLIARKKDWDPKKYGGFDSPTVAYSVLVVAKVEKGKSKKLKSVKELLGITIMERSSFEKNPIDFLEAKGYKEVKKDLIIKLPKYSLFELENGRKRMLASAGELQKGNELALPSKYVNFLYLASHYEKLKGSPEDNEQKQLFVEQHKHYLDEIIEQISEFSKRVILADANLDKVLSAYNKHRDKPIREQAENIIHLFTLTNLGAPAAFKYFDTTIDRKRYTSTKEVLDATLIHQSITGLYETRIDLSQLGGDGGGSSGSSGSSGSSGGTVSLQDEHRLFDIPVTTSLPDVWLQDFPQAWAETGGLGRAKCQAPIIIDLKPTAVPVSIKQYPMSLEAHMGIRQHIIKFLELGVLRPCRSPWNTPLLPVKKPGTQDYRPVQDLREINKRTVDIHPTVPNPYNLLSTLKPDYSWYTVLDLKDAFFCLPLAPQSQELFAFEWKDPERGISGQLTWTRLPQGFKNSPTLFNEALHRDLTDFRTQHPEVTLLQYVDDLLLAAPTKKACTQGTRHLLQELGEKGYRASAKKAQICQTKVTYLGYILSEGKRWLTPGRIETVARIPPPRNPREVREFLGTAGFCRLWIPGFAELAAPLYALTKPSTPFTWQTEHQLAFEALKKALLSAPALGLPDTSKPFTLFLDERQGIAKGVLTQKLGPWKRPVAYLSKKLDPVAAGWPPCLRIMAATAMLVKDSAKLTLGQPLTVITPHTLEAIVRQPPDRWITNARLTHYQALLLDTDRVQFGPPVTLNPATLLPVPENQPSPHDCRQVLAETHGTREDLKDQELPDADHTWYTDGSSYLDSGTRRAGAAVVDGHNTIWAQSLPPGTSAQKAELIALTKALELSKGKKANIYTDSRYAFATAHTHGSIYERRGWLTSEGKEIKNKAEIIALLKALFLPQEVAIIHCPGHQKGQDPVAVGNRQADRVARQAAMAEVLTLATEPDNTSHITAGKRTADGSEFEKRTADGSEFESPKKKAKVE

SEQ ID NO: 6318 - protein, 2096 aa, synthetic construct
MPAAKRVKLDGGDKKYSIGLDIGTNSVGWAVITDEYKVPSKKFKVLGNTDRHSIKKNLIGALLFDSGETAEATRLKRTARRRYTRRKNRICYLQEIFSNEMAKVDDSFFHRLEESFLVEEDKKHERHPIFGNIVDEVAYHEKYPTIYHLRKKLVDSTDKADLRLIYLALAHMIKFRGHFLIEGDLNPDNSDVDKLFIQLVQTYNQLFEENPINASGVDAKAILSARLSKSRRLENLIAQLPGEKKNGLFGNLIALSLGLTPNFKSNFDLAEDAKLQLSKDTYDDDLDNLLAQIGDQYADLFLAAKNLSDAILLSDILRVNTEITKAPLSASMIKRYDEHHQDLTLLKALVRQQLPEKYKEIFFDQSKNGYAGYIDGGASQEEFYKFIKPILEKMDGTEELLVKLNREDLLRKQRTFDNGSIPHQIHLGELHAILRRQEDFYPFLKDNREKIEKILTFRIPYYVGPLARGNSRFAWMTRKSEETITPWNFEEVVDKGASAQSFIERMTNFDKNLPNEKVLPKHSLLYEYFTVYNELTKVKYVTEGMRKPAFLSGEQKKAIVDLLFKTNRKVTVKQLKEDYFKKIECFDSVEISGVEDRFNASLGTYHDLLKIIKDKDFLDNEENEDILEDIVLTLTLFEDREMIEERLKTYAHLFDDKVMKQLKRRRYTGWGRLSRKLINGIRDKQSGKTILDFLKSDGFANRNFMQLIHDDSLTFKEDIQKAQVSGQGDSLHEHIANLAGSPAIKKGILQTVKVVDELVKVMGRHKPENIVIEMARENQTTQKGQKNSRERMKRIEEGIKELGSQILKEHPVENTQLQNEKLYLYYLQNGRDMYVDQELDINRLSDYDVDHIVPQSFLKDDSIDNKVLTRSDKARGKSDNVPSEEVVKKMKNYWRQLLNAKLITQRKFDNLTKAERGGLSELDKAGFIKRQLVETRQITKHVAQILDSRMNTKYDENDKLIREVKVITLKSKLVSDFRKDFQFYKVREINNYHHAHDAYLNAVVGTALIKKYPKLESEFVYGDYKVYDVRKMIAKSEQEIGKATAKYFFYSNIMNFFKTEITLANGEIRKRPLIETNGETGEIVWDKGRDFATVRKVLSMPQVNIVKKTEVQTGGFSKESILPKRNSDKLIARKKDWDPKKYGGFDSPTVAYSVLVVAKVEKGKSKKLKSVKELLGITIMERSSFEKNPIDFLEAKGYKEVKKDLIIKLPKYSLFELENGRKRMLASAGELQKGNELALPSKYVNFLYLASHYEKLKGSPEDNEQKQLFVEQHKHYLDEIIEQISEFSKRVILADANLDKVLSAYNKHRDKPIREQAENIIHLFTLTNLGAPAAFKYFDTTIDRKRYTSTKEVLDATLIHQSITGLYETRIDLSQLGGDGGGSSGSSGSSGSSGGTLQLEEEYRLFEPESTQKQEMDIWLKNFPQAWAETGGMGTAHCQAPVLIQLKATATPISIRQYPMPHEAYQGIKPHIRRMLDQGILKPCQSPWNTPLLPVKKPGTEDYRPVQDLREVNKRVEDIHPTVPNPYNLLSTLPPSHPWYTVLDLKDAFFCLRLHSESQLLFAFEWRDPEIGLSGQLTWTRLPQGFKNSPTLFNEALHSDLADFRVRYPALVLLQYVDDLLLAAATRTECLEGTKALLETLGNKGYRASAKKAQICLQEVTYLGYSLKDGQRWLTKARKEAILSIPVPKNSRQVREFLGTAGYCRLWIPGFAELAAPLYPLTRPGTLFQWGTEQQLAFEDIKKALLSSPALGLPDITKPFELFIDENSGFAKGVLVQKLGPWKRPVAYLSKKLDTVASGWPPCLRMVAAIAILVKDAGKLTLGQPLTILTSHPVEALVRQPPNKWLSNARMTHYQAMLLDAERVHFGPTVSLNPATLLPLPSGGNHHDCLQILAETHGTRPDLTDQPLPDADLTWYTDGSSFIRNGEREAGAAVTTESEVIWAAPLPPGTSAQRAELIALTQALKMAEGKKLTVYTDSRYAFATTHVHGEIYRRRGWLTSEGKEIKNKNEILALLEALFLPKRLSIIHCPGHQKGDSPQAKGNRLADDTAKKAATETHSSLTVLPAGKRTADGSEFEKRTADGSEFESPKKKAKVE

SEQ ID NO: 6319 - protein, 2219 aa, synthetic construct
MPAAKRVKLDGGDKKYSIGLDIGTNSVGWAVITDEYKVPSKKFKVLGNTDRHSIKKNLIGALLFDSGETAEATRLKRTARRRYTRRKNRICYLQEIFSNEMAKVDDSFFHRLEESFLVEEDKKHERHPIFGNIVDEVAYHEKYPTIYHLRKKLVDSTDKADLRLIYLALAHMIKFRGHFLIEGDLNPDNSDVDKLFIQLVQTYNQLFEENPINASGVDAKAILSARLSKSRRLENLIAQLPGEKKNGLFGNLIALSLGLTPNFKSNFDLAEDAKLQLSKDTYDDDLDNLLAQIGDQYADLFLAAKNLSDAILLSDILRVNTEITKAPLSASMIKRYDEHHQDLTLLKALVRQQLPEKYKEIFFDQSKNGYAGYIDGGASQEEFYKFIKPILEKMDGTEELLVKLNREDLLRKQRTFDNGSIPHQIHLGELHAILRRQEDFYPFLKDNREKIEKILTFRIPYYVGPLARGNSRFAWMTRKSEETITPWNFEEVVDKGASAQSFIERMTNFDKNLPNEKVLPKHSLLYEYFTVYNELTKVKYVTEGMRKPAFLSGEQKKAIVDLLFKTNRKVTVKQLKEDYFKKIECFDSVEISGVEDRFNASLGTYHDLLKIIKDKDFLDNEENEDILEDIVLTLTLFEDREMIEERLKTYAHLFDDKVMKQLKRRRYTGWGRLSRKLINGIRDKQSGKTILDFLKSDGFANRNFMQLIHDDSLTFKEDIQKAQVSGQGDSLHEHIANLAGSPAIKKGILQTVKVVDELVKVMGRHKPENIVIEMARENQTTQKGQKNSRERMKRIEEGIKELGSQILKEHPVENTQLQNEKLYLYYLQNGRDMYVDQELDINRLSDYDVDHIVPQSFLKDDSIDNKVLTRSDKARGKSDNVPSEEVVKKMKNYWRQLLNAKLITQRKFDNLTKAERGGLSELDKAGFIKRQLVETRQITKHVAQILDSRMNTKYDENDKLIREVKVITLKSKLVSDFRKDFQFYKVREINNYHHAHDAYLNAVVGTALIKKYPKLESEFVYGDYKVYDVRKMIAKSEQEIGKATAKYFFYSNIMNFFKTEITLANGEIRKRPLIETNGETGEIVWDKGRDFATVRKVLSMPQVNIVKKTEVQTGGFSKESILPKRNSDKLIARKKDWDPKKYGGFDSPTVAYSVLVVAKVEKGKSKKLKSVKELLGITIMERSSFEKNPIDFLEAKGYKEVKKDLIIKLPKYSLFELENGRKRMLASAGELQKGNELALPSKYVNFLYLASHYEKLKGSPEDNEQKQLFVEQHKHYLDEIIEQISEFSKRVILADANLDKVLSAYNKHRDKPIREQAENIIHLFTLTNLGAPAAFKYFDTTIDRKRYTSTKEVLDATLIHQSITGLYETRIDLSQLGGDGGGSSGSSGSSGSSGGTLGDQGSRGSDPLPEPRVTLTVEGIPTEFLVNTGAEHSVLTKPMGKMGSKRTVVAGATGSKVYPWTTKRLLKIGQKQVTHSFLVIPECPAPLLGRDLLTKLKAQIQFSTEGPQVTWEDRPAMCLVLNLEEEYRLHEKPVPPSIDPSWLQLFPMVWAEKAGMGLANQVPPVVVELKSDASPVAVRQYPMSKEAREGIRPHIQRFLDLGILVPCQSPWNTPLLPVKKPGTNDYRPVQDLREVNKRVQDIHPTVPNPYNLLSSLPPSHTWYSVLDLKDAFFCLKLHPNSQPLFAFEWRDPEKGNTGQLTWTRLPQGFKNSPTLFDEALHRDLASFRALNPQVVMLQYVDDLLVAAPTYRDCKEGTRRLLQELSKLGYRVSAKKAQLCREEVTYLGYLLKGGKRWLTPARKATVMKIPTPTTPRQVREFLGTAGFCRLWIPGFASLAAPLYPLTREKVPFTWTEAHQEAFGRIKEALLSAPALALPDLTKPFALYVDEKEGVARGVLTQTLGPWRRPVAYLSKKLDPVASGWPTCLKAIAAVALLLKDADKLTLGQNVLVIAPHNLESIVRQPPDRWMTNARMTHYQSLLLNERVSFAPPAILNPATLLPVESDDTPIHICSEILAEETGTRPDLRDQPLPGVPAWYTDGSSFIMDGRRQAGAAIVDNKRTVWASNLPEGTSAQKAELIALTQALRLAEGKSINIYTDSRYAFATAHVHGAIYKQRGLLTSAGKDIKNKEEILALLEAIHLPKRVAIIHCPGHQRGTDPVATGNRKADEAAKQAAQSTRILTETTKNAGKRTADGSEFEKRTADGSEFESPKKKAKVE

SEQ ID NO: 6320 - protein, 2128 aa, synthetic construct
MPAAKRVKLDGGDKKYSIGLDIGTNSVGWAVITDEYKVPSKKFKVLGNTDRHSIKKNLIGALLFDSGETAEATRLKRTARRRYTRRKNRICYLQEIFSNEMAKVDDSFFHRLEESFLVEEDKKHERHPIFGNIVDEVAYHEKYPTIYHLRKKLVDSTDKADLRLIYLALAHMIKFRGHFLIEGDLNPDNSDVDKLFIQLVQTYNQLFEENPINASGVDAKAILSARLSKSRRLENLIAQLPGEKKNGLFGNLIALSLGLTPNFKSNFDLAEDAKLQLSKDTYDDDLDNLLAQIGDQYADLFLAAKNLSDAILLSDILRVNTEITKAPLSASMIKRYDEHHQDLTLLKALVRQQLPEKYKEIFFDQSKNGYAGYIDGGASQEEFYKFIKPILEKMDGTEELLVKLNREDLLRKQRTFDNGSIPHQIHLGELHAILRRQEDFYPFLKDNREKIEKILTFRIPYYVGPLARGNSRFAWMTRKSEETITPWNFEEVVDKGASAQSFIERMTNFDKNLPNEKVLPKHSLLYEYFTVYNELTKVKYVTEGMRKPAFLSGEQKKAIVDLLFKTNRKVTVKQLKEDYFKKIECFDSVEISGVEDRFNASLGTYHDLLKIIKDKDFLDNEENEDILEDIVLTLTLFEDREMIEERLKTYAHLFDDKVMKQLKRRRYTGWGRLSRKLINGIRDKQSGKTILDFLKSDGFANRNFMQLIHDDSLTFKEDIQKAQVSGQGDSLHEHIANLAGSPAIKKGILQTVKVVDELVKVMGRHKPENIVIEMARENQTTQKGQKNSRERMKRIEEGIKELGSQILKEHPVENTQLQNEKLYLYYLQNGRDMYVDQELDINRLSDYDVDHIVPQSFLKDDSIDNKVLTRSDKARGKSDNVPSEEVVKKMKNYWRQLLNAKLITQRKFDNLTKAERGGLSELDKAGFIKRQLVETRQITKHVAQILDSRMNTKYDENDKLIREVKVITLKSKLVSDFRKDFQFYKVREINNYHHAHDAYLNAVVGTALIKKYPKLESEFVYGDYKVYDVRKMIAKSEQEIGKATAKYFFYSNIMNFFKTEITLANGEIRKRPLIETNGETGEIVWDKGRDFATVRKVLSMPQVNIVKKTEVQTGGFSKESILPKRNSDKLIARKKDWDPKKYGGFDSPTVAYSVLVVAKVEKGKSKKLKSVKELLGITIMERSSFEKNPIDFLEAKGYKEVKKDLIIKLPKYSLFELENGRKRMLASAGELQKGNELALPSKYVNFLYLASHYEKLKGSPEDNEQKQLFVEQHKHYLDEIIEQISEFSKRVILADANLDKVLSAYNKHRDKPIREQAENIIHLFTLTNLGAPAAFKYFDTTIDRKRYTSTKEVLDATLIHQSITGLYETRIDLSQLGGDGGGSSGSSGSSGSSGGLLGRDLLTKLKAQIQFSTEGPQVTWEDRPAMCLVLNLEEEYRLHEKPVPPSIDPSWLQLFPMVWAEKAGMGLANQVPPVVVELKSDASPVAVRQYPMSKEAREGIRPHIQRFLDLGILVPCQSPWNTPLLPVKKPGTNDYRPVQDLREVNKRVQDIHPTVPNPYNLLSSLPPSHTWYSVLDLKDAFFCLKLHPNSQPLFAFEWRDPEKGNTGQLTWTRLPQGFKNSPTLFNEALHRDLASFRALNPQVVMLQYVDDLLVAAPTYRDCKEGTRRLLQELSKLGYRVSAKKAQLCREEVTYLGYLLKGGKRWLTPARKATVMKIPTPTTPRQVREFLGTAGFCRLWIPGFASLAAPLYPLTRPKVPFTWTEAHQEAFGRIKEALLSAPALALPDLTKPFALYVDEKEGVARGVLTQTLGPWRRPVAYLSKKLDPVASGWPTCLKAIAAVALLLKDADKLTLGQNVLVIAPHNLESIVRQPPDRWMTNARMTHYQSLLLNERVSFAPPAILNPATLLPVESDDTPIHICSEILAEETGTRPDLRDQPLPGVPAWYTDGSSFIMDGRRQAGAAIVDNKRTVWASNLPEGTSAQKAELIALTQALRLAEGKSINIYTDSRYAFATAHVHGAIYKQRGWLTSAGKDIKNKEEILALLEAIHLPKRVAIIHCPGHQRGTDPVATGNRKADEAAKQAAQSTRILTETTKNAGKRTADGSEFEKRTADGSEFESPKKKAKVE

SEQ ID NO: 6321 - protein, 2219 aa, synthetic construct
MPAAKRVKLDGGDKKYSIGLDIGTNSVGWAVITDEYKVPSKKFKVLGNTDRHSIKKNLIGALLFDSGETAEATRLKRTARRRYTRRKNRICYLQEIFSNEMAKVDDSFFHRLEESFLVEEDKKHERHPIFGNIVDEVAYHEKYPTIYHLRKKLVDSTDKADLRLIYLALAHMIKFRGHFLIEGDLNPDNSDVDKLFIQLVQTYNQLFEENPINASGVDAKAILSARLSKSRRLENLIAQLPGEKKNGLFGNLIALSLGLTPNFKSNFDLAEDAKLQLSKDTYDDDLDNLLAQIGDQYADLFLAAKNLSDAILLSDILRVNTEITKAPLSASMIKRYDEHHQDLTLLKALVRQQLPEKYKEIFFDQSKNGYAGYIDGGASQEEFYKFIKPILEKMDGTEELLVKLNREDLLRKQRTFDNGSIPHQIHLGELHAILRRQEDFYPFLKDNREKIEKILTFRIPYYVGPLARGNSRFAWMTRKSEETITPWNFEEVVDKGASAQSFIERMTNFDKNLPNEKVLPKHSLLYEYFTVYNELTKVKYVTEGMRKPAFLSGEQKKAIVDLLFKTNRKVTVKQLKEDYFKKIECFDSVEISGVEDRFNASLGTYHDLLKIIKDKDFLDNEENEDILEDIVLTLTLFEDREMIEERLKTYAHLFDDKVMKQLKRRRYTGWGRLSRKLINGIRDKQSGKTILDFLKSDGFANRNFMQLIHDDSLTFKEDIQKAQVSGQGDSLHEHIANLAGSPAIKKGILQTVKVVDELVKVMGRHKPENIVIEMARENQTTQKGQKNSRERMKRIEEGIKELGSQILKEHPVENTQLQNEKLYLYYLQNGRDMYVDQELDINRLSDYDVDHIVPQSFLKDDSIDNKVLTRSDKARGKSDNVPSEEVVKKMKNYWRQLLNAKLITQRKFDNLTKAERGGLSELDKAGFIKRQLVETRQITKHVAQILDSRMNTKYDENDKLIREVKVITLKSKLVSDFRKDFQFYKVREINNYHHAHDAYLNAVVGTALIKKYPKLESEFVYGDYKVYDVRKMIAKSEQEIGKATAKYFFYSNIMNFFKTEITLANGEIRKRPLIETNGETGEIVWDKGRDFATVRKVLSMPQVNIVKKTEVQTGGFSKESILPKRNSDKLIARKKDWDPKKYGGFDSPTVAYSVLVVAKVEKGKSKKLKSVKELLGITIMERSSFEKNPIDFLEAKGYKEVKKDLIIKLPKYSLFELENGRKRMLASAGELQKGNELALPSKYVNFLYLASHYEKLKGSPEDNEQKQLFVEQHKHYLDEIIEQISEFSKRVILADANLDKVLSAYNKHRDKPIREQAENIIHLFTLTNLGAPAAFKYFDTTIDRKRYTSTKEVLDATLIHQSITGLYETRIDLSQLGGDGGGSSGSSGSSGSSGGTLGDQGSRGSDPLPEPRVTLTVEGIPTEFLVNTGAEHSVLTKPMGKMGSKRTVVAGATGSKVYPWTTKRLLKIGQKQVTHSFLVIPECPAPLLGRDLLTKLKAQIQFSTEGPQVTWEDRPAMCLVLNLEEEYRLHEKPVPPSIDPSWLQLFPMVWAEKAGMGLANQVPPVVVELKSDASPVAVRQYPMSKEAREGIRPHIQRFLDLGILVPCQSPWNTPLLPVKKPGTNDYRPVQDLREVNKRVQDIHPTVPNPYNLLSSLPPSHTWYSVLDLKDAFFCLKLHPNSQPLFAFEWRDPEKGNTGQLTWTRLPQGFKNSPTLFNEALHRDLASFRALNPQVVMLQYVDDLLVAAPTYRDCKEGTRRLLQELSKLGYRVSAKKAQLCREEVTYLGYLLKGGKRWLTPARKATVMKIPTPTTPRQVREFLGKAGFCRLFIPGFASLAAPLYPLTRPKVPFTWTEAHQEAFGRIKEALLSAPALALPDLTKPFALYVDEKEGVARGVLTQTLGPWRRPVAYLSKKLDPVASGWPTCLKAIAAVALLLKDADKLTLGQNVLVIAPHNLESIVRQPPDRWMTNARMTHYQSLLLNERVSFAPPAILNPATLLPVESDDTPIHICSEILAEETGTRPDLRDQPLPGVPAWYTDGSSFIMDGRRQAGAAIVDNKRTVWASNLPEGTSAQKAELIALTQALRLAEGKSINIYTDSRYAFATAHVHGAIYKQRGWLTSAGKDIKNKEEILALLEAIHLPKRVAIIHCPGHQRGTDPVATGNRKADEAAKQAAQSTRILTETTKNAGKRTADGSEFEKRTADGSEFESPKKKAKVE

SEQ ID NO: 6322 - protein, 2097 aa, synthetic construct
MPAAKRVKLDGGDKKYSIGLDIGTNSVGWAVITDEYKVPSKKFKVLGNTDRHSIKKNLIGALLFDSGETAEATRLKRTARRRYTRRKNRICYLQEIFSNEMAKVDDSFFHRLEESFLVEEDKKHERHPIFGNIVDEVAYHEKYPTIYHLRKKLVDSTDKADLRLIYLALAHMIKFRGHFLIEGDLNPDNSDVDKLFIQLVQTYNQLFEENPINASGVDAKAILSARLSKSRRLENLIAQLPGEKKNGLFGNLIALSLGLTPNFKSNFDLAEDAKLQLSKDTYDDDLDNLLAQIGDQYADLFLAAKNLSDAILLSDILRVNTEITKAPLSASMIKRYDEHHQDLTLLKALVRQQLPEKYKEIFFDQSKNGYAGYIDGGASQEEFYKFIKPILEKMDGTEELLVKLNREDLLRKQRTFDNGSIPHQIHLGELHAILRRQEDFYPFLKDNREKIEKILTFRIPYYVGPLARGNSRFAWMTRKSEETITPWNFEEVVDKGASAQSFIERMTNFDKNLPNEKVLPKHSLLYEYFTVYNELTKVKYVTEGMRKPAFLSGEQKKAIVDLLFKTNRKVTVKQLKEDYFKKIECFDSVEISGVEDRFNASLGTYHDLLKIIKDKDFLDNEENEDILEDIVLTLTLFEDREMIEERLKTYAHLFDDKVMKQLKRRRYTGWGRLSRKLINGIRDKQSGKTILDFLKSDGFANRNFMQLIHDDSLTFKEDIQKAQVSGQGDSLHEHIANLAGSPAIKKGILQTVKVVDELVKVMGRHKPENIVIEMARENQTTQKGQKNSRERMKRIEEGIKELGSQILKEHPVENTQLQNEKLYLYYLQNGRDMYVDQELDINRLSDYDVDHIVPQSFLKDDSIDNKVLTRSDKARGKSDNVPSEEVVKKMKNYWRQLLNAKLITQRKFDNLTKAERGGLSELDKAGFIKRQLVETRQITKHVAQILDSRMNTKYDENDKLIREVKVITLKSKLVSDFRKDFQFYKVREINNYHHAHDAYLNAVVGTALIKKYPKLESEFVYGDYKVYDVRKMIAKSEQEIGKATAKYFFYSNIMNFFKTEITLANGEIRKRPLIETNGETGEIVWDKGRDFATVRKVLSMPQVNIVKKTEVQTGGFSKESILPKRNSDKLIARKKDWDPKKYGGFDSPTVAYSVLVVAKVEKGKSKKLKSVKELLGITIMERSSFEKNPIDFLEAKGYKEVKKDLIIKLPKYSLFELENGRKRMLASAGELQKGNELALPSKYVNFLYLASHYEKLKGSPEDNEQKQLFVEQHKHYLDEIIEQISEFSKRVILADANLDKVLSAYNKHRDKPIREQAENIIHLFTLTNLGAPAAFKYFDTTIDRKRYTSTKEVLDATLIHQSITGLYETRIDLSQLGGDGGGSSGSSGSSGSSGGLGIEDEYRLHETSTEPDVSLGSTWLSDFPQAWAETGGMGLAVRQAPLIIPLKATSTPVSIQQYPMSHEARLGIKPHIQRLLDQGILVPCQSPWNTPLLPVKKPGTNDYRPVQDLREVNKRVEDIHPTVPNPYNLLSGLPPSHQWYTVLDLKDAFFCLRLHPTSQPLFAFEWRDPGMGISGQLTWTRLPQGFKNSPTLFNEALHRDLADFRIQHPDLILLQYVDDILLAATSELDCQQGTRALLQTLGDLGYRASAKKAQICQKQVKYLGYLLREGQRWLTEARKETVMGQPVPKTPRQLREFLGKAGFCRLFIPGFAEMAAPLYPLTKPGTLFSWGPDQQKAYQEIKQALLTAPALGLPDLTKPFELFVDEKQGYAKGVLTQKLGPWRRPVAYLSKKLDPVAAGWPPCLRMVAAIAVLTKDAGKLTMGQPLVILAPHAVEALVKQPPDRWLSNARMTHYQAMLLDTDRVQFGPVVALNPATLLPLPEEGAPHDCLEILAETHGTRPDLTDQPIPDADHTWYTDGSSFLQEGQRKAGAAVTTETEVIWAGALPAGTSAQRAELIALTQALKMAEGKRLNVYTDSRYAFATAHIHGEIYRRRGWLTSEGREIKNKSEILALLKALFLPKRLSIIHCLGHQKGDSAEARGNRLADQAAREAAIKTPPDTSTLLIAGKRTADGSEFEKRTADGSEFESPKKKAKVE

SEQ ID NO: 6323 - protein, 2097 aa, synthetic construct
MPAAKRVKLDGGDKKYSIGLDIGTNSVGWAVITDEYKVPSKKFKVLGNTDRHSIKKNLIGALLFDSGETAEATRLKRTARRRYTRRKNRICYLQEIFSNEMAKVDDSFFHRLEESFLVEEDKKHERHPIFGNIVDEVAYHEKYPTIYHLRKKLVDSTDKADLRLIYLALAHMIKFRGHFLIEGDLNPDNSDVDKLFIQLVQTYNQLFEENPINASGVDAKAILSARLSKSRRLENLIAQLPGEKKNGLFGNLIALSLGLTPNFKSNFDLAEDAKLQLSKDTYDDDLDNLLAQIGDQYADLFLAAKNLSDAILLSDILRVNTEITKAPLSASMIKRYDEHHQDLTLLKALVRQQLPEKYKEIFFDQSKNGYAGYIDGGASQEEFYKFIKPILEKMDGTEELLVKLNREDLLRKQRTFDNGSIPHQIHLGELHAILRRQEDFYPFLKDNREKIEKILTFRIPYYVGPLARGNSRFAWMTRKSEETITPWNFEEVVDKGASAQSFIERMTNFDKNLPNEKVLPKHSLLYEYFTVYNELTKVKYVTEGMRKPAFLSGEQKKAIVDLLFKTNRKVTVKQLKEDYFKKIECFDSVEISGVEDRFNASLGTYHDLLKIIKDKDFLDNEENEDILEDIVLTLTLFEDREMIEERLKTYAHLFDDKVMKQLKRRRYTGWGRLSRKLINGIRDKQSGKTILDFLKSDGFANRNFMQLIHDDSLTFKEDIQKAQVSGQGDSLHEHIANLAGSPAIKKGILQTVKVVDELVKVMGRHKPENIVIEMARENQTTQKGQKNSRERMKRIEEGIKELGSQILKEHPVENTQLQNEKLYLYYLQNGRDMYVDQELDINRLSDYDVDHIVPQSFLKDDSIDNKVLTRSDKARGKSDNVPSEEVVKKMKNYWRQLLNAKLITQRKFDNLTKAERGGLSELDKAGFIKRQLVETRQITKHVAQILDSRMNTKYDENDKLIREVKVITLKSKLVSDFRKDFQFYKVREINNYHHAHDAYLNAVVGTALIKKYPKLESEFVYGDYKVYDVRKMIAKSEQEIGKATAKYFFYSNIMNFFKTEITLANGEIRKRPLIETNGETGEIVWDKGRDFATVRKVLSMPQVNIVKKTEVQTGGFSKESILPKRNSDKLIARKKDWDPKKYGGFDSPTVAYSVLVVAKVEKGKSKKLKSVKELLGITIMERSSFEKNPIDFLEAKGYKEVKKDLIIKLPKYSLFELENGRKRMLASAGELQKGNELALPSKYVNFLYLASHYEKLKGSPEDNEQKQLFVEQHKHYLDEIIEQISEFSKRVILADANLDKVLSAYNKHRDKPIREQAENIIHLFTLTNLGAPAAFKYFDTTIDRKRYTSTKEVLDATLIHQSITGLYETRIDLSQLGGDGGGSSGSSGSSGSSGGTLGIEDEYRLHETSTEPDVSLGSTWLSDFPQAWAETGGMGLAVRQAPLIIPLKATSTPVSIQQYPMSHEARLGIKPHIQRLLDQGILVPCQSPWNTPLLPVKKPGTNDYRPVQDLREVNKRVEDIHPTVPNPYNLLSGLPPSHQWYTVLDLKDAFFCLRLHPTSQPLFAFEWRDPGMGISGQLTWTRLPQGFKNSPTLFNEALHRDLADFRIQHPDLILLQYVDDILLAATSELDCQQGTRALLQTLGDLGYRASAKKAQICQKQVKYLGYLLREGQRWLTEARKETVMGQPVPKTPRQLREFLGTAGFCRLWIPGFAEMAAPLYPLTKPGTLFSWGPDQQKAYQEIKQALLTAPALGLPDLTKPFELFVDEKQGYAKGVLTQKLGPWRRPVAYLSKKLDPVAAGWPPCLRMVAAIAVLTKDAGKLTMGQPLVILAPHAVEALVKQPPDRWLSNARMTHYQAMLLDTDRVQFGPVVALNPATLLPLPEEGAPHDCLEILAETHGTRPDLTDQPIPDADHTWYTDGSSFLQEGQRKAGAAVTTETEVIWAGALPAGTSAQRAELIALTQALKMAEGKRLNVYTDSRYAFATAHIHGEIYRRRGWLTSEGREIKNKSEILALLKALFLPKRLSIIHCLGHQKGDSAEARGNRLADQAAREAAIKTPPDTSTLLAGKRTADGSEFEKRTADGSEFESPKKKAKVE

SEQ ID NO: 6324 - protein, 2097 aa, synthetic construct
MPAAKRVKLDGGDKKYSIGLDIGTNSVGWAVITDEYKVPSKKFKVLGNTDRHSIKKNLIGALLFDSGETAEATRLKRTARRRYTRRKNRICYLQEIFSNEMAKVDDSFFHRLEESFLVEEDKKHERHPIFGNIVDEVAYHEKYPTIYHLRKKLVDSTDKADLRLIYLALAHMIKFRGHFLIEGDLNPDNSDVDKLFIQLVQTYNQLFEENPINASGVDAKAILSARLSKSRRLENLIAQLPGEKKNGLFGNLIALSLGLTPNFKSNFDLAEDAKLQLSKDTYDDDLDNLLAQIGDQYADLFLAAKNLSDAILLSDILRVNTEITKAPLSASMIKRYDEHHQDLTLLKALVRQQLPEKYKEIFFDQSKNGYAGYIDGGASQEEFYKFIKPILEKMDGTEELLVKLNREDLLRKQRTFDNGSIPHQIHLGELHAILRRQEDFYPFLKDNREKIEKILTFRIPYYVGPLARGNSRFAWMTRKSEETITPWNFEEVVDKGASAQSFIERMTNFDKNLPNEKVLPKHSLLYEYFTVYNELTKVKYVTEGMRKPAFLSGEQKKAIVDLLFKTNRKVTVKQLKEDYFKKIECFDSVEISGVEDRFNASLGTYHDLLKIIKDKDFLDNEENEDILEDIVLTLTLFEDREMIEERLKTYAHLFDDKVMKQLKRRRYTGWGRLSRKLINGIRDKQSGKTILDFLKSDGFANRNFMQLIHDDSLTFKEDIQKAQVSGQGDSLHEHIANLAGSPAIKKGILQTVKVVDELVKVMGRHKPENIVIEMARENQTTQKGQKNSRERMKRIEEGIKELGSQILKEHPVENTQLQNEKLYLYYLQNGRDMYVDQELDINRLSDYDVDHIVPQSFLKDDSIDNKVLTRSDKARGKSDNVPSEEVVKKMKNYWRQLLNAKLITQRKFDNLTKAERGGLSELDKAGFIKRQLVETRQITKHVAQILDSRMNTKYDENDKLIREVKVITLKSKLVSDFRKDFQFYKVREINNYHHAHDAYLNAVVGTALIKKYPKLESEFVYGDYKVYDVRKMIAKSEQEIGKATAKYFFYSNIMNFFKTEITLANGEIRKRPLIETNGETGEIVWDKGRDFATVRKVLSMPQVNIVKKTEVQTGGFSKESILPKRNSDKLIARKKDWDPKKYGGFDSPTVAYSVLVVAKVEKGKSKKLKSVKELLGITIMERSSFEKNPIDFLEAKGYKEVKKDLIIKLPKYSLFELENGRKRMLASAGELQKGNELALPSKYVNFLYLASHYEKLKGSPEDNEQKQLFVEQHKHYLDEIIEQISEFSKRVILADANLDKVLSAYNKHRDKPIREQAENIIHLFTLTNLGAPAAFKYFDTTIDRKRYTSTKEVLDATLIHQSITGLYETRIDLSQLGGDGGGSSGSSGSSGSSGGTLNIEDEYRLHETSKGPDVPLGSTWLSDFPQAWAETGGMGLAVRQAPLIIPLKATSTPVSIKQYPMSQEARLGIKPHIQRLLDQGILVPCQSPWNTPLLPVKKPGTNDYRPVQDLREVNKRVEDIHPTVPNPYNLLSGLPPSHQWYTVLDLKDAFFCLRLHPTSQSLFAFEWRDPEMGISGQLTWTRLPQGFKNSPTLFNEALHRDLADFRIQHPDLILLQYVDDLLLAATSELDCQQGTRALLQTLGDLGYRASAKKAQICQKQVKYLGYLLKEGQRWLTEARKETVMGQPTPKTPRQLREFLGTAGFCRLWIPGFAEMAAPLYPLTKPGTLFEWGPDQQKAYQEIKQALLTAPALGLPDLTKPFELFVDEKQGYAKGVLTQKLGPWRRPVAYLSKKLDPVAAGWPPCLRMVAAIAVLTKDAGKLTMGQPLVILAPHAVEALVKQPPDRWLSNARMTHYQALLLDTDRVQFGPIVALNPATLLPLPEEGLQHDCLDILAEAHGTRPDLTDQPLPDADHTWYTDGSSFLQEGQRKAGAAVTTETEVVWAKALPAGTSAQRAELIALTQALKMAEGKKLNVYTDSRYAFATAHIHGEIYRRRGWLTSEGKEIKNKDEILALLKALFLPKRLSIIHCPGHQKGNRAEARGNRMADQAAREVATRETPETSTLLAGKRTADGSEFEKRTADGSEFESPKKKAKVE

SEQ ID NO: 6325 - protein, 2088 aa, synthetic construct
MPAAKRVKLDGGDKKYSIGLDIGTNSVGWAVITDEYKVPSKKFKVLGNTDRHSIKKNLIGALLFDSGETAEATRLKRTARRRYTRRKNRICYLQEIFSNEMAKVDDSFFHRLEESFLVEEDKKHERHPIFGNIVDEVAYHEKYPTIYHLRKKLVDSTDKADLRLIYLALAHMIKFRGHFLIEGDLNPDNSDVDKLFIQLVQTYNQLFEENPINASGVDAKAILSARLSKSRRLENLIAQLPGEKKNGLFGNLIALSLGLTPNFKSNFDLAEDAKLQLSKDTYDDDLDNLLAQIGDQYADLFLAAKNLSDAILLSDILRVNTEITKAPLSASMIKRYDEHHQDLTLLKALVRQQLPEKYKEIFFDQSKNGYAGYIDGGASQEEFYKFIKPILEKMDGTEELLVKLNREDLLRKQRTFDNGSIPHQIHLGELHAILRRQEDFYPFLKDNREKIEKILTFRIPYYVGPLARGNSRFAWMTRKSEETITPWNFEEVVDKGASAQSFIERMTNFDKNLPNEKVLPKHSLLYEYFTVYNELTKVKYVTEGMRKPAFLSGEQKKAIVDLLFKTNRKVTVKQLKEDYFKKIECFDSVEISGVEDRFNASLGTYHDLLKIIKDKDFLDNEENEDILEDIVLTLTLFEDREMIEERLKTYAHLFDDKVMKQLKRRRYTGWGRLSRKLINGIRDKQSGKTILDFLKSDGFANRNFMQLIHDDSLTFKEDIQKAQVSGQGDSLHEHIANLAGSPAIKKGILQTVKVVDELVKVMGRHKPENIVIEMARENQTTQKGQKNSRERMKRIEEGIKELGSQILKEHPVENTQLQNEKLYLYYLQNGRDMYVDQELDINRLSDYDVDHIVPQSFLKDDSIDNKVLTRSDKARGKSDNVPSEEVVKKMKNYWRQLLNAKLITQRKFDNLTKAERGGLSELDKAGFIKRQLVETRQITKHVAQILDSRMNTKYDENDKLIREVKVITLKSKLVSDFRKDFQFYKVREINNYHHAHDAYLNAVVGTALIKKYPKLESEFVYGDYKVYDVRKMIAKSEQEIGKATAKYFFYSNIMNFFKTEITLANGEIRKRPLIETNGETGEIVWDKGRDFATVRKVLSMPQVNIVKKTEVQTGGFSKESILPKRNSDKLIARKKDWDPKKYGGFDSPTVAYSVLVVAKVEKGKSKKLKSVKELLGITIMERSSFEKNPIDFLEAKGYKEVKKDLIIKLPKYSLFELENGRKRMLASAGELQKGNELALPSKYVNFLYLASHYEKLKGSPEDNEQKQLFVEQHKHYLDEIIEQISEFSKRVILADANLDKVLSAYNKHRDKPIREQAENIIHLFTLTNLGAPAAFKYFDTTIDRKRYTSTKEVLDATLIHQSITGLYETRIDLSQLGGDGGGSSGSSGSSGSSGGIPWLMKKPLQLTTLVPLQEYEERLLKQTMLTGSYKEKLQSLFLKYDALWQHWENQVGHRRIKPHHIATGTVNPRPQKQYPINPKAKASIQTVINDLLKQGVLIQQNSIMNTPVYPVPKPDGKWRMVLDYREVNKTIPLIAAQNQHSAGILSSIFRGKYKTTLDLSNGFWAHSITPESYWLTAFTWLGQQYCWTRLPQGFLNSPALFNADVVDLLKEVPNVQVYVDDIYISHDDPREHLEQLEKVFSLLLNAGYVVSLKKSEIAQHEVEFLGFNITKEGRGLTETFKQKLLNITPPRDLKQLQSILGLLNFARNFIPNFSELVKPLYNIIATAPGKYITWTTDNSQQLQNIISMLNSAENLEERNPEVRLIMKVNTSPSAGYIRFYNEFAKRPIMYLNYVYTKAEVKFTNTEKLLTTIHKGLIKALDLGMGQEILVYSPIVSMTKIQKTPLPERKALPIRWITWMSYLEDPRIQFHYDKTLPELQQVPTVTDDIIAKIKHPSEFSMVFYTDGSAIKHPNVNKSHNAGMGIAQVQFKPEFTVINTWSIPLGDHTAQLAEVAAVEFACKKALKIDGPVLIVTDSFYVAESVNKELPYWQSNGFFNNKKKPLKHVSKWKSIADCIQLKPDIIIIHEKGHQPTASTFHTEGNNLADKLATQGSYVVNAGKRTADGSEFEKRTADGSEFESPKKKAKVE

SEQ ID NO: 6326 - protein, 2177 aa, synthetic construct
MPAAKRVKLDGGDKKYSIGLDIGTNSVGWAVITDEYKVPSKKFKVLGNTDRHSIKKNLIGALLFDSGETAEATRLKRTARRRYTRRKNRICYLQEIFSNEMAKVDDSFFHRLEESFLVEEDKKHERHPIFGNIVDEVAYHEKYPTIYHLRKKLVDSTDKADLRLIYLALAHMIKFRGHFLIEGDLNPDNSDVDKLFIQLVQTYNQLFEENPINASGVDAKAILSARLSKSRRLENLIAQLPGEKKNGLFGNLIALSLGLTPNFKSNFDLAEDAKLQLSKDTYDDDLDNLLAQIGDQYADLFLAAKNLSDAILLSDILRVNTEITKAPLSASMIKRYDEHHQDLTLLKALVRQQLPEKYKEIFFDQSKNGYAGYIDGGASQEEFYKFIKPILEKMDGTEELLVKLNREDLLRKQRTFDNGSIPHQIHLGELHAILRRQEDFYPFLKDNREKIEKILTFRIPYYVGPLARGNSRFAWMTRKSEETITPWNFEEVVDKGASAQSFIERMTNFDKNLPNEKVLPKHSLLYEYFTVYNELTKVKYVTEGMRKPAFLSGEQKKAIVDLLFKTNRKVTVKQLKEDYFKKIECFDSVEISGVEDRFNASLGTYHDLLKIIKDKDFLDNEENEDILEDIVLTLTLFEDREMIEERLKTYAHLFDDKVMKQLKRRRYTGWGRLSRKLINGIRDKQSGKTILDFLKSDGFANRNFMQLIHDDSLTFKEDIQKAQVSGQGDSLHEHIANLAGSPAIKKGILQTVKVVDELVKVMGRHKPENIVIEMARENQTTQKGQKNSRERMKRIEEGIKELGSQILKEHPVENTQLQNEKLYLYYLQNGRDMYVDQELDINRLSDYDVDHIVPQSFLKDDSIDNKVLTRSDKARGKSDNVPSEEVVKKMKNYWRQLLNAKLITQRKFDNLTKAERGGLSELDKAGFIKRQLVETRQITKHVAQILDSRMNTKYDENDKLIREVKVITLKSKLVSDFRKDFQFYKVREINNYHHAHDAYLNAVVGTALIKKYPKLESEFVYGDYKVYDVRKMIAKSEQEIGKATAKYFFYSNIMNFFKTEITLANGEIRKRPLIETNGETGEIVWDKGRDFATVRKVLSMPQVNIVKKTEVQTGGFSKESILPKRNSDKLIARKKDWDPKKYGGFDSPTVAYSVLVVAKVEKGKSKKLKSVKELLGITIMERSSFEKNPIDFLEAKGYKEVKKDLIIKLPKYSLFELENGRKRMLASAGELQKGNELALPSKYVNFLYLASHYEKLKGSPEDNEQKQLFVEQHKHYLDEIIEQISEFSKRVILADANLDKVLSAYNKHRDKPIREQAENIIHLFTLTNLGAPAAFKYFDTTIDRKRYTSTKEVLDATLIHQSITGLYETRIDLSQLGGDGGGSSGSSGSSGSSGGMDPLQLLQPLEAEIKGTKLKAHWNSGATITCVPQAFLEEEVPIKNIWIKTIHGEKEQPVYYLTFKIQGRKVEAEVISSPYDYILVSPSDIPWLMKKPLQLTTLVPLQEYEERLLKQTMLTGSYKEKLQSLFLKYDALWQHWENQVGHRRIKPHHIATGTVNPRPQKQYPINPKAKASIQTVINDLLKQGVLIQQNSIMNTPVYPVPKPDGKWRMVLDYREVNKTIPLIAAQNQHSAGILSSIFRGKYKTTLDLSNGFWAHSITPESYWLTAFTWLGQQYCWTRLPQGFLNSPALFNADVVDLLKEVPNVQVYVDDIYISHDDPREHLEQLEKVFSLLLNAGYVVSLKKSEIAQHEVEFLGFNITKEGRGLTETFKQKLLNITPPRDLKQLQSILGKLNFARNFIPNFSELVKPLYNIIATAPGKYITWTTDNSQQLQNIISMLNSAENLEERNPEVRLIMKVNTSPSAGYIRFYNEFAKRPIMYLNYVYTKAEVKFTNTEKLLTTIHKGLIKALDLGMGQEILVYSPIVSMTKIQKTPLPERKALPIRWITWMSYLEDPRIQFHYDKTLPELQQVPTVTDDIIAKIKHPSEFSMVFYTDGSAIKHPNVNKSHNAGMGIAQVQFKPEFTVINTWSIPLGDHTAQLAEVAAVEFACKKALKIDGPVLIVTDSFYVAESVNKELPYWQSNGFFNNKKKPLKHVSKWKSIADCIQLKPDIIIIHEKGHQPTASTFHTEGNNLADKLATQGSYVVNAGKRTADGSEFEKRTADGSEFESPKKKAKVE

SEQ ID NO: 6327 - protein, 2097 aa, synthetic construct
MPAAKRVKLDGGDKKYSIGLDIGTNSVGWAVITDEYKVPSKKFKVLGNTDRHSIKKNLIGALLFDSGETAEATRLKRTARRRYTRRKNRICYLQEIFSNEMAKVDDSFFHRLEESFLVEEDKKHERHPIFGNIVDEVAYHEKYPTIYHLRKKLVDSTDKADLRLIYLALAHMIKFRGHFLIEGDLNPDNSDVDKLFIQLVQTYNQLFEENPINASGVDAKAILSARLSKSRRLENLIAQLPGEKKNGLFGNLIALSLGLTPNFKSNFDLAEDAKLQLSKDTYDDDLDNLLAQIGDQYADLFLAAKNLSDAILLSDILRVNTEITKAPLSASMIKRYDEHHQDLTLLKALVRQQLPEKYKEIFFDQSKNGYAGYIDGGASQEEFYKFIKPILEKMDGTEELLVKLNREDLLRKQRTFDNGSIPHQIHLGELHAILRRQEDFYPFLKDNREKIEKILTFRIPYYVGPLARGNSRFAWMTRKSEETITPWNFEEVVDKGASAQSFIERMTNFDKNLPNEKVLPKHSLLYEYFTVYNELTKVKYVTEGMRKPAFLSGEQKKAIVDLLFKTNRKVTVKQLKEDYFKKIECFDSVEISGVEDRFNASLGTYHDLLKIIKDKDFLDNEENEDILEDIVLTLTLFEDREMIEERLKTYAHLFDDKVMKQLKRRRYTGWGRLSRKLINGIRDKQSGKTILDFLKSDGFANRNFMQLIHDDSLTFKEDIQKAQVSGQGDSLHEHIANLAGSPAIKKGILQTVKVVDELVKVMGRHKPENIVIEMARENQTTQKGQKNSRERMKRIEEGIKELGSQILKEHPVENTQLQNEKLYLYYLQNGRDMYVDQELDINRLSDYDVDHIVPQSFLKDDSIDNKVLTRSDKARGKSDNVPSEEVVKKMKNYWRQLLNAKLITQRKFDNLTKAERGGLSELDKAGFIKRQLVETRQITKHVAQILDSRMNTKYDENDKLIREVKVITLKSKLVSDFRKDFQFYKVREINNYHHAHDAYLNAVVGTALIKKYPKLESEFVYGDYKVYDVRKMIAKSEQEIGKATAKYFFYSNIMNFFKTEITLANGEIRKRPLIETNGETGEIVWDKGRDFATVRKVLSMPQVNIVKKTEVQTGGFSKESILPKRNSDKLIARKKDWDPKKYGGFDSPTVAYSVLVVAKVEKGKSKKLKSVKELLGITIMERSSFEKNPIDFLEAKGYKEVKKDLIIKLPKYSLFELENGRKRMLASAGELQKGNELALPSKYVNFLYLASHYEKLKGSPEDNEQKQLFVEQHKHYLDEIIEQISEFSKRVILADANLDKVLSAYNKHRDKPIREQAENIIHLFTLTNLGAPAAFKYFDTTIDRKRYTSTKEVLDATLIHQSITGLYETRIDLSQLGGDGGGSSGSSGSSGSSGGTLNIEDEYRLHETSKEPDVPLGSTWLSDFPQAWAETGGMGLAVRQAPLIIPLKATSTPVSIKQYPMSQEARLGIKPHIQRLLDQGILVPCQSPWNTPLLPVKKPGTNDYRPVQDLREVNKRVEDIHPTVPNPYNLLSGLPPSHQWYTVLDLKDAFFCLRLHPTSQPLFAFEWRDPEMGISGQLTWTRLPQGFKNSPTLFNEALHRDLADFRIQHPDLILLQYVDDLLLAATSEQDCQRGTRALLQTLGNLGYRASAKKAQICQKQVKYLGYLLKEGQRWLTEARKETVMGQPTPKTPRQLREFLGTAGFCRLWIPGFAEMAAPLYPLTKPGTLFNWGPDQQKAYQEIKQALLTAPALGLPDLTKPFELFVDEKQGYAKGVLTQKLGPWRRPVAYLSKKLDPVAAGWPPCLRMVAAIAVLTKDAGKLTMGQPLVILAPHAVEALVKQPPDRWLSNARMTHYQAMLLDTDRVQFGPVVALNPATLLPLPEKEAPHDCLEILAETHGTRPDLTDQPIPDADYTWYTDGSSFLQEGQRRAGAAVTTETEVIWARALPAGTSAQRAELIALTQALKMAEGKKLNVYTDSRYAFATAHVHGEIYRRRGWLTSEGREIKNKNEILALLKALFLPKRLSIIHCPGHQKGNSAEARGNRMADQAAREAAMKAVLETSTLLAGKRTADGSEFEKRTADGSEFESPKKKAKVE

SEQ ID NO: 6328 - protein, 2102 aa, synthetic construct
MPAAKRVKLDGGDKKYSIGLDIGTNSVGWAVITDEYKVPSKKFKVLGNTDRHSIKKNLIGALLFDSGETAEATRLKRTARRRYTRRKNRICYLQEIFSNEMAKVDDSFFHRLEESFLVEEDKKHERHPIFGNIVDEVAYHEKYPTIYHLRKKLVDSTDKADLRLIYLALAHMIKFRGHFLIEGDLNPDNSDVDKLFIQLVQTYNQLFEENPINASGVDAKAILSARLSKSRRLENLIAQLPGEKKNGLFGNLIALSLGLTPNFKSNFDLAEDAKLQLSKDTYDDDLDNLLAQIGDQYADLFLAAKNLSDAILLSDILRVNTEITKAPLSASMIKRYDEHHQDLTLLKALVRQQLPEKYKEIFFDQSKNGYAGYIDGGASQEEFYKFIKPILEKMDGTEELLVKLNREDLLRKQRTFDNGSIPHQIHLGELHAILRRQEDFYPFLKDNREKIEKILTFRIPYYVGPLARGNSRFAWMTRKSEETITPWNFEEVVDKGASAQSFIERMTNFDKNLPNEKVLPKHSLLYEYFTVYNELTKVKYVTEGMRKPAFLSGEQKKAIVDLLFKTNRKVTVKQLKEDYFKKIECFDSVEISGVEDRFNASLGTYHDLLKIIKDKDFLDNEENEDILEDIVLTLTLFEDREMIEERLKTYAHLFDDKVMKQLKRRRYTGWGRLSRKLINGIRDKQSGKTILDFLKSDGFANRNFMQLIHDDSLTFKEDIQKAQVSGQGDSLHEHIANLAGSPAIKKGILQTVKVVDELVKVMGRHKPENIVIEMARENQTTQKGQKNSRERMKRIEEGIKELGSQILKEHPVENTQLQNEKLYLYYLQNGRDMYVDQELDINRLSDYDVDHIVPQSFLKDDSIDNKVLTRSDKARGKSDNVPSEEVVKKMKNYWRQLLNAKLITQRKFDNLTKAERGGLSELDKAGFIKRQLVETRQITKHVAQILDSRMNTKYDENDKLIREVKVITLKSKLVSDFRKDFQFYKVREINNYHHAHDAYLNAVVGTALIKKYPKLESEFVYGDYKVYDVRKMIAKSEQEIGKATAKYFFYSNIMNFFKTEITLANGEIRKRPLIETNGETGEIVWDKGRDFATVRKVLSMPQVNIVKKTEVQTGGFSKESILPKRNSDKLIARKKDWDPKKYGGFDSPTVAYSVLVVAKVEKGKSKKLKSVKELLGITIMERSSFEKNPIDFLEAKGYKEVKKDLIIKLPKYSLFELENGRKRMLASAGELQKGNELALPSKYVNFLYLASHYEKLKGSPEDNEQKQLFVEQHKHYLDEIIEQISEFSKRVILADANLDKVLSAYNKHRDKPIREQAENIIHLFTLTNLGAPAAFKYFDTTIDRKRYTSTKEVLDATLIHQSITGLYETRIDLSQLGGDGGGSSGSSGSSGSSGSSGGTAPLEEEYRLFLEAPIQNVTLLEQWKREIPKVWAEINPPGLASTQAPIHVQLLSTALPVRVRQYPITLEAKRSLRETIRKFRAAGILRPVHSPWNTPLLPVRKSGTSEYRMVQDLREVNKRVETIHPTVPNPYTLLSLLPPDRIWYSVLDLKDAFFCIPLAPESQLIFAFEWADAEEGESGQLTWTRLPQGFKNSPTLFDEALNRDLQGFRLDHPSVSLLQYVDDLLIAADTQAACLSATRDLLMTLAELGYRVSGKKAQLCQEEVTYLGFKIHKGSRSLSNSRTQAILQIPVPKTKRQVREFLGTIGYCRLWIPGFAELAQPLYAATRGGNDPLVWGEKEEEAFQSLKLALTQPPALALPSLDKPFQLFVEETSGAAKGVLTQALGPWKRPVAYLSKRLDPVAAGWPRCLRAIAAAALLTREASKLTFGQDIEITSSHNLESLLRSPPDKWLTNARITQYQVLLLDPPRVRFKQTAALNPATLLPETDDTLPIHHCLDTLDSLTSTRPDLTDQPLAQAEATLFTDGSSYIRDGKRYAGAAVVTLDSVIWAEPLPIGTSAQKAELIALTKALEWSKDKSVNIYTDSRYAFATLHVHGMIYRERGLLTAGGKAIKNAPEILALLTAVWLPKRVAVMHCKGHQKDDAPTSTGNRRADEVAREVAIRPLSTQATISAGKRTADGSEFEKRTADGSEFESPKKKAKVE

SEQ ID NO: 6329 - protein, 2102 aa, synthetic construct
MPAAKRVKLDGGDKKYSIGLDIGTNSVGWAVITDEYKVPSKKFKVLGNTDRHSIKKNLIGALLFDSGETAEATRLKRTARRRYTRRKNRICYLQEIFSNEMAKVDDSFFHRLEESFLVEEDKKHERHPIFGNIVDEVAYHEKYPTIYHLRKKLVDSTDKADLRLIYLALAHMIKFRGHFLIEGDLNPDNSDVDKLFIQLVQTYNQLFEENPINASGVDAKAILSARLSKSRRLENLIAQLPGEKKNGLFGNLIALSLGLTPNFKSNFDLAEDAKLQLSKDTYDDDLDNLLAQIGDQYADLFLAAKNLSDAILLSDILRVNTEITKAPLSASMIKRYDEHHQDLTLLKALVRQQLPEKYKEIFFDQSKNGYAGYIDGGASQEEFYKFIKPILEKMDGTEELLVKLNREDLLRKQRTFDNGSIPHQIHLGELHAILRRQEDFYPFLKDNREKIEKILTFRIPYYVGPLARGNSRFAWMTRKSEETITPWNFEEVVDKGASAQSFIERMTNFDKNLPNEKVLPKHSLLYEYFTVYNELTKVKYVTEGMRKPAFLSGEQKKAIVDLLFKTNRKVTVKQLKEDYFKKIECFDSVEISGVEDRFNASLGTYHDLLKIIKDKDFLDNEENEDILEDIVLTLTLFEDREMIEERLKTYAHLFDDKVMKQLKRRRYTGWGRLSRKLINGIRDKQSGKTILDFLKSDGFANRNFMQLIHDDSLTFKEDIQKAQVSGQGDSLHEHIANLAGSPAIKKGILQTVKVVDELVKVMGRHKPENIVIEMARENQTTQKGQKNSRERMKRIEEGIKELGSQILKEHPVENTQLQNEKLYLYYLQNGRDMYVDQELDINRLSDYDVDHIVPQSFLKDDSIDNKVLTRSDKARGKSDNVPSEEVVKKMKNYWRQLLNAKLITQRKFDNLTKAERGGLSELDKAGFIKRQLVETRQITKHVAQILDSRMNTKYDENDKLIREVKVITLKSKLVSDFRKDFQFYKVREINNYHHAHDAYLNAVVGTALIKKYPKLESEFVYGDYKVYDVRKMIAKSEQEIGKATAKYFFYSNIMNFFKTEITLANGEIRKRPLIETNGETGEIVWDKGRDFATVRKVLSMPQVNIVKKTEVQTGGFSKESILPKRNSDKLIARKKDWDPKKYGGFDSPTVAYSVLVVAKVEKGKSKKLKSVKELLGITIMERSSFEKNPIDFLEAKGYKEVKKDLIIKLPKYSLFELENGRKRMLASAGELQKGNELALPSKYVNFLYLASHYEKLKGSPEDNEQKQLFVEQHKHYLDEIIEQISEFSKRVILADANLDKVLSAYNKHRDKPIREQAENIIHLFTLTNLGAPAAFKYFDTTIDRKRYTSTKEVLDATLIHQSITGLYETRIDLSQLGGDGGGSSGSSGSSGSSGSSGGTAPLEEEYRLFLEAPIQNVTLLEQWKREIPKVWAEINPPGLASTQAPIHVQLLSTALPVRVRQYPITLEAKRSLRETIRKFRAAGILRPVHSPWNTPLLPVRKSGTSEYRMVQDLREVNKRVETIHPTVPNPYTLLSLLPPDRIWYSVLDLKDAFFCIPLAPESQLIFAFEWADAEEGESGQLTWTRLPQGFKNSPTLFNEALNRDLQGFRLDHPSVSLLQYVDDLLIAADTQAACLSATRDLLMTLAELGYRVSGKKAQLCQEEVTYLGFKIHKGSRSLSNSRTQAILQIPVPKTKRQVREFLGKIGYCRLFIPGFAELAQPLYAATRPGNDPLVWGEKEEEAFQSLKLALTQPPALALPSLDKPFQLFVEETSGAAKGVLTQALGPWKRPVAYLSKRLDPVAAGWPRCLRAIAAAALLTREASKLTFGQDIEITSSHNLESLLRSPPDKWLTNARITQYQVLLLDPPRVRFKQTAALNPATLLPETDDTLPIHHCLDTLDSLTSTRPDLTDQPLAQAEATLFTDGSSYIRDGKRYAGAAVVTLDSVIWAEPLPIGTSAQKAELIALTKALEWSKDKSVNIYTDSRYAFATLHVHGMIYRERGWLTAGGKAIKNAPEILALLTAVWLPKRVAVMHCKGHQKDDAPTSTGNRRADEVAREVAIRPLSTQATISAGKRTADGSEFEKRTADGSEFESPKKKAKVE

SEQ ID NO: 6330 - protein, 2131 aa, synthetic construct
MPAAKRVKLDGGDKKYSIGLDIGTNSVGWAVITDEYKVPSKKFKVLGNTDRHSIKKNLIGALLFDSGETAEATRLKRTARRRYTRRKNRICYLQEIFSNEMAKVDDSFFHRLEESFLVEEDKKHERHPIFGNIVDEVAYHEKYPTIYHLRKKLVDSTDKADLRLIYLALAHMIKFRGHFLIEGDLNPDNSDVDKLFIQLVQTYNQLFEENPINASGVDAKAILSARLSKSRRLENLIAQLPGEKKNGLFGNLIALSLGLTPNFKSNFDLAEDAKLQLSKDTYDDDLDNLLAQIGDQYADLFLAAKNLSDAILLSDILRVNTEITKAPLSASMIKRYDEHHQDLTLLKALVRQQLPEKYKEIFFDQSKNGYAGYIDGGASQEEFYKFIKPILEKMDGTEELLVKLNREDLLRKQRTFDNGSIPHQIHLGELHAILRRQEDFYPFLKDNREKIEKILTFRIPYYVGPLARGNSRFAWMTRKSEETITPWNFEEVVDKGASAQSFIERMTNFDKNLPNEKVLPKHSLLYEYFTVYNELTKVKYVTEGMRKPAFLSGEQKKAIVDLLFKTNRKVTVKQLKEDYFKKIECFDSVEISGVEDRFNASLGTYHDLLKIIKDKDFLDNEENEDILEDIVLTLTLFEDREMIEERLKTYAHLFDDKVMKQLKRRRYTGWGRLSRKLINGIRDKQSGKTILDFLKSDGFANRNFMQLIHDDSLTFKEDIQKAQVSGQGDSLHEHIANLAGSPAIKKGILQTVKVVDELVKVMGRHKPENIVIEMARENQTTQKGQKNSRERMKRIEEGIKELGSQILKEHPVENTQLQNEKLYLYYLQNGRDMYVDQELDINRLSDYDVDHIVPQSFLKDDSIDNKVLTRSDKARGKSDNVPSEEVVKKMKNYWRQLLNAKLITQRKFDNLTKAERGGLSELDKAGFIKRQLVETRQITKHVAQILDSRMNTKYDENDKLIREVKVITLKSKLVSDFRKDFQFYKVREINNYHHAHDAYLNAVVGTALIKKYPKLESEFVYGDYKVYDVRKMIAKSEQEIGKATAKYFFYSNIMNFFKTEITLANGEIRKRPLIETNGETGEIVWDKGRDFATVRKVLSMPQVNIVKKTEVQTGGFSKESILPKRNSDKLIARKKDWDPKKYGGFDSPTVAYSVLVVAKVEKGKSKKLKSVKELLGITIMERSSFEKNPIDFLEAKGYKEVKKDLIIKLPKYSLFELENGRKRMLASAGELQKGNELALPSKYVNFLYLASHYEKLKGSPEDNEQKQLFVEQHKHYLDEIIEQISEFSKRVILADANLDKVLSAYNKHRDKPIREQAENIIHLFTLTNLGAPAAFKYFDTTIDRKRYTSTKEVLDATLIHQSITGLYETRIDLSQLGGDGGGSSGSSGSSGSSGSSGGLLGRDLLTKLKAQIQFSTEGPQVTWEDRPAMCLVLNLEEEYRLHEKPVPPSIDPSWLQLFPMVWAEKAGMGLANQVPPVVVELKSDASPVAVRQYPMSKEAREGIRPHIQRFLDLGILVPCQSPWNTPLLPVKKPGTNDYRPVQDLREVNKRVQDIHPTVPNPYNLLSSLPPSHTWYSVLDLKDAFFCLKLHPNSQPLFAFEWRDPEKGNTGQLTWTRLPQGFKNSPTLFDEALHRDLASFRALNPQVVMLQYVDDLLVAAPTYRDCKEGTRRLLQELSKLGYRVSAKKAQLCREEVTYLGYLLKGGKRWLTPARKATVMKIPTPTTPRQVREFLGTAGFCRLWIPGFASLAAPLYPLTREKVPFTWTEAHQEAFGRIKEALLSAPALALPDLTKPFALYVDEKEGVARGVLTQTLGPWRRPVAYLSKKLDPVASGWPTCLKAIAAVALLLKDADKLTLGQNVLVIAPHNLESIVRQPPDRWMTNARMTHYQSLLLNERVSFAPPAILNPATLLPVESDDTPIHICSEILAEETGTRPDLRDQPLPGVPAWYTDGSSFIMDGRRQAGAAIVDNKRTVWASNLPEGTSAQKAELIALTQALRLAEGKSINIYTDSRYAFATAHVHGAIYKQRGLLTSAGKDIKNKEEILALLEAIHLPKRVAIIHCPGHQRGTDPVATGNRKADEAAKQAAQSTRILTETTKNAGKRTADGSEFEKRTADGSEFESPKKKAKVE

SEQ ID NO: 6331 - protein, 2222 aa, synthetic construct
MPAAKRVKLDGGDKKYSIGLDIGTNSVGWAVITDEYKVPSKKFKVLGNTDRHSIKKNLIGALLFDSGETAEATRLKRTARRRYTRRKNRICYLQEIFSNEMAKVDDSFFHRLEESFLVEEDKKHERHPIFGNIVDEVAYHEKYPTIYHLRKKLVDSTDKADLRLIYLALAHMIKFRGHFLIEGDLNPDNSDVDKLFIQLVQTYNQLFEENPINASGVDAKAILSARLSKSRRLENLIAQLPGEKKNGLFGNLIALSLGLTPNFKSNFDLAEDAKLQLSKDTYDDDLDNLLAQIGDQYADLFLAAKNLSDAILLSDILRVNTEITKAPLSASMIKRYDEHHQDLTLLKALVRQQLPEKYKEIFFDQSKNGYAGYIDGGASQEEFYKFIKPILEKMDGTEELLVKLNREDLLRKQRTFDNGSIPHQIHLGELHAILRRQEDFYPFLKDNREKIEKILTFRIPYYVGPLARGNSRFAWMTRKSEETITPWNFEEVVDKGASAQSFIERMTNFDKNLPNEKVLPKHSLLYEYFTVYNELTKVKYVTEGMRKPAFLSGEQKKAIVDLLFKTNRKVTVKQLKEDYFKKIECFDSVEISGVEDRFNASLGTYHDLLKIIKDKDFLDNEENEDILEDIVLTLTLFEDREMIEERLKTYAHLFDDKVMKQLKRRRYTGWGRLSRKLINGIRDKQSGKTILDFLKSDGFANRNFMQLIHDDSLTFKEDIQKAQVSGQGDSLHEHIANLAGSPAIKKGILQTVKVVDELVKVMGRHKPENIVIEMARENQTTQKGQKNSRERMKRIEEGIKELGSQILKEHPVENTQLQNEKLYLYYLQNGRDMYVDQELDINRLSDYDVDHIVPQSFLKDDSIDNKVLTRSDKARGKSDNVPSEEVVKKMKNYWRQLLNAKLITQRKFDNLTKAERGGLSELDKAGFIKRQLVETRQITKHVAQILDSRMNTKYDENDKLIREVKVITLKSKLVSDFRKDFQFYKVREINNYHHAHDAYLNAVVGTALIKKYPKLESEFVYGDYKVYDVRKMIAKSEQEIGKATAKYFFYSNIMNFFKTEITLANGEIRKRPLIETNGETGEIVWDKGRDFATVRKVLSMPQVNIVKKTEVQTGGFSKESILPKRNSDKLIARKKDWDPKKYGGFDSPTVAYSVLVVAKVEKGKSKKLKSVKELLGITIMERSSFEKNPIDFLEAKGYKEVKKDLIIKLPKYSLFELENGRKRMLASAGELQKGNELALPSKYVNFLYLASHYEKLKGSPEDNEQKQLFVEQHKHYLDEIIEQISEFSKRVILADANLDKVLSAYNKHRDKPIREQAENIIHLFTLTNLGAPAAFKYFDTTIDRKRYTSTKEVLDATLIHQSITGLYETRIDLSQLGGDGGGSSGSSGSSGSSGSSGGTLGDQGSRGSDPLPEPRVTLTVEGIPTEFLVNTGAEHSVLTKPMGKMGSKRTVVAGATGSKVYPWTTKRLLKIGQKQVTHSFLVIPECPAPLLGRDLLTKLKAQIQFSTEGPQVTWEDRPAMCLVLNLEEEYRLHEKPVPPSIDPSWLQLFPMVWAEKAGMGLANQVPPVVVELKSDASPVAVRQYPMSKEAREGIRPHIQRFLDLGILVPCQSPWNTPLLPVKKPGTNDYRPVQDLREVNKRVQDIHPTVPNPYNLLSSLPPSHTWYSVLDLKDAFFCLKLHPNSQPLFAFEWRDPEKGNTGQLTWTRLPQGFKNSPTLFNEALHRDLASFRALNPQVVMLQYVDDLLVAAPTYRDCKEGTRRLLQELSKLGYRVSAKKAQLCREEVTYLGYLLKGGKRWLTPARKATVMKIPTPTTPRQVREFLGTAGFCRLWIPGFASLAAPLYPLTRPKVPFTWTEAHQEAFGRIKEALLSAPALALPDLTKPFALYVDEKEGVARGVLTQTLGPWRRPVAYLSKKLDPVASGWPTCLKAIAAVALLLKDADKLTLGQNVLVIAPHNLESIVRQPPDRWMTNARMTHYQSLLLNERVSFAPPAILNPATLLPVESDDTPIHICSEILAEETGTRPDLRDQPLPGVPAWYTDGSSFIMDGRRQAGAAIVDNKRTVWASNLPEGTSAQKAELIALTQALRLAEGKSINIYTDSRYAFATAHVHGAIYKQRGWLTSAGKDIKNKEEILALLEAIHLPKRVAIIHCPGHQRGTDPVATGNRKADEAAKQAAQSTRILTETTKNAGKRTADGSEFEKRTADGSEFESPKKKAKVE

SEQ ID NO: 6332 - protein, 2100 aa, synthetic construct
MPAAKRVKLDGGDKKYSIGLDIGTNSVGWAVITDEYKVPSKKFKVLGNTDRHSIKKNLIGALLFDSGETAEATRLKRTARRRYTRRKNRICYLQEIFSNEMAKVDDSFFHRLEESFLVEEDKKHERHPIFGNIVDEVAYHEKYPTIYHLRKKLVDSTDKADLRLIYLALAHMIKFRGHFLIEGDLNPDNSDVDKLFIQLVQTYNQLFEENPINASGVDAKAILSARLSKSRRLENLIAQLPGEKKNGLFGNLIALSLGLTPNFKSNFDLAEDAKLQLSKDTYDDDLDNLLAQIGDQYADLFLAAKNLSDAILLSDILRVNTEITKAPLSASMIKRYDEHHQDLTLLKALVRQQLPEKYKEIFFDQSKNGYAGYIDGGASQEEFYKFIKPILEKMDGTEELLVKLNREDLLRKQRTFDNGSIPHQIHLGELHAILRRQEDFYPFLKDNREKIEKILTFRIPYYVGPLARGNSRFAWMTRKSEETITPWNFEEVVDKGASAQSFIERMTNFDKNLPNEKVLPKHSLLYEYFTVYNELTKVKYVTEGMRKPAFLSGEQKKAIVDLLFKTNRKVTVKQLKEDYFKKIECFDSVEISGVEDRFNASLGTYHDLLKIIKDKDFLDNEENEDILEDIVLTLTLFEDREMIEERLKTYAHLFDDKVMKQLKRRRYTGWGRLSRKLINGIRDKQSGKTILDFLKSDGFANRNFMQLIHDDSLTFKEDIQKAQVSGQGDSLHEHIANLAGSPAIKKGILQTVKVVDELVKVMGRHKPENIVIEMARENQTTQKGQKNSRERMKRIEEGIKELGSQILKEHPVENTQLQNEKLYLYYLQNGRDMYVDQELDINRLSDYDVDHIVPQSFLKDDSIDNKVLTRSDKARGKSDNVPSEEVVKKMKNYWRQLLNAKLITQRKFDNLTKAERGGLSELDKAGFIKRQLVETRQITKHVAQILDSRMNTKYDENDKLIREVKVITLKSKLVSDFRKDFQFYKVREINNYHHAHDAYLNAVVGTALIKKYPKLESEFVYGDYKVYDVRKMIAKSEQEIGKATAKYFFYSNIMNFFKTEITLANGEIRKRPLIETNGETGEIVWDKGRDFATVRKVLSMPQVNIVKKTEVQTGGFSKESILPKRNSDKLIARKKDWDPKKYGGFDSPTVAYSVLVVAKVEKGKSKKLKSVKELLGITIMERSSFEKNPIDFLEAKGYKEVKKDLIIKLPKYSLFELENGRKRMLASAGELQKGNELALPSKYVNFLYLASHYEKLKGSPEDNEQKQLFVEQHKHYLDEIIEQISEFSKRVILADANLDKVLSAYNKHRDKPIREQAENIIHLFTLTNLGAPAAFKYFDTTIDRKRYTSTKEVLDATLIHQSITGLYETRIDLSQLGGDGGGSSGSSGSSGSSGSSGGTLNLEDEYRLYETSAEPEVSPGSTWLSDFPQAWAETGGMGLAVRQAPLIIPLKATSTPVSIKQYPMSQEAKLGIKPHIQRLLDQGILVPCQSPWNTPLLPVKKPGTNDYRPVQDLREVNKRVEDIHPTVPNPYNLLSGLPPSHRWYTVLDLKDAFFCLRLHPTSQPLFAFEWRDPGMGISGQLTWTRLPQGFKNSPTLFNEALHRDLADFRIQHPDLILLQYVDDILLAATSELDCQQGTRALLLTLGNLGYRASAKKAQLCQKQVKYLGYLLKEGQRWLTEARKETVMGQPTPKTPRQLREFLGTAGFCRLWIPGFAEMAAPLYPLTKPGTLFNWGPDQQKAYQEIKQALLTAPALGLPDLTKPFELFVDEKQGYAKGVLTQKLGPWRRPVAYLSKKLDPVAAGWPPCLRMVAAIAVLRKDAGKLTMGQPLVILAPHAVEALVKQPPDRWLSNARMTHYQAMLLDTDRVQFGPVVALNPATLLPLPEEGAPHDCLEILAETHGTRPDLTDQPIPDADHTWYTDGSSFLQEGQRKAGAAVTTETEVIWARALPAGTSAQRAELIALTQALKMAEGKRLNVYTDSRYAFATAHIHGEIYRRRGWLTSEGREIKNKSEILALLKALFLPKRLSIIHCLGHQKGDSAEARGNRLADQAAREAAIKTPPDTSTLLAGKRTADGSEFEKRTADGSEFESPKKKAKVE

SEQ ID NO: 6333 - protein, 2100 aa, synthetic construct
MPAAKRVKLDGGDKKYSIGLDIGTNSVGWAVITDEYKVPSKKFKVLGNTDRHSIKKNLIGALLFDSGETAEATRLKRTARRRYTRRKNRICYLQEIFSNEMAKVDDSFFHRLEESFLVEEDKKHERHPIFGNIVDEVAYHEKYPTIYHLRKKLVDSTDKADLRLIYLALAHMIKFRGHFLIEGDLNPDNSDVDKLFIQLVQTYNQLFEENPINASGVDAKAILSARLSKSRRLENLIAQLPGEKKNGLFGNLIALSLGLTPNFKSNFDLAEDAKLQLSKDTYDDDLDNLLAQIGDQYADLFLAAKNLSDAILLSDILRVNTEITKAPLSASMIKRYDEHHQDLTLLKALVRQQLPEKYKEIFFDQSKNGYAGYIDGGASQEEFYKFIKPILEKMDGTEELLVKLNREDLLRKQRTFDNGSIPHQIHLGELHAILRRQEDFYPFLKDNREKIEKILTFRIPYYVGPLARGNSRFAWMTRKSEETITPWNFEEVVDKGASAQSFIERMTNFDKNLPNEKVLPKHSLLYEYFTVYNELTKVKYVTEGMRKPAFLSGEQKKAIVDLLFKTNRKVTVKQLKEDYFKKIECFDSVEISGVEDRFNASLGTYHDLLKIIKDKDFLDNEENEDILEDIVLTLTLFEDREMIEERLKTYAHLFDDKVMKQLKRRRYTGWGRLSRKLINGIRDKQSGKTILDFLKSDGFANRNFMQLIHDDSLTFKEDIQKAQVSGQGDSLHEHIANLAGSPAIKKGILQTVKVVDELVKVMGRHKPENIVIEMARENQTTQKGQKNSRERMKRIEEGIKELGSQILKEHPVENTQLQNEKLYLYYLQNGRDMYVDQELDINRLSDYDVDHIVPQSFLKDDSIDNKVLTRSDKARGKSDNVPSEEVVKKMKNYWRQLLNAKLITQRKFDNLTKAERGGLSELDKAGFIKRQLVETRQITKHVAQILDSRMNTKYDENDKLIREVKVITLKSKLVSDFRKDFQFYKVREINNYHHAHDAYLNAVVGTALIKKYPKLESEFVYGDYKVYDVRKMIAKSEQEIGKATAKYFFYSNIMNFFKTEITLANGEIRKRPLIETNGETGEIVWDKGRDFATVRKVLSMPQVNIVKKTEVQTGGFSKESILPKRNSDKLIARKKDWDPKKYGGFDSPTVAYSVLVVAKVEKGKSKKLKSVKELLGITIMERSSFEKNPIDFLEAKGYKEVKKDLIIKLPKYSLFELENGRKRMLASAGELQKGNELALPSKYVNFLYLASHYEKLKGSPEDNEQKQLFVEQHKHYLDEIIEQISEFSKRVILADANLDKVLSAYNKHRDKPIREQAENIIHLFTLTNLGAPAAFKYFDTTIDRKRYTSTKEVLDATLIHQSITGLYETRIDLSQLGGDGGGSSGSSGSSGSSGSSGGTLGIEDEYRLHETSTEPDVSLGSTWLSDFPQAWAETGGMGLAVRQAPLIIPLKATSTPVSIQQYPMSHEARLGIKPHIQRLLDQGILVPCQSPWNTPLLPVKKPGTNDYRPVQDLREVNKRVEDIHPTVPNPYNLLSGLPPSHQWYTVLDLKDAFFCLRLHPTSQPLFAFEWRDPGMGISGQLTWTRLPQGFKNSPTLFNEALHRDLADFRIQHPDLILLQYVDDILLAATSELDCQQGTRALLQTLGDLGYRASAKKAQICQKQVKYLGYLLREGQRWLTEARKETVMGQPVPKTPRQLREFLGTAGFCRLWIPGFAEMAAPLYPLTKPGTLFSWGPDQQKAYQEIKQALLTAPALGLPDLTKPFELFVDEKQGYAKGVLTQKLGPWRRPVAYLSKKLDPVAAGWPPCLRMVAAIAVLTKDAGKLTMGQPLVILAPHAVEALVKQPPDRWLSNARMTHYQAMLLDTDRVQFGPVVALNPATLLPLPEEGAPHDCLEILAETHGTRPDLTDQPIPDADHTWYTDGSSFLQEGQRKAGAAVTTETEVIWAGALPAGTSAQRAELIALTQALKMAEGKRLNVYTDSRYAFATAHIHGEIYRRRGWLTSEGREIKNKSEILALLKALFLPKRLSIIHCLGHQKGDSAEARGNRLADQAAREAAIKTPPDTSTLLAGKRTADGSEFEKRTADGSEFESPKKKAKVE

SEQ ID NO: 6334 - protein, 2100 aa, synthetic construct
MPAAKRVKLDGGDKKYSIGLDIGTNSVGWAVITDEYKVPSKKFKVLGNTDRHSIKKNLIGALLFDSGETAEATRLKRTARRRYTRRKNRICYLQEIFSNEMAKVDDSFFHRLEESFLVEEDKKHERHPIFGNIVDEVAYHEKYPTIYHLRKKLVDSTDKADLRLIYLALAHMIKFRGHFLIEGDLNPDNSDVDKLFIQLVQTYNQLFEENPINASGVDAKAILSARLSKSRRLENLIAQLPGEKKNGLFGNLIALSLGLTPNFKSNFDLAEDAKLQLSKDTYDDDLDNLLAQIGDQYADLFLAAKNLSDAILLSDILRVNTEITKAPLSASMIKRYDEHHQDLTLLKALVRQQLPEKYKEIFFDQSKNGYAGYIDGGASQEEFYKFIKPILEKMDGTEELLVKLNREDLLRKQRTFDNGSIPHQIHLGELHAILRRQEDFYPFLKDNREKIEKILTFRIPYYVGPLARGNSRFAWMTRKSEETITPWNFEEVVDKGASAQSFIERMTNFDKNLPNEKVLPKHSLLYEYFTVYNELTKVKYVTEGMRKPAFLSGEQKKAIVDLLFKTNRKVTVKQLKEDYFKKIECFDSVEISGVEDRFNASLGTYHDLLKIIKDKDFLDNEENEDILEDIVLTLTLFEDREMIEERLKTYAHLFDDKVMKQLKRRRYTGWGRLSRKLINGIRDKQSGKTILDFLKSDGFANRNFMQLIHDDSLTFKEDIQKAQVSGQGDSLHEHIANLAGSPAIKKGILQTVKVVDELVKVMGRHKPENIVIEMARENQTTQKGQKNSRERMKRIEEGIKELGSQILKEHPVENTQLQNEKLYLYYLQNGRDMYVDQELDINRLSDYDVDHIVPQSFLKDDSIDNKVLTRSDKARGKSDNVPSEEVVKKMKNYWRQLLNAKLITQRKFDNLTKAERGGLSELDKAGFIKRQLVETRQITKHVAQILDSRMNTKYDENDKLIREVKVITLKSKLVSDFRKDFQFYKVREINNYHHAHDAYLNAVVGTALIKKYPKLESEFVYGDYKVYDVRKMIAKSEQEIGKATAKYFFYSNIMNFFKTEITLANGEIRKRPLIETNGETGEIVWDKGRDFATVRKVLSMPQVNIVKKTEVQTGGFSKESILPKRNSDKLIARKKDWDPKKYGGFDSPTVAYSVLVVAKVEKGKSKKLKSVKELLGITIMERSSFEKNPIDFLEAKGYKEVKKDLIIKLPKYSLFELENGRKRMLASAGELQKGNELALPSKYVNFLYLASHYEKLKGSPEDNEQKQLFVEQHKHYLDEIIEQISEFSKRVILADANLDKVLSAYNKHRDKPIREQAENIIHLFTLTNLGAPAAFKYFDTTIDRKRYTSTKEVLDATLIHQSITGLYETRIDLSQLGGDGGGSSGSSGSSGSSGSSGGTLNIEDEYRLHEISTEPDVSPGSTWLSDFPQAWAETGGMGLAVRQAPLIIPLKATSTPVSIKQYPMSQEAKLGIKPHIQRLLDQGILVPCQSPWNTPLLPVKKPGTNDYRPVQGLREVNKRVEDIHPTVPNPYNLLSGLPTSHRWYTVLDLKDAFFCLRLHPTSQPLFASEWRDPGMGISGQLTWTRLPQGFKNSPTLFDEALHRGLADFRIQHPDLILLQYVDDLLLAATSELDCQQGTRALLKTLGNLGYRASAKKAQICQKQVKYLGYLLREGQRWLTEARKETVMGQPTPKTPRQLREFLGTAGFCRLWIPRFAEMAAPLYPLTKTGTLFNWGPDQQKAYHEIKQALLTAPALGLPDLTKPFELFVDEKQGYAKGVLTQKLGPWRRPVAYLSKKLDPVAAGWPPCLRMVAAIAVLTKDAGKLTMGQPLVILAPHAVEALVKQPPDRWLSNARMTHYQAMLLDTDRVQFGPVVALNPATLLPLPEEGAPHDCLEILAETHGTEPDLTDQPIPDADHTWYTDGSSFLQEGQRKAGAAVTTETEVIWARALPAGTSAQRAELIALTQALKMAEGKRLNVYTDSRYAFATAHIHGEIYKRRGLLTSEGREIKNKSEILALLKALFLPKRLSIIHCLGHQKGDSAEARGNRLADQAAREAAIKTPPDTSTLLAGKRTADGSEFEKRTADGSEFESPKKKAKVE

SEQ ID NO: 6335 - protein, 2100 aa, synthetic construct
MPAAKRVKLDGGDKKYSIGLDIGTNSVGWAVITDEYKVPSKKFKVLGNTDRHSIKKNLIGALLFDSGETAEATRLKRTARRRYTRRKNRICYLQEIFSNEMAKVDDSFFHRLEESFLVEEDKKHERHPIFGNIVDEVAYHEKYPTIYHLRKKLVDSTDKADLRLIYLALAHMIKFRGHFLIEGDLNPDNSDVDKLFIQLVQTYNQLFEENPINASGVDAKAILSARLSKSRRLENLIAQLPGEKKNGLFGNLIALSLGLTPNFKSNFDLAEDAKLQLSKDTYDDDLDNLLAQIGDQYADLFLAAKNLSDAILLSDILRVNTEITKAPLSASMIKRYDEHHQDLTLLKALVRQQLPEKYKEIFFDQSKNGYAGYIDGGASQEEFYKFIKPILEKMDGTEELLVKLNREDLLRKQRTFDNGSIPHQIHLGELHAILRRQEDFYPFLKDNREKIEKILTFRIPYYVGPLARGNSRFAWMTRKSEETITPWNFEEVVDKGASAQSFIERMTNFDKNLPNEKVLPKHSLLYEYFTVYNELTKVKYVTEGMRKPAFLSGEQKKAIVDLLFKTNRKVTVKQLKEDYFKKIECFDSVEISGVEDRFNASLGTYHDLLKIIKDKDFLDNEENEDILEDIVLTLTLFEDREMIEERLKTYAHLFDDKVMKQLKRRRYTGWGRLSRKLINGIRDKQSGKTILDFLKSDGFANRNFMQLIHDDSLTFKEDIQKAQVSGQGDSLHEHIANLAGSPAIKKGILQTVKVVDELVKVMGRHKPENIVIEMARENQTTQKGQKNSRERMKRIEEGIKELGSQILKEHPVENTQLQNEKLYLYYLQNGRDMYVDQELDINRLSDYDVDHIVPQSFLKDDSIDNKVLTRSDKARGKSDNVPSEEVVKKMKNYWRQLLNAKLITQRKFDNLTKAERGGLSELDKAGFIKRQLVETRQITKHVAQILDSRMNTKYDENDKLIREVKVITLKSKLVSDFRKDFQFYKVREINNYHHAHDAYLNAVVGTALIKKYPKLESEFVYGDYKVYDVRKMIAKSEQEIGKATAKYFFYSNIMNFFKTEITLANGEIRKRPLIETNGETGEIVWDKGRDFATVRKVLSMPQVNIVKKTEVQTGGFSKESILPKRNSDKLIARKKDWDPKKYGGFDSPTVAYSVLVVAKVEKGKSKKLKSVKELLGITIMERSSFEKNPIDFLEAKGYKEVKKDLIIKLPKYSLFELENGRKRMLASAGELQKGNELALPSKYVNFLYLASHYEKLKGSPEDNEQKQLFVEQHKHYLDEIIEQISEFSKRVILADANLDKVLSAYNKHRDKPIREQAENIIHLFTLTNLGAPAAFKYFDTTIDRKRYTSTKEVLDATLIHQSITGLYETRIDLSQLGGDGGGSSGSSGSSGSSGSSGGTLNIEDEYRLHEISTEPDVSPGSTWLSDFPQAWAETGGMGLAVRQAPLIIPLKATSTPVSIKQYPMSQEAKLGIKPHIQRLLDQGILVPCQSPWNTPLLPVKKPGTNDYRPVQGLREVNKRVEDIHPTVPNPYNLLSGLPTSHRWYTVLDLKDAFFCLRLHPTSQPLFASEWRDPGMGISGQLTWTRLPQGFKNSPTLFNEALHRGLADFRIQHPDLILLQYVDDLLLAATSELDCQQGTRALLKTLGNLGYRASAKKAQICQKQVKYLGYLLREGQRWLTEARKETVMGQPTPKTPRQLREFLGTAGFCRLWIPRFAEMAAPLYPLTKPGTLFNWGPDQQKAYHEIKQALLTAPALGLPDLTKPFELFVDEKQGYAKGVLTQKLGPWRRPVAYLSKKLDPVAAGWPPCLRMVAAIAVLTKDAGKLTMGQPLVILAPHAVEALVKQPPDRWLSNARMTHYQAMLLDTDRVQFGPVVALNPATLLPLPEEGAPHDCLEILAETHGTEPDLTDQPIPDADHTWYTDGSSFLQEGQRKAGAAVTTETEVIWARALPAGTSAQRAELIALTQALKMAEGKRLNVYTDSRYAFATAHIHGEIYKRRGWLTSEGREIKNKSEILALLKALFLPKRLSIIHCLGHQKGDSAEARGNRLADQAAREAAIKTPPDTSTLLAGKRTADGSEFEKRTADGSEFESPKKKAKVE

SEQ ID NO: 6336 - protein, 2091 aa, synthetic construct
MPAAKRVKLDGGDKKYSIGLDIGTNSVGWAVITDEYKVPSKKFKVLGNTDRHSIKKNLIGALLFDSGETAEATRLKRTARRRYTRRKNRICYLQEIFSNEMAKVDDSFFHRLEESFLVEEDKKHERHPIFGNIVDEVAYHEKYPTIYHLRKKLVDSTDKADLRLIYLALAHMIKFRGHFLIEGDLNPDNSDVDKLFIQLVQTYNQLFEENPINASGVDAKAILSARLSKSRRLENLIAQLPGEKKNGLFGNLIALSLGLTPNFKSNFDLAEDAKLQLSKDTYDDDLDNLLAQIGDQYADLFLAAKNLSDAILLSDILRVNTEITKAPLSASMIKRYDEHHQDLTLLKALVRQQLPEKYKEIFFDQSKNGYAGYIDGGASQEEFYKFIKPILEKMDGTEELLVKLNREDLLRKQRTFDNGSIPHQIHLGELHAILRRQEDFYPFLKDNREKIEKILTFRIPYYVGPLARGNSRFAWMTRKSEETITPWNFEEVVDKGASAQSFIERMTNFDKNLPNEKVLPKHSLLYEYFTVYNELTKVKYVTEGMRKPAFLSGEQKKAIVDLLFKTNRKVTVKQLKEDYFKKIECFDSVEISGVEDRFNASLGTYHDLLKIIKDKDFLDNEENEDILEDIVLTLTLFEDREMIEERLKTYAHLFDDKVMKQLKRRRYTGWGRLSRKLINGIRDKQSGKTILDFLKSDGFANRNFMQLIHDDSLTFKEDIQKAQVSGQGDSLHEHIANLAGSPAIKKGILQTVKVVDELVKVMGRHKPENIVIEMARENQTTQKGQKNSRERMKRIEEGIKELGSQILKEHPVENTQLQNEKLYLYYLQNGRDMYVDQELDINRLSDYDVDHIVPQSFLKDDSIDNKVLTRSDKARGKSDNVPSEEVVKKMKNYWRQLLNAKLITQRKFDNLTKAERGGLSELDKAGFIKRQLVETRQITKHVAQILDSRMNTKYDENDKLIREVKVITLKSKLVSDFRKDFQFYKVREINNYHHAHDAYLNAVVGTALIKKYPKLESEFVYGDYKVYDVRKMIAKSEQEIGKATAKYFFYSNIMNFFKTEITLANGEIRKRPLIETNGETGEIVWDKGRDFATVRKVLSMPQVNIVKKTEVQTGGFSKESILPKRNSDKLIARKKDWDPKKYGGFDSPTVAYSVLVVAKVEKGKSKKLKSVKELLGITIMERSSFEKNPIDFLEAKGYKEVKKDLIIKLPKYSLFELENGRKRMLASAGELQKGNELALPSKYVNFLYLASHYEKLKGSPEDNEQKQLFVEQHKHYLDEIIEQISEFSKRVILADANLDKVLSAYNKHRDKPIREQAENIIHLFTLTNLGAPAAFKYFDTTIDRKRYTSTKEVLDATLIHQSITGLYETRIDLSQLGGDGGGSSGSSGSSGSSGSSGGIPWLMKKPLQLTTLVPLQEYEERLLKQTMLTGSYKEKLQSLFLKYDALWQHWENQVGHRRIKPHHIATGTVNPRPQKQYPINPKAKASIQTVINDLLKQGVLIQQNSIMNTPVYPVPKPDGKWRMVLDYREVNKTIPLIAAQNQHSAGILSSIFRGKYKTTLDLSNGFWAHSITPESYWLTAFTWLGQQYCWTRLPQGFLNSPALFNADVVDLLKEVPNVQVYVDDIYISHDDPREHLEQLEKVFSLLLNAGYVVSLKKSEIAQHEVEFLGFNITKEGRGLTETFKQKLLNITPPRDLKQLQSILGKLNFARNFIPNFSELVKPLYNIIATAPGKYITWTTDNSQQLQNIISMLNSAENLEERNPEVRLIMKVNTSPSAGYIRFYNEFAKRPIMYLNYVYTKAEVKFTNTEKLLTTIHKGLIKALDLGMGQEILVYSPIVSMTKIQKTPLPERKALPIRWITWMSYLEDPRIQFHYDKTLPELQQVPTVTDDIIAKIKHPSEFSMVFYTDGSAIKHPNVNKSHNAGMGIAQVQFKPEFTVINTWSIPLGDHTAQLAEVAAVEFACKKALKIDGPVLIVTDSFYVAESVNKELPYWQSNGFFNNKKKPLKHVSKWKSIADCIQLKPDIIIIHEKGHQPTASTFHTEGNNLADKLATQGSYVVNAGKRTADGSEFEKRTADGSEFESPKKKAKVE

SEQ ID NO: 6337 - protein, 2105 aa, synthetic construct
MPAAKRVKLDGGDKKYSIGLDIGTNSVGWAVITDEYKVPSKKFKVLGNTDRHSIKKNLIGALLFDSGETAEATRLKRTARRRYTRRKNRICYLQEIFSNEMAKVDDSFFHRLEESFLVEEDKKHERHPIFGNIVDEVAYHEKYPTIYHLRKKLVDSTDKADLRLIYLALAHMIKFRGHFLIEGDLNPDNSDVDKLFIQLVQTYNQLFEENPINASGVDAKAILSARLSKSRRLENLIAQLPGEKKNGLFGNLIALSLGLTPNFKSNFDLAEDAKLQLSKDTYDDDLDNLLAQIGDQYADLFLAAKNLSDAILLSDILRVNTEITKAPLSASMIKRYDEHHQDLTLLKALVRQQLPEKYKEIFFDQSKNGYAGYIDGGASQEEFYKFIKPILEKMDGTEELLVKLNREDLLRKQRTFDNGSIPHQIHLGELHAILRRQEDFYPFLKDNREKIEKILTFRIPYYVGPLARGNSRFAWMTRKSEETITPWNFEEVVDKGASAQSFIERMTNFDKNLPNEKVLPKHSLLYEYFTVYNELTKVKYVTEGMRKPAFLSGEQKKAIVDLLFKTNRKVTVKQLKEDYFKKIECFDSVEISGVEDRFNASLGTYHDLLKIIKDKDFLDNEENEDILEDIVLTLTLFEDREMIEERLKTYAHLFDDKVMKQLKRRRYTGWGRLSRKLINGIRDKQSGKTILDFLKSDGFANRNFMQLIHDDSLTFKEDIQKAQVSGQGDSLHEHIANLAGSPAIKKGILQTVKVVDELVKVMGRHKPENIVIEMARENQTTQKGQKNSRERMKRIEEGIKELGSQILKEHPVENTQLQNEKLYLYYLQNGRDMYVDQELDINRLSDYDVDHIVPQSFLKDDSIDNKVLTRSDKARGKSDNVPSEEVVKKMKNYWRQLLNAKLITQRKFDNLTKAERGGLSELDKAGFIKRQLVETRQITKHVAQILDSRMNTKYDENDKLIREVKVITLKSKLVSDFRKDFQFYKVREINNYHHAHDAYLNAVVGTALIKKYPKLESEFVYGDYKVYDVRKMIAKSEQEIGKATAKYFFYSNIMNFFKTEITLANGEIRKRPLIETNGETGEIVWDKGRDFATVRKVLSMPQVNIVKKTEVQTGGFSKESILPKRNSDKLIARKKDWDPKKYGGFDSPTVAYSVLVVAKVEKGKSKKLKSVKELLGITIMERSSFEKNPIDFLEAKGYKEVKKDLIIKLPKYSLFELENGRKRMLASAGELQKGNELALPSKYVNFLYLASHYEKLKGSPEDNEQKQLFVEQHKHYLDEIIEQISEFSKRVILADANLDKVLSAYNKHRDKPIREQAENIIHLFTLTNLGAPAAFKYFDTTIDRKRYTSTKEVLDATLIHQSITGLYETRIDLSQLGGDGGGSSGSSGSSGSSGSSGSSGGTAPLEEEYRLFLEAPIQNVTLLEQWKREIPKVWAEINPPGLASTQAPIHVQLLSTALPVRVRQYPITLEAKRSLRETIRKFRAAGILRPVHSPWNTPLLPVRKSGTSEYRMVQDLREVNKRVETIHPTVPNPYTLLSLLPPDRIWYSVLDLKDAFFCIPLAPESQLIFAFEWADAEEGESGQLTWTRLPQGFKNSPTLFDEALNRDLQGFRLDHPSVSLLQYVDDLLIAADTQAACLSATRDLLMTLAELGYRVSGKKAQLCQEEVTYLGFKIHKGSRSLSNSRTQAILQIPVPKTKRQVREFLGTIGYCRLWIPGFAELAQPLYAATRGGNDPLVWGEKEEEAFQSLKLALTQPPALALPSLDKPFQLFVEETSGAAKGVLTQALGPWKRPVAYLSKRLDPVAAGWPRCLRAIAAAALLTREASKLTFGQDIEITSSHNLESLLRSPPDKWLTNARITQYQVLLLDPPRVRFKQTAALNPATLLPETDDTLPIHHCLDTLDSLTSTRPDLTDQPLAQAEATLFTDGSSYIRDGKRYAGAAVVTLDSVIWAEPLPIGTSAQKAELIALTKALEWSKDKSVNIYTDSRYAFATLHVHGMIYRERGLLTAGGKAIKNAPEILALLTAVWLPKRVAVMHCKGHQKDDAPTSTGNRRADEVAREVAIRPLSTQATISAGKRTADGSEFEKRTADGSEFESPKKKAKVE

SEQ ID NO: 6338 - protein, 2180 aa, synthetic construct
MPAAKRVKLDGGDKKYSIGLDIGTNSVGWAVITDEYKVPSKKFKVLGNTDRHSIKKNLIGALLFDSGETAEATRLKRTARRRYTRRKNRICYLQEIFSNEMAKVDDSFFHRLEESFLVEEDKKHERHPIFGNIVDEVAYHEKYPTIYHLRKKLVDSTDKADLRLIYLALAHMIKFRGHFLIEGDLNPDNSDVDKLFIQLVQTYNQLFEENPINASGVDAKAILSARLSKSRRLENLIAQLPGEKKNGLFGNLIALSLGLTPNFKSNFDLAEDAKLQLSKDTYDDDLDNLLAQIGDQYADLFLAAKNLSDAILLSDILRVNTEITKAPLSASMIKRYDEHHQDLTLLKALVRQQLPEKYKEIFFDQSKNGYAGYIDGGASQEEFYKFIKPILEKMDGTEELLVKLNREDLLRKQRTFDNGSIPHQIHLGELHAILRRQEDFYPFLKDNREKIEKILTFRIPYYVGPLARGNSRFAWMTRKSEETITPWNFEEVVDKGASAQSFIERMTNFDKNLPNEKVLPKHSLLYEYFTVYNELTKVKYVTEGMRKPAFLSGEQKKAIVDLLFKTNRKVTVKQLKEDYFKKIECFDSVEISGVEDRFNASLGTYHDLLKIIKDKDFLDNEENEDILEDIVLTLTLFEDREMIEERLKTYAHLFDDKVMKQLKRRRYTGWGRLSRKLINGIRDKQSGKTILDFLKSDGFANRNFMQLIHDDSLTFKEDIQKAQVSGQGDSLHEHIANLAGSPAIKKGILQTVKVVDELVKVMGRHKPENIVIEMARENQTTQKGQKNSRERMKRIEEGIKELGSQILKEHPVENTQLQNEKLYLYYLQNGRDMYVDQELDINRLSDYDVDHIVPQSFLKDDSIDNKVLTRSDKARGKSDNVPSEEVVKKMKNYWRQLLNAKLITQRKFDNLTKAERGGLSELDKAGFIKRQLVETRQITKHVAQILDSRMNTKYDENDKLIREVKVITLKSKLVSDFRKDFQFYKVREINNYHHAHDAYLNAVVGTALIKKYPKLESEFVYGDYKVYDVRKMIAKSEQEIGKATAKYFFYSNIMNFFKTEITLANGEIRKRPLIETNGETGEIVWDKGRDFATVRKVLSMPQVNIVKKTEVQTGGFSKESILPKRNSDKLIARKKDWDPKKYGGFDSPTVAYSVLVVAKVEKGKSKKLKSVKELLGITIMERSSFEKNPIDFLEAKGYKEVKKDLIIKLPKYSLFELENGRKRMLASAGELQKGNELALPSKYVNFLYLASHYEKLKGSPEDNEQKQLFVEQHKHYLDEIIEQISEFSKRVILADANLDKVLSAYNKHRDKPIREQAENIIHLFTLTNLGAPAAFKYFDTTIDRKRYTSTKEVLDATLIHQSITGLYETRIDLSQLGGDGGGSSGSSGSSGSSGSSGSSGGMDLLKPLTVERKGVKIKGYWNSQADITCVPKDLLQGEEPVRQQNVTTIHGTQEGDVYYVNLKIDGRRINTEVIGTTLDYAIITPGDVPWILKKPLELTIKLDLEEQQGTLLNNSILSKKGKEELKQLFEKYSALWQSWENQVGHRRIRPHKIATGTVKPTPQKQYHINPKAKPDIQIVINDLLKQGVLIQKESTMNTPVYPVPKPNGRWRMVLDYRAVNKVTPLIAVQNQHSYGILGSLFKGRYKTTIDLSNGFWAHPIVPEDYWITAFTWQGKQYCWTVLPQGFLNSPGLFNGDVVDLLQGIPNVEVYVDDVYISHDSEKEHLEYLDILFNRLKEAGYIISLKKSNIANSIVDFLGFQITNEGRGLTDTFKEKLENITAPTTLKQLQSILGLLNFARNFIPDFTELIAPLYALIPKSPKNYVPWQIEHSTTLETLITKLNGAEYLQGRKGDKTLIMKVNASYTTGYIRYYNEGEKKPISYVSIVFSKTELKFTELEKLLTTVHKGLLKALDLSMGQNIHVYSPIVSMQNIQKTPQTAKKALASRWLSWLSYLEDPRIRFFYDPQMPALKDLPAVDTGKDNKKHPSNFQHIFYTDGSAITSPTKEGHLNAGMGIVYFINKDGNLQKQQEWSISLGNHTAQFAEIAAFEFALKKCLPLGGNILVVTDSNYVAKAYNEELDVWASNGFVNNRKKPLKHISKWKSVADLKRLRPDVVVTHEPGHQKLDSSPHAYGNNLADQLATQASFKVHAGKRTADGSEFEKRTADGSEFESPKKKAKVE

SEQ ID NO: 6339 - protein, 2102 aa, synthetic construct
MPAAKRVKLDGGDKKYSIGLDIGTNSVGWAVITDEYKVPSKKFKVLGNTDRHSIKKNLIGALLFDSGETAEATRLKRTARRRYTRRKNRICYLQEIFSNEMAKVDDSFFHRLEESFLVEEDKKHERHPIFGNIVDEVAYHEKYPTIYHLRKKLVDSTDKADLRLIYLALAHMIKFRGHFLIEGDLNPDNSDVDKLFIQLVQTYNQLFEENPINASGVDAKAILSARLSKSRRLENLIAQLPGEKKNGLFGNLIALSLGLTPNFKSNFDLAEDAKLQLSKDTYDDDLDNLLAQIGDQYADLFLAAKNLSDAILLSDILRVNTEITKAPLSASMIKRYDEHHQDLTLLKALVRQQLPEKYKEIFFDQSKNGYAGYIDGGASQEEFYKFIKPILEKMDGTEELLVKLNREDLLRKQRTFDNGSIPHQIHLGELHAILRRQEDFYPFLKDNREKIEKILTFRIPYYVGPLARGNSRFAWMTRKSEETITPWNFEEVVDKGASAQSFIERMTNFDKNLPNEKVLPKHSLLYEYFTVYNELTKVKYVTEGMRKPAFLSGEQKKAIVDLLFKTNRKVTVKQLKEDYFKKIECFDSVEISGVEDRFNASLGTYHDLLKIIKDKDFLDNEENEDILEDIVLTLTLFEDREMIEERLKTYAHLFDDKVMKQLKRRRYTGWGRLSRKLINGIRDKQSGKTILDFLKSDGFANRNFMQLIHDDSLTFKEDIQKAQVSGQGDSLHEHIANLAGSPAIKKGILQTVKVVDELVKVMGRHKPENIVIEMARENQTTQKGQKNSRERMKRIEEGIKELGSQILKEHPVENTQLQNEKLYLYYLQNGRDMYVDQELDINRLSDYDVDHIVPQSFLKDDSIDNKVLTRSDKARGKSDNVPSEEVVKKMKNYWRQLLNAKLITQRKFDNLTKAERGGLSELDKAGFIKRQLVETRQITKHVAQILDSRMNTKYDENDKLIREVKVITLKSKLVSDFRKDFQFYKVREINNYHHAHDAYLNAVVGTALIKKYPKLESEFVYGDYKVYDVRKMIAKSEQEIGKATAKYFFYSNIMNFFKTEITLANGEIRKRPLIETNGETGEIVWDKGRDFATVRKVLSMPQVNIVKKTEVQTGGFSKESILPKRNSDKLIARKKDWDPKKYGGFDSPTVAYSVLVVAKVEKGKSKKLKSVKELLGITIMERSSFEKNPIDFLEAKGYKEVKKDLIIKLPKYSLFELENGRKRMLASAGELQKGNELALPSKYVNFLYLASHYEKLKGSPEDNEQKQLFVEQHKHYLDEIIEQISEFSKRVILADANLDKVLSAYNKHRDKPIREQAENIIHLFTLTNLGAPAAFKYFDTTIDRKRYTSTKEVLDATLIHQSITGLYETRIDLSQLGGDGGGSSGSSGSSGSSGSSGSSGGTLQLEEEYRLFEPESTQKQEMDIWLKNFPQAWAETGGMGTAHCQAPVLIQLKATATPISIRQYPMPHEAYQGIKPHIRRMLDQGILKPCQSPWNTPLLPVKKPGTEDYRPVQDLREVNKRVEDIHPTVPNPYNLLSTLPPSHPWYTVLDLKDAFFCLRLHSESQLLFAFEWRDPEIGLSGQLTWTRLPQGFKNSPTLFNEALHSDLADFRVRYPALVLLQYVDDLLLAAATRTECLEGTKALLETLGNKGYRASAKKAQICLQEVTYLGYSLKDGQRWLTKARKEAILSIPVPKNSRQVREFLGTAGYCRLWIPGFAELAAPLYPLTRPGTLFQWGTEQQLAFEDIKKALLSSPALGLPDITKPFELFIDENSGFAKGVLVQKLGPWKRPVAYLSKKLDTVASGWPPCLRMVAAIAILVKDAGKLTLGQPLTILTSHPVEALVRQPPNKWLSNARMTHYQAMLLDAERVHFGPTVSLNPATLLPLPSGGNHHDCLQILAETHGTRPDLTDQPLPDADLTWYTDGSSFIRNGEREAGAAVTTESEVIWAAPLPPGTSAQRAELIALTQALKMAEGKKLTVYTDSRYAFATTHVHGEIYRRRGWLTSEGKEIKNKNEILALLEALFLPKRLSIIHCPGHQKGDSPQAKGNRLADDTAKKAATETHSSLTVLPAGKRTADGSEFEKRTADGSEFESPKKKAKVE

SEQ ID NO: 6340 - protein, 2094 aa, synthetic construct
MPAAKRVKLDGGDKKYSIGLDIGTNSVGWAVITDEYKVPSKKFKVLGNTDRHSIKKNLIGALLFDSGETAEATRLKRTARRRYTRRKNRICYLQEIFSNEMAKVDDSFFHRLEESFLVEEDKKHERHPIFGNIVDEVAYHEKYPTIYHLRKKLVDSTDKADLRLIYLALAHMIKFRGHFLIEGDLNPDNSDVDKLFIQLVQTYNQLFEENPINASGVDAKAILSARLSKSRRLENLIAQLPGEKKNGLFGNLIALSLGLTPNFKSNFDLAEDAKLQLSKDTYDDDLDNLLAQIGDQYADLFLAAKNLSDAILLSDILRVNTEITKAPLSASMIKRYDEHHQDLTLLKALVRQQLPEKYKEIFFDQSKNGYAGYIDGGASQEEFYKFIKPILEKMDGTEELLVKLNREDLLRKQRTFDNGSIPHQIHLGELHAILRRQEDFYPFLKDNREKIEKILTFRIPYYVGPLARGNSRFAWMTRKSEETITPWNFEEVVDKGASAQSFIERMTNFDKNLPNEKVLPKHSLLYEYFTVYNELTKVKYVTEGMRKPAFLSGEQKKAIVDLLFKTNRKVTVKQLKEDYFKKIECFDSVEISGVEDRFNASLGTYHDLLKIIKDKDFLDNEENEDILEDIVLTLTLFEDREMIEERLKTYAHLFDDKVMKQLKRRRYTGWGRLSRKLINGIRDKQSGKTILDFLKSDGFANRNFMQLIHDDSLTFKEDIQKAQVSGQGDSLHEHIANLAGSPAIKKGILQTVKVVDELVKVMGRHKPENIVIEMARENQTTQKGQKNSRERMKRIEEGIKELGSQILKEHPVENTQLQNEKLYLYYLQNGRDMYVDQELDINRLSDYDVDHIVPQSFLKDDSIDNKVLTRSDKARGKSDNVPSEEVVKKMKNYWRQLLNAKLITQRKFDNLTKAERGGLSELDKAGFIKRQLVETRQITKHVAQILDSRMNTKYDENDKLIREVKVITLKSKLVSDFRKDFQFYKVREINNYHHAHDAYLNAVVGTALIKKYPKLESEFVYGDYKVYDVRKMIAKSEQEIGKATAKYFFYSNIMNFFKTEITLANGEIRKRPLIETNGETGEIVWDKGRDFATVRKVLSMPQVNIVKKTEVQTGGFSKESILPKRNSDKLIARKKDWDPKKYGGFDSPTVAYSVLVVAKVEKGKSKKLKSVKELLGITIMERSSFEKNPIDFLEAKGYKEVKKDLIIKLPKYSLFELENGRKRMLASAGELQKGNELALPSKYVNFLYLASHYEKLKGSPEDNEQKQLFVEQHKHYLDEIIEQISEFSKRVILADANLDKVLSAYNKHRDKPIREQAENIIHLFTLTNLGAPAAFKYFDTTIDRKRYTSTKEVLDATLIHQSITGLYETRIDLSQLGGDGGGSSGSSGSSGSSGSSGSSGGVPWLTQQPLQLTILVPLQEYQEKILSKTALPEDQKQQLKTLFVKYDNLWQHWENQVGHRKIRPHNIATGDYPPRPQKQYPINPKAKPSIQIVIDDLLKQGVLTPQNSTMNTPVYPVPKPDGRWRMVLDYREVNKTIPLTAAQNQHSAGILATIVRQKYKTTLDLANGFWAHPITPESYWLTAFTWQGKQYCWTRLPQGFLNSPALFNADVVDLLKEIPNVQVYVDDIYLSHDDPKEHVQQLEKVFQILLQAGYVVSLKKSEIGQKTVEFLGFNITKEGRGLTDTFKTKLLNITPPKDLKQLQSILGLLNFARNFIPNFAELVQPLYNLIAPAKGKYIEWSEENTKQLNMVIEALNTASNLEERLPEQRLVIKVNTSPSAGYVRYYNETGKKPIMYLNYVFSKAELKFSMLEKLLTTMHKALIKAMDLAMGQEILVYSPIVSMTKIQKTPLPERKALPIRWITWMTYLEDPRIQFHYDKTLPELKHIPDVYTSSQSPVKHPSQYEGVFYTDGSAIKSPDPTKSNNAGMGIVHATYKPEYQVLNQWSIPLGNHTAQMAEIAAVEFACKKALKIPGPVLVITDSFYVAESANKELPYWKSNGFVNNKKKPLKHISKWKSIAECLSMKPDITIQHEKGISLQIPVFILKGNALADKLATQGSYVVNAGKRTADGSEFEKRTADGSEFESPKKKAKVE

SEQ ID NO: 6341 - protein, 2094 aa, synthetic construct
MPAAKRVKLDGGDKKYSIGLDIGTNSVGWAVITDEYKVPSKKFKVLGNTDRHSIKKNLIGALLFDSGETAEATRLKRTARRRYTRRKNRICYLQEIFSNEMAKVDDSFFHRLEESFLVEEDKKHERHPIFGNIVDEVAYHEKYPTIYHLRKKLVDSTDKADLRLIYLALAHMIKFRGHFLIEGDLNPDNSDVDKLFIQLVQTYNQLFEENPINASGVDAKAILSARLSKSRRLENLIAQLPGEKKNGLFGNLIALSLGLTPNFKSNFDLAEDAKLQLSKDTYDDDLDNLLAQIGDQYADLFLAAKNLSDAILLSDILRVNTEITKAPLSASMIKRYDEHHQDLTLLKALVRQQLPEKYKEIFFDQSKNGYAGYIDGGASQEEFYKFIKPILEKMDGTEELLVKLNREDLLRKQRTFDNGSIPHQIHLGELHAILRRQEDFYPFLKDNREKIEKILTFRIPYYVGPLARGNSRFAWMTRKSEETITPWNFEEVVDKGASAQSFIERMTNFDKNLPNEKVLPKHSLLYEYFTVYNELTKVKYVTEGMRKPAFLSGEQKKAIVDLLFKTNRKVTVKQLKEDYFKKIECFDSVEISGVEDRFNASLGTYHDLLKIIKDKDFLDNEENEDILEDIVLTLTLFEDREMIEERLKTYAHLFDDKVMKQLKRRRYTGWGRLSRKLINGIRDKQSGKTILDFLKSDGFANRNFMQLIHDDSLTFKEDIQKAQVSGQGDSLHEHIANLAGSPAIKKGILQTVKVVDELVKVMGRHKPENIVIEMARENQTTQKGQKNSRERMKRIEEGIKELGSQILKEHPVENTQLQNEKLYLYYLQNGRDMYVDQELDINRLSDYDVDHIVPQSFLKDDSIDNKVLTRSDKARGKSDNVPSEEVVKKMKNYWRQLLNAKLITQRKFDNLTKAERGGLSELDKAGFIKRQLVETRQITKHVAQILDSRMNTKYDENDKLIREVKVITLKSKLVSDFRKDFQFYKVREINNYHHAHDAYLNAVVGTALIKKYPKLESEFVYGDYKVYDVRKMIAKSEQEIGKATAKYFFYSNIMNFFKTEITLANGEIRKRPLIETNGETGEIVWDKGRDFATVRKVLSMPQVNIVKKTEVQTGGFSKESILPKRNSDKLIARKKDWDPKKYGGFDSPTVAYSVLVVAKVEKGKSKKLKSVKELLGITIMERSSFEKNPIDFLEAKGYKEVKKDLIIKLPKYSLFELENGRKRMLASAGELQKGNELALPSKYVNFLYLASHYEKLKGSPEDNEQKQLFVEQHKHYLDEIIEQISEFSKRVILADANLDKVLSAYNKHRDKPIREQAENIIHLFTLTNLGAPAAFKYFDTTIDRKRYTSTKEVLDATLIHQSITGLYETRIDLSQLGGDGGGSSGSSGSSGSSGSSGSSGGVPWLTQQPLQLTILVPLQEYQEKILSKTALPEDQKQQLKTLFVKYDNLWQHWENQVGHRKIRPHNIATGDYPPRPQKQYPINPKAKPSIQIVIDDLLKQGVLTPQNSTMNTPVYPVPKPDGRWRMVLDYREVNKTIPLTAAQNQHSAGILATIVRQKYKTTLDLANGFWAHPITPESYWLTAFTWQGKQYCWTRLPQGFLNSPALFNADVVDLLKEIPNVQVYVDDIYLSHDDPKEHVQQLEKVFQILLQAGYVVSLKKSEIGQKTVEFLGFNITKEGRGLTDTFKTKLLNITPPKDLKQLQSILGKLNFARNFIPNFAELVQPLYNLIAPAKGKYIEWSEENTKQLNMVIEALNTASNLEERLPEQRLVIKVNTSPSAGYVRYYNETGKKPIMYLNYVFSKAELKFSMLEKLLTTMHKALIKAMDLAMGQEILVYSPIVSMTKIQKTPLPERKALPIRWITWMTYLEDPRIQFHYDKTLPELKHIPDVYTSSQSPVKHPSQYEGVFYTDGSAIKSPDPTKSNNAGMGIVHATYKPEYQVLNQWSIPLGNHTAQMAEIAAVEFACKKALKIPGPVLVITDSFYVAESANKELPYWKSNGFVNNKKKPLKHISKWKSIAECLSMKPDITIQHEKGISLQIPVFILKGNALADKLATQGSYVVNAGKRTADGSEFEKRTADGSEFESPKKKAKVE

SEQ ID NO: 6342 - protein, 2183 aa, synthetic construct
MPAAKRVKLDGGDKKYSIGLDIGTNSVGWAVITDEYKVPSKKFKVLGNTDRHSIKKNLIGALLFDSGETAEATRLKRTARRRYTRRKNRICYLQEIFSNEMAKVDDSFFHRLEESFLVEEDKKHERHPIFGNIVDEVAYHEKYPTIYHLRKKLVDSTDKADLRLIYLALAHMIKFRGHFLIEGDLNPDNSDVDKLFIQLVQTYNQLFEENPINASGVDAKAILSARLSKSRRLENLIAQLPGEKKNGLFGNLIALSLGLTPNFKSNFDLAEDAKLQLSKDTYDDDLDNLLAQIGDQYADLFLAAKNLSDAILLSDILRVNTEITKAPLSASMIKRYDEHHQDLTLLKALVRQQLPEKYKEIFFDQSKNGYAGYIDGGASQEEFYKFIKPILEKMDGTEELLVKLNREDLLRKQRTFDNGSIPHQIHLGELHAILRRQEDFYPFLKDNREKIEKILTFRIPYYVGPLARGNSRFAWMTRKSEETITPWNFEEVVDKGASAQSFIERMTNFDKNLPNEKVLPKHSLLYEYFTVYNELTKVKYVTEGMRKPAFLSGEQKKAIVDLLFKTNRKVTVKQLKEDYFKKIECFDSVEISGVEDRFNASLGTYHDLLKIIKDKDFLDNEENEDILEDIVLTLTLFEDREMIEERLKTYAHLFDDKVMKQLKRRRYTGWGRLSRKLINGIRDKQSGKTILDFLKSDGFANRNFMQLIHDDSLTFKEDIQKAQVSGQGDSLHEHIANLAGSPAIKKGILQTVKVVDELVKVMGRHKPENIVIEMARENQTTQKGQKNSRERMKRIEEGIKELGSQILKEHPVENTQLQNEKLYLYYLQNGRDMYVDQELDINRLSDYDVDHIVPQSFLKDDSIDNKVLTRSDKARGKSDNVPSEEVVKKMKNYWRQLLNAKLITQRKFDNLTKAERGGLSELDKAGFIKRQLVETRQITKHVAQILDSRMNTKYDENDKLIREVKVITLKSKLVSDFRKDFQFYKVREINNYHHAHDAYLNAVVGTALIKKYPKLESEFVYGDYKVYDVRKMIAKSEQEIGKATAKYFFYSNIMNFFKTEITLANGEIRKRPLIETNGETGEIVWDKGRDFATVRKVLSMPQVNIVKKTEVQTGGFSKESILPKRNSDKLIARKKDWDPKKYGGFDSPTVAYSVLVVAKVEKGKSKKLKSVKELLGITIMERSSFEKNPIDFLEAKGYKEVKKDLIIKLPKYSLFELENGRKRMLASAGELQKGNELALPSKYVNFLYLASHYEKLKGSPEDNEQKQLFVEQHKHYLDEIIEQISEFSKRVILADANLDKVLSAYNKHRDKPIREQAENIIHLFTLTNLGAPAAFKYFDTTIDRKRYTSTKEVLDATLIHQSITGLYETRIDLSQLGGDGGGSSGSSGSSGSSGSSGSSGGMNPLQLLQPLPAEIKGTKLLAHWNSGATITCIPESFLEDEQPIKKTLIKTIHGEKQQNVYYVTFKVKGRKVEAEVIASPYEYILLSPTDVPWLTQQPLQLTILVPLQEYQEKILSKTALPEDQKQQLKTLFVKYDNLWQHWENQVGHRKIRPHNIATGDYPPRPQKQYPINPKAKPSIQIVIDDLLKQGVLTPQNSTMNTPVYPVPKPDGRWRMVLDYREVNKTIPLTAAQNQHSAGILATIVRQKYKTTLDLANGFWAHPITPESYWLTAFTWQGKQYCWTRLPQGFLNSPALFNADVVDLLKEIPNVQVYVDDIYLSHDDPKEHVQQLEKVFQILLQAGYVVSLKKSEIGQKTVEFLGFNITKEGRGLTDTFKTKLLNITPPKDLKQLQSILGLLNFARNFIPNFAELVQPLYNLIAPAKGKYIEWSEENTKQLNMVIEALNTASNLEERLPEQRLVIKVNTSPSAGYVRYYNETGKKPIMYLNYVFSKAELKFSMLEKLLTTMHKALIKAMDLAMGQEILVYSPIVSMTKIQKTPLPERKALPIRWITWMTYLEDPRIQFHYDKTLPELKHIPDVYTSSQSPVKHPSQYEGVFYTDGSAIKSPDPTKSNNAGMGIVHATYKPEYQVLNQWSIPLGNHTAQMAEIAAVEFACKKALKIPGPVLVITDSFYVAESANKELPYWKSNGFVNNKKKPLKHISKWKSIAECLSMKPDITIQHEKGISLQIPVFILKGNALADKLATQGSYVVNAGKRTADGSEFEKRTADGSEFESPKKKAKVE

SEQ ID NO: 6343 - protein, 2101 aa, synthetic construct
MPAAKRVKLDGGDKKYSIGLDIGTNSVGWAVITDEYKVPSKKFKVLGNTDRHSIKKNLIGALLFDSGETAEATRLKRTARRRYTRRKNRICYLQEIFSNEMAKVDDSFFHRLEESFLVEEDKKHERHPIFGNIVDEVAYHEKYPTIYHLRKKLVDSTDKADLRLIYLALAHMIKFRGHFLIEGDLNPDNSDVDKLFIQLVQTYNQLFEENPINASGVDAKAILSARLSKSRRLENLIAQLPGEKKNGLFGNLIALSLGLTPNFKSNFDLAEDAKLQLSKDTYDDDLDNLLAQIGDQYADLFLAAKNLSDAILLSDILRVNTEITKAPLSASMIKRYDEHHQDLTLLKALVRQQLPEKYKEIFFDQSKNGYAGYIDGGASQEEFYKFIKPILEKMDGTEELLVKLNREDLLRKQRTFDNGSIPHQIHLGELHAILRRQEDFYPFLKDNREKIEKILTFRIPYYVGPLARGNSRFAWMTRKSEETITPWNFEEVVDKGASAQSFIERMTNFDKNLPNEKVLPKHSLLYEYFTVYNELTKVKYVTEGMRKPAFLSGEQKKAIVDLLFKTNRKVTVKQLKEDYFKKIECFDSVEISGVEDRFNASLGTYHDLLKIIKDKDFLDNEENEDILEDIVLTLTLFEDREMIEERLKTYAHLFDDKVMKQLKRRRYTGWGRLSRKLINGIRDKQSGKTILDFLKSDGFANRNFMQLIHDDSLTFKEDIQKAQVSGQGDSLHEHIANLAGSPAIKKGILQTVKVVDELVKVMGRHKPENIVIEMARENQTTQKGQKNSRERMKRIEEGIKELGSQILKEHPVENTQLQNEKLYLYYLQNGRDMYVDQELDINRLSDYDVDHIVPQSFLKDDSIDNKVLTRSDKARGKSDNVPSEEVVKKMKNYWRQLLNAKLITQRKFDNLTKAERGGLSELDKAGFIKRQLVETRQITKHVAQILDSRMNTKYDENDKLIREVKVITLKSKLVSDFRKDFQFYKVREINNYHHAHDAYLNAVVGTALIKKYPKLESEFVYGDYKVYDVRKMIAKSEQEIGKATAKYFFYSNIMNFFKTEITLANGEIRKRPLIETNGETGEIVWDKGRDFATVRKVLSMPQVNIVKKTEVQTGGFSKESILPKRNSDKLIARKKDWDPKKYGGFDSPTVAYSVLVVAKVEKGKSKKLKSVKELLGITIMERSSFEKNPIDFLEAKGYKEVKKDLIIKLPKYSLFELENGRKRMLASAGELQKGNELALPSKYVNFLYLASHYEKLKGSPEDNEQKQLFVEQHKHYLDEIIEQISEFSKRVILADANLDKVLSAYNKHRDKPIREQAENIIHLFTLTNLGAPAAFKYFDTTIDRKRYTSTKEVLDATLIHQSITGLYETRIDLSQLGGDGGGSSGSSGSSGSSGSSGSSGGVLNLEEEYRLHEKPVPSSIDPSWLQLFPTVWAERAGMGLANQVPPVVVELRSGASPVAVRQYPMSKEAREGIRPHIQKFLDLGVLVPCRSPWNTPLLPVKKPGTNDYRPVQDLREINKRVQDIHPTVPNPYNLLSSLPPSYTWYSVLDLKDAFFCLRLHPNSQPLFAFEWKDPEKGNTGQLTWTRLPQGFKNSPTLFNEALHRDLAPFRALNPQVVLLQYVDDLLVAAPTYEDCKKGTQKLLQELSKLGYRVSAKKAQLCQREVTYLGYLLKEGKRWLTPARKATVMKIPVPTTPRQVREFLGKAGFCRLFIPGFASLAAPLYPLTKPSIPFIWTEEHQQAFDHIKKALLSAPALALPDLTKPFTLYIDERAGVARGVLTQTLGPWRRPVAYLSKKLDPVASGWPTCLKAVAAVALLLKDADKLTLGQNVTVIASHSLESIVRQPPDRWMTNARMTHYQSLLLNERVSFAPPAVLNPATLLPVESEATPVHRCSEILAEETGTRRDLEDQPLPGVPTWYTDGSSFITEGKRRAGAPIVDGKRTVWASSLPEGTSAQKAELVALTQALRLAEGKNINIYTDSRYAFATAHIHGAIYKQRGWLTSAGKDIKNKEEILALLEAIHLPRRVAIIHCPGHQRGSNPVATGNRRADEAAKQAALSTRVLAGTTKPAGKRTADGSEFEKRTADGSEFESPKKKAKVE

SEQ ID NO: 6344 - protein, 2134 aa, synthetic construct
MPAAKRVKLDGGDKKYSIGLDIGTNSVGWAVITDEYKVPSKKFKVLGNTDRHSIKKNLIGALLFDSGETAEATRLKRTARRRYTRRKNRICYLQEIFSNEMAKVDDSFFHRLEESFLVEEDKKHERHPIFGNIVDEVAYHEKYPTIYHLRKKLVDSTDKADLRLIYLALAHMIKFRGHFLIEGDLNPDNSDVDKLFIQLVQTYNQLFEENPINASGVDAKAILSARLSKSRRLENLIAQLPGEKKNGLFGNLIALSLGLTPNFKSNFDLAEDAKLQLSKDTYDDDLDNLLAQIGDQYADLFLAAKNLSDAILLSDILRVNTEITKAPLSASMIKRYDEHHQDLTLLKALVRQQLPEKYKEIFFDQSKNGYAGYIDGGASQEEFYKFIKPILEKMDGTEELLVKLNREDLLRKQRTFDNGSIPHQIHLGELHAILRRQEDFYPFLKDNREKIEKILTFRIPYYVGPLARGNSRFAWMTRKSEETITPWNFEEVVDKGASAQSFIERMTNFDKNLPNEKVLPKHSLLYEYFTVYNELTKVKYVTEGMRKPAFLSGEQKKAIVDLLFKTNRKVTVKQLKEDYFKKIECFDSVEISGVEDRFNASLGTYHDLLKIIKDKDFLDNEENEDILEDIVLTLTLFEDREMIEERLKTYAHLFDDKVMKQLKRRRYTGWGRLSRKLINGIRDKQSGKTILDFLKSDGFANRNFMQLIHDDSLTFKEDIQKAQVSGQGDSLHEHIANLAGSPAIKKGILQTVKVVDELVKVMGRHKPENIVIEMARENQTTQKGQKNSRERMKRIEEGIKELGSQILKEHPVENTQLQNEKLYLYYLQNGRDMYVDQELDINRLSDYDVDHIVPQSFLKDDSIDNKVLTRSDKARGKSDNVPSEEVVKKMKNYWRQLLNAKLITQRKFDNLTKAERGGLSELDKAGFIKRQLVETRQITKHVAQILDSRMNTKYDENDKLIREVKVITLKSKLVSDFRKDFQFYKVREINNYHHAHDAYLNAVVGTALIKKYPKLESEFVYGDYKVYDVRKMIAKSEQEIGKATAKYFFYSNIMNFFKTEITLANGEIRKRPLIETNGETGEIVWDKGRDFATVRKVLSMPQVNIVKKTEVQTGGFSKESILPKRNSDKLIARKKDWDPKKYGGFDSPTVAYSVLVVAKVEKGKSKKLKSVKELLGITIMERSSFEKNPIDFLEAKGYKEVKKDLIIKLPKYSLFELENGRKRMLASAGELQKGNELALPSKYVNFLYLASHYEKLKGSPEDNEQKQLFVEQHKHYLDEIIEQISEFSKRVILADANLDKVLSAYNKHRDKPIREQAENIIHLFTLTNLGAPAAFKYFDTTIDRKRYTSTKEVLDATLIHQSITGLYETRIDLSQLGGDGGGSSGSSGSSGSSGSSGSSGGLLGRDLLTKLKAQIQFSTEGPQVTWEDRPAMCLVLNLEEEYRLHEKPVPPSIDPSWLQLFPMVWAEKAGMGLANQVPPVVVELKSDASPVAVRQYPMSKEAREGIRPHIQRFLDLGILVPCQSPWNTPLLPVKKPGTNDYRPVQDLREVNKRVQDIHPTVPNPYNLLSSLPPSHTWYSVLDLKDAFFCLKLHPNSQPLFAFEWRDPEKGNTGQLTWTRLPQGFKNSPTLFNEALHRDLASFRALNPQVVMLQYVDDLLVAAPTYRDCKEGTRRLLQELSKLGYRVSAKKAQLCREEVTYLGYLLKGGKRWLTPARKATVMKIPTPTTPRQVREFLGTAGFCRLWIPGFASLAAPLYPLTRPKVPFTWTEAHQEAFGRIKEALLSAPALALPDLTKPFALYVDEKEGVARGVLTQTLGPWRRPVAYLSKKLDPVASGWPTCLKAIAAVALLLKDADKLTLGQNVLVIAPHNLESIVRQPPDRWMTNARMTHYQSLLLNERVSFAPPAILNPATLLPVESDDTPIHICSEILAEETGTRPDLRDQPLPGVPAWYTDGSSFIMDGRRQAGAAIVDNKRTVWASNLPEGTSAQKAELIALTQALRLAEGKSINIYTDSRYAFATAHVHGAIYKQRGWLTSAGKDIKNKEEILALLEAIHLPKRVAIIHCPGHQRGTDPVATGNRKADEAAKQAAQSTRILTETTKNAGKRTADGSEFEKRTADGSEFESPKKKAKVE

SEQ ID NO: 6345 - protein, 2225 aa, synthetic construct
MPAAKRVKLDGGDKKYSIGLDIGTNSVGWAVITDEYKVPSKKFKVLGNTDRHSIKKNLIGALLFDSGETAEATRLKRTARRRYTRRKNRICYLQEIFSNEMAKVDDSFFHRLEESFLVEEDKKHERHPIFGNIVDEVAYHEKYPTIYHLRKKLVDSTDKADLRLIYLALAHMIKFRGHFLIEGDLNPDNSDVDKLFIQLVQTYNQLFEENPINASGVDAKAILSARLSKSRRLENLIAQLPGEKKNGLFGNLIALSLGLTPNFKSNFDLAEDAKLQLSKDTYDDDLDNLLAQIGDQYADLFLAAKNLSDAILLSDILRVNTEITKAPLSASMIKRYDEHHQDLTLLKALVRQQLPEKYKEIFFDQSKNGYAGYIDGGASQEEFYKFIKPILEKMDGTEELLVKLNREDLLRKQRTFDNGSIPHQIHLGELHAILRRQEDFYPFLKDNREKIEKILTFRIPYYVGPLARGNSRFAWMTRKSEETITPWNFEEVVDKGASAQSFIERMTNFDKNLPNEKVLPKHSLLYEYFTVYNELTKVKYVTEGMRKPAFLSGEQKKAIVDLLFKTNRKVTVKQLKEDYFKKIECFDSVEISGVEDRFNASLGTYHDLLKIIKDKDFLDNEENEDILEDIVLTLTLFEDREMIEERLKTYAHLFDDKVMKQLKRRRYTGWGRLSRKLINGIRDKQSGKTILDFLKSDGFANRNFMQLIHDDSLTFKEDIQKAQVSGQGDSLHEHIANLAGSPAIKKGILQTVKVVDELVKVMGRHKPENIVIEMARENQTTQKGQKNSRERMKRIEEGIKELGSQILKEHPVENTQLQNEKLYLYYLQNGRDMYVDQELDINRLSDYDVDHIVPQSFLKDDSIDNKVLTRSDKARGKSDNVPSEEVVKKMKNYWRQLLNAKLITQRKFDNLTKAERGGLSELDKAGFIKRQLVETRQITKHVAQILDSRMNTKYDENDKLIREVKVITLKSKLVSDFRKDFQFYKVREINNYHHAHDAYLNAVVGTALIKKYPKLESEFVYGDYKVYDVRKMIAKSEQEIGKATAKYFFYSNIMNFFKTEITLANGEIRKRPLIETNGETGEIVWDKGRDFATVRKVLSMPQVNIVKKTEVQTGGFSKESILPKRNSDKLIARKKDWDPKKYGGFDSPTVAYSVLVVAKVEKGKSKKLKSVKELLGITIMERSSFEKNPIDFLEAKGYKEVKKDLIIKLPKYSLFELENGRKRMLASAGELQKGNELALPSKYVNFLYLASHYEKLKGSPEDNEQKQLFVEQHKHYLDEIIEQISEFSKRVILADANLDKVLSAYNKHRDKPIREQAENIIHLFTLTNLGAPAAFKYFDTTIDRKRYTSTKEVLDATLIHQSITGLYETRIDLSQLGGDGGGSSGSSGSSGSSGSSGSSGGTLGDQGSRGSDPLPEPRVTLTVEGIPTEFLVNTGAEHSVLTKPMGKMGSKRTVVAGATGSKVYPWTTKRLLKIGQKQVTHSFLVIPECPAPLLGRDLLTKLKAQIQFSTEGPQVTWEDRPAMCLVLNLEEEYRLHEKPVPPSIDPSWLQLFPMVWAEKAGMGLANQVPPVVVELKSDASPVAVRQYPMSKEAREGIRPHIQRFLDLGILVPCQSPWNTPLLPVKKPGTNDYRPVQDLREVNKRVQDIHPTVPNPYNLLSSLPPSHTWYSVLDLKDAFFCLKLHPNSQPLFAFEWRDPEKGNTGQLTWTRLPQGFKNSPTLFNEALHRDLASFRALNPQVVMLQYVDDLLVAAPTYRDCKEGTRRLLQELSKLGYRVSAKKAQLCREEVTYLGYLLKGGKRWLTPARKATVMKIPTPTTPRQVREFLGTAGFCRLWIPGFASLAAPLYPLTRPKVPFTWTEAHQEAFGRIKEALLSAPALALPDLTKPFALYVDEKEGVARGVLTQTLGPWRRPVAYLSKKLDPVASGWPTCLKAIAAVALLLKDADKLTLGQNVLVIAPHNLESIVRQPPDRWMTNARMTHYQSLLLNERVSFAPPAILNPATLLPVESDDTPIHICSEILAEETGTRPDLRDQPLPGVPAWYTDGSSFIMDGRRQAGAAIVDNKRTVWASNLPEGTSAQKAELIALTQALRLAEGKSINIYTDSRYAFATAHVHGAIYKQRGWLTSAGKDIKNKEEILALLEAIHLPKRVAIIHCPGHQRGTDPVATGNRKADEAAKQAAQSTRILTETTKNAGKRTADGSEFEKRTADGSEFESPKKKAKVE

SEQ ID NO: 6346 - protein, 2225 aa, synthetic construct
MPAAKRVKLDGGDKKYSIGLDIGTNSVGWAVITDEYKVPSKKFKVLGNTDRHSIKKNLIGALLFDSGETAEATRLKRTARRRYTRRKNRICYLQEIFSNEMAKVDDSFFHRLEESFLVEEDKKHERHPIFGNIVDEVAYHEKYPTIYHLRKKLVDSTDKADLRLIYLALAHMIKFRGHFLIEGDLNPDNSDVDKLFIQLVQTYNQLFEENPINASGVDAKAILSARLSKSRRLENLIAQLPGEKKNGLFGNLIALSLGLTPNFKSNFDLAEDAKLQLSKDTYDDDLDNLLAQIGDQYADLFLAAKNLSDAILLSDILRVNTEITKAPLSASMIKRYDEHHQDLTLLKALVRQQLPEKYKEIFFDQSKNGYAGYIDGGASQEEFYKFIKPILEKMDGTEELLVKLNREDLLRKQRTFDNGSIPHQIHLGELHAILRRQEDFYPFLKDNREKIEKILTFRIPYYVGPLARGNSRFAWMTRKSEETITPWNFEEVVDKGASAQSFIERMTNFDKNLPNEKVLPKHSLLYEYFTVYNELTKVKYVTEGMRKPAFLSGEQKKAIVDLLFKTNRKVTVKQLKEDYFKKIECFDSVEISGVEDRFNASLGTYHDLLKIIKDKDFLDNEENEDILEDIVLTLTLFEDREMIEERLKTYAHLFDDKVMKQLKRRRYTGWGRLSRKLINGIRDKQSGKTILDFLKSDGFANRNFMQLIHDDSLTFKEDIQKAQVSGQGDSLHEHIANLAGSPAIKKGILQTVKVVDELVKVMGRHKPENIVIEMARENQTTQKGQKNSRERMKRIEEGIKELGSQILKEHPVENTQLQNEKLYLYYLQNGRDMYVDQELDINRLSDYDVDHIVPQSFLKDDSIDNKVLTRSDKARGKSDNVPSEEVVKKMKNYWRQLLNAKLITQRKFDNLTKAERGGLSELDKAGFIKRQLVETRQITKHVAQILDSRMNTKYDENDKLIREVKVITLKSKLVSDFRKDFQFYKVREINNYHHAHDAYLNAVVGTALIKKYPKLESEFVYGDYKVYDVRKMIAKSEQEIGKATAKYFFYSNIMNFFKTEITLANGEIRKRPLIETNGETGEIVWDKGRDFATVRKVLSMPQVNIVKKTEVQTGGFSKESILPKRNSDKLIARKKDWDPKKYGGFDSPTVAYSVLVVAKVEKGKSKKLKSVKELLGITIMERSSFEKNPIDFLEAKGYKEVKKDLIIKLPKYSLFELENGRKRMLASAGELQKGNELALPSKYVNFLYLASHYEKLKGSPEDNEQKQLFVEQHKHYLDEIIEQISEFSKRVILADANLDKVLSAYNKHRDKPIREQAENIIHLFTLTNLGAPAAFKYFDTTIDRKRYTSTKEVLDATLIHQSITGLYETRIDLSQLGGDGGGSSGSSGSSGSSGSSGSSGGTLGDQGSRGSDPLPEPRVTLTVEGIPTEFLVNTGAEHSVLTKPMGKMGSKRTVVAGATGSKVYPWTTKRLLKIGQKQVTHSFLVIPECPAPLLGRDLLTKLKAQIQFSTEGPQVTWEDRPAMCLVLNLEEEYRLHEKPVPPSIDPSWLQLFPMVWAEKAGMGLANQVPPVVVELKSDASPVAVRQYPMSKEAREGIRPHIQRFLDLGILVPCQSPWNTPLLPVKKPGTNDYRPVQDLREVNKRVQDIHPTVPNPYNLLSSLPPSHTWYSVLDLKDAFFCLKLHPNSQPLFAFEWRDPEKGNTGQLTWTRLPQGFKNSPTLFNEALHRDLASFRALNPQVVMLQYVDDLLVAAPTYRDCKEGTRRLLQELSKLGYRVSAKKAQLCREEVTYLGYLLKGGKRWLTPARKATVMKIPTPTTPRQVREFLGKAGFCRLFIPGFASLAAPLYPLTRPKVPFTWTEAHQEAFGRIKEALLSAPALALPDLTKPFALYVDEKEGVARGVLTQTLGPWRRPVAYLSKKLDPVASGWPTCLKAIAAVALLLKDADKLTLGQNVLVIAPHNLESIVRQPPDRWMTNARMTHYQSLLLNERVSFAPPAILNPATLLPVESDDTPIHICSEILAEETGTRPDLRDQPLPGVPAWYTDGSSFIMDGRRQAGAAIVDNKRTVWASNLPEGTSAQKAELIALTQALRLAEGKSINIYTDSRYAFATAHVHGAIYKQRGWLTSAGKDIKNKEEILALLEAIHLPKRVAIIHCPGHQRGTDPVATGNRKADEAAKQAAQSTRILTETTKNAGKRTADGSEFEKRTADGSEFESPKKKAKVE

SEQ ID NO: 6347 - protein, 2103 aa, synthetic construct
MPAAKRVKLDGGDKKYSIGLDIGTNSVGWAVITDEYKVPSKKFKVLGNTDRHSIKKNLIGALLFDSGETAEATRLKRTARRRYTRRKNRICYLQEIFSNEMAKVDDSFFHRLEESFLVEEDKKHERHPIFGNIVDEVAYHEKYPTIYHLRKKLVDSTDKADLRLIYLALAHMIKFRGHFLIEGDLNPDNSDVDKLFIQLVQTYNQLFEENPINASGVDAKAILSARLSKSRRLENLIAQLPGEKKNGLFGNLIALSLGLTPNFKSNFDLAEDAKLQLSKDTYDDDLDNLLAQIGDQYADLFLAAKNLSDAILLSDILRVNTEITKAPLSASMIKRYDEHHQDLTLLKALVRQQLPEKYKEIFFDQSKNGYAGYIDGGASQEEFYKFIKPILEKMDGTEELLVKLNREDLLRKQRTFDNGSIPHQIHLGELHAILRRQEDFYPFLKDNREKIEKILTFRIPYYVGPLARGNSRFAWMTRKSEETITPWNFEEVVDKGASAQSFIERMTNFDKNLPNEKVLPKHSLLYEYFTVYNELTKVKYVTEGMRKPAFLSGEQKKAIVDLLFKTNRKVTVKQLKEDYFKKIECFDSVEISGVEDRFNASLGTYHDLLKIIKDKDFLDNEENEDILEDIVLTLTLFEDREMIEERLKTYAHLFDDKVMKQLKRRRYTGWGRLSRKLINGIRDKQSGKTILDFLKSDGFANRNFMQLIHDDSLTFKEDIQKAQVSGQGDSLHEHIANLAGSPAIKKGILQTVKVVDELVKVMGRHKPENIVIEMARENQTTQKGQKNSRERMKRIEEGIKELGSQILKEHPVENTQLQNEKLYLYYLQNGRDMYVDQELDINRLSDYDVDHIVPQSFLKDDSIDNKVLTRSDKARGKSDNVPSEEVVKKMKNYWRQLLNAKLITQRKFDNLTKAERGGLSELDKAGFIKRQLVETRQITKHVAQILDSRMNTKYDENDKLIREVKVITLKSKLVSDFRKDFQFYKVREINNYHHAHDAYLNAVVGTALIKKYPKLESEFVYGDYKVYDVRKMIAKSEQEIGKATAKYFFYSNIMNFFKTEITLANGEIRKRPLIETNGETGEIVWDKGRDFATVRKVLSMPQVNIVKKTEVQTGGFSKESILPKRNSDKLIARKKDWDPKKYGGFDSPTVAYSVLVVAKVEKGKSKKLKSVKELLGITIMERSSFEKNPIDFLEAKGYKEVKKDLIIKLPKYSLFELENGRKRMLASAGELQKGNELALPSKYVNFLYLASHYEKLKGSPEDNEQKQLFVEQHKHYLDEIIEQISEFSKRVILADANLDKVLSAYNKHRDKPIREQAENIIHLFTLTNLGAPAAFKYFDTTIDRKRYTSTKEVLDATLIHQSITGLYETRIDLSQLGGDGGGSSGSSGSSGSSGSSGSSGGTLNLEDEYRLYETSAEPEVSPGSTWLSDFPQAWAETGGMGLAVRQAPLIIPLKATSTPVSIKQYPMSQEAKLGIKPHIQRLLDQGILVPCQSPWNTPLLPVKKPGTNDYRPVQDLREVNKRVEDIHPTVPNPYNLLSGLPPSHRWYTVLDLKDAFFCLRLHPTSQPLFAFEWRDPGMGISGQLTWTRLPQGFKNSPTLFNEALHRDLADFRIQHPDLILLQYVDDILLAATSELDCQQGTRALLLTLGNLGYRASAKKAQLCQKQVKYLGYLLKEGQRWLTEARKETVMGQPTPKTPRQLREFLGTAGFCRLWIPGFAEMAAPLYPLTKPGTLFNWGPDQQKAYQEIKQALLTAPALGLPDLTKPFELFVDEKQGYAKGVLTQKLGPWRRPVAYLSKKLDPVAAGWPPCLRMVAAIAVLRKDAGKLTMGQPLVILAPHAVEALVKQPPDRWLSNARMTHYQAMLLDTDRVQFGPVVALNPATLLPLPEEGAPHDCLEILAETHGTRPDLTDQPIPDADHTWYTDGSSFLQEGQRKAGAAVTTETEVIWARALPAGTSAQRAELIALTQALKMAEGKRLNVYTDSRYAFATAHIHGEIYRRRGWLTSEGREIKNKSEILALLKALFLPKRLSIIHCLGHQKGDSAEARGNRLADQAAREAAIKTPPDTSTLLAGKRTADGSEFEKRTADGSEFESPKKKAKVE

SEQ ID NO: 6348 - protein, 2103 aa, synthetic construct
MPAAKRVKLDGGDKKYSIGLDIGTNSVGWAVITDEYKVPSKKFKVLGNTDRHSIKKNLIGALLFDSGETAEATRLKRTARRRYTRRKNRICYLQEIFSNEMAKVDDSFFHRLEESFLVEEDKKHERHPIFGNIVDEVAYHEKYPTIYHLRKKLVDSTDKADLRLIYLALAHMIKFRGHFLIEGDLNPDNSDVDKLFIQLVQTYNQLFEENPINASGVDAKAILSARLSKSRRLENLIAQLPGEKKNGLFGNLIALSLGLTPNFKSNFDLAEDAKLQLSKDTYDDDLDNLLAQIGDQYADLFLAAKNLSDAILLSDILRVNTEITKAPLSASMIKRYDEHHQDLTLLKALVRQQLPEKYKEIFFDQSKNGYAGYIDGGASQEEFYKFIKPILEKMDGTEELLVKLNREDLLRKQRTFDNGSIPHQIHLGELHAILRRQEDFYPFLKDNREKIEKILTFRIPYYVGPLARGNSRFAWMTRKSEETITPWNFEEVVDKGASAQSFIERMTNFDKNLPNEKVLPKHSLLYEYFTVYNELTKVKYVTEGMRKPAFLSGEQKKAIVDLLFKTNRKVTVKQLKEDYFKKIECFDSVEISGVEDRFNASLGTYHDLLKIIKDKDFLDNEENEDILEDIVLTLTLFEDREMIEERLKTYAHLFDDKVMKQLKRRRYTGWGRLSRKLINGIRDKQSGKTILDFLKSDGFANRNFMQLIHDDSLTFKEDIQKAQVSGQGDSLHEHIANLAGSPAIKKGILQTVKVVDELVKVMGRHKPENIVIEMARENQTTQKGQKNSRERMKRIEEGIKELGSQILKEHPVENTQLQNEKLYLYYLQNGRDMYVDQELDINRLSDYDVDHIVPQSFLKDDSIDNKVLTRSDKARGKSDNVPSEEVVKKMKNYWRQLLNAKLITQRKFDNLTKAERGGLSELDKAGFIKRQLVETRQITKHVAQILDSRMNTKYDENDKLIREVKVITLKSKLVSDFRKDFQFYKVREINNYHHAHDAYLNAVVGTALIKKYPKLESEFVYGDYKVYDVRKMIAKSEQEIGKATAKYFFYSNIMNFFKTEITLANGEIRKRPLIETNGETGEIVWDKGRDFATVRKVLSMPQVNIVKKTEVQTGGFSKESILPKRNSDKLIARKKDWDPKKYGGFDSPTVAYSVLVVAKVEKGKSKKLKSVKELLGITIMERSSFEKNPIDFLEAKGYKEVKKDLIIKLPKYSLFELENGRKRMLASAGELQKGNELALPSKYVNFLYLASHYEKLKGSPEDNEQKQLFVEQHKHYLDEIIEQISEFSKRVILADANLDKVLSAYNKHRDKPIREQAENIIHLFTLTNLGAPAAFKYFDTTIDRKRYTSTKEVLDATLIHQSITGLYETRIDLSQLGGDGGGSSGSSGSSGSSGSSGSSGGTLNLEDEYRLYETSAEPEVSPGSTWLSDFPQAWAETGGMGLAVRQAPLIIPLKATSTPVSIKQYPMSQEAKLGIKPHIQRLLDQGILVPCQSPWNTPLLPVKKPGTNDYRPVQDLREVNKRVEDIHPTVPNPYNLLSGLPPSHRWYTVLDLKDAFFCLRLHPTSQPLFAFEWRDPGMGISGQLTWTRLPQGFKNSPTLFNEALHRDLADFRIQHPDLILLQYVDDILLAATSELDCQQGTRALLLTLGNLGYRASAKKAQLCQKQVKYLGYLLKEGQRWLTEARKETVMGQPTPKTPRQLREFLGKAGFCRLFIPGFAEMAAPLYPLTKPGTLFNWGPDQQKAYQEIKQALLTAPALGLPDLTKPFELFVDEKQGYAKGVLTQKLGPWRRPVAYLSKKLDPVAAGWPPCLRMVAAIAVLRKDAGKLTMGQPLVILAPHAVEALVKQPPDRWLSNARMTHYQAMLLDTDRVQFGPVVALNPATLLPLPEEGAPHDCLEILAETHGTRPDLTDQPIPDADHTWYTDGSSFLQEGQRKAGAAVTTETEVIWARALPAGTSAQRAELIALTQALKMAEGKRLNVYTDSRYAFATAHIHGEIYRRRGWLTSEGREIKNKSEILALLKALFLPKRLSIIHCLGHQKGDSAEARGNRLADQAAREAAIKTPPDTSTLLAGKRTADGSEFEKRTADGSEFESPKKKAKVE

SEQ ID NO: 6349 - protein, 2103 aa, synthetic construct
MPAAKRVKLDGGDKKYSIGLDIGTNSVGWAVITDEYKVPSKKFKVLGNTDRHSIKKNLIGALLFDSGETAEATRLKRTARRRYTRRKNRICYLQEIFSNEMAKVDDSFFHRLEESFLVEEDKKHERHPIFGNIVDEVAYHEKYPTIYHLRKKLVDSTDKADLRLIYLALAHMIKFRGHFLIEGDLNPDNSDVDKLFIQLVQTYNQLFEENPINASGVDAKAILSARLSKSRRLENLIAQLPGEKKNGLFGNLIALSLGLTPNFKSNFDLAEDAKLQLSKDTYDDDLDNLLAQIGDQYADLFLAAKNLSDAILLSDILRVNTEITKAPLSASMIKRYDEHHQDLTLLKALVRQQLPEKYKEIFFDQSKNGYAGYIDGGASQEEFYKFIKPILEKMDGTEELLVKLNREDLLRKQRTFDNGSIPHQIHLGELHAILRRQEDFYPFLKDNREKIEKILTFRIPYYVGPLARGNSRFAWMTRKSEETITPWNFEEVVDKGASAQSFIERMTNFDKNLPNEKVLPKHSLLYEYFTVYNELTKVKYVTEGMRKPAFLSGEQKKAIVDLLFKTNRKVTVKQLKEDYFKKIECFDSVEISGVEDRFNASLGTYHDLLKIIKDKDFLDNEENEDILEDIVLTLTLFEDREMIEERLKTYAHLFDDKVMKQLKRRRYTGWGRLSRKLINGIRDKQSGKTILDFLKSDGFANRNFMQLIHDDSLTFKEDIQKAQVSGQGDSLHEHIANLAGSPAIKKGILQTVKVVDELVKVMGRHKPENIVIEMARENQTTQKGQKNSRERMKRIEEGIKELGSQILKEHPVENTQLQNEKLYLYYLQNGRDMYVDQELDINRLSDYDVDHIVPQSFLKDDSIDNKVLTRSDKARGKSDNVPSEEVVKKMKNYWRQLLNAKLITQRKFDNLTKAERGGLSELDKAGFIKRQLVETRQITKHVAQILDSRMNTKYDENDKLIREVKVITLKSKLVSDFRKDFQFYKVREINNYHHAHDAYLNAVVGTALIKKYPKLESEFVYGDYKVYDVRKMIAKSEQEIGKATAKYFFYSNIMNFFKTEITLANGEIRKRPLIETNGETGEIVWDKGRDFATVRKVLSMPQVNIVKKTEVQTGGFSKESILPKRNSDKLIARKKDWDPKKYGGFDSPTVAYSVLVVAKVEKGKSKKLKSVKELLGITIMERSSFEKNPIDFLEAKGYKEVKKDLIIKLPKYSLFELENGRKRMLASAGELQKGNELALPSKYVNFLYLASHYEKLKGSPEDNEQKQLFVEQHKHYLDEIIEQISEFSKRVILADANLDKVLSAYNKHRDKPIREQAENIIHLFTLTNLGAPAAFKYFDTTIDRKRYTSTKEVLDATLIHQSITGLYETRIDLSQLGGDGGGSSGSSGSSGSSGSSGSSGGTLNIEDEYRLHETSKEPDVSLGSTWLSDFPQAWAETGGMGLAVRQAPLIIPLKATSTPVSIKQYPMSQEARLGIKPHIQRLLDQGILVPCQSPWNTPLLPVKKPGTNDYRPVQDLREVNKRVEDIHPTVPNPYNLLSGLPPSHQWYTVLDLKDAFFCLRLHPTSQPLFAFEWRDPEMGISGQLTWTRLPQGFKNSPTLFNEALHRDLAGFRIQHPDLILLQYVDDLLLAATSELDCQQGTRALLQTLGDLGYRASAKKAQICQKQVKYLGYLLKEGQRWLTEARKETVMGQPIPKTPRQLREFLGTAGFCRLWIPGFAEMAAPLYPLTKPGTLFNWGPDQQKAFQEIKQALLTAPALGLPDLTKPFELFVDEKQGYAKGVLTQKLGPWRRPVAYLSKKLDPVAAGWPPCLRMVAAIAVLTKDAGKLTMGQPLVILAPHAVEALVKQPPDRWLSNARMTHYQALLLDTDRVQFGPVVALNPATLLPLPEEGLQHDCLDILAEAHGTRSDLMDQPLPDADHTWYTDGSSFLQEGQRKAGAAVTTETEVIWARALPAGTSAQRAELIALTQALKMAEGKKLNVYTDSRYAFATAHIHGEIYRRRGWLTSEGKEIKNKDEILALLKALFLPKRLSIIHCPGHQKGNSAEARGNRMADQAAREVATRETPETSTLLAGKRTADGSEFEKRTADGSEFESPKKKAKVE

SEQ ID NO: 6350 - protein, 2103 aa, synthetic construct
MPAAKRVKLDGGDKKYSIGLDIGTNSVGWAVITDEYKVPSKKFKVLGNTDRHSIKKNLIGALLFDSGETAEATRLKRTARRRYTRRKNRICYLQEIFSNEMAKVDDSFFHRLEESFLVEEDKKHERHPIFGNIVDEVAYHEKYPTIYHLRKKLVDSTDKADLRLIYLALAHMIKFRGHFLIEGDLNPDNSDVDKLFIQLVQTYNQLFEENPINASGVDAKAILSARLSKSRRLENLIAQLPGEKKNGLFGNLIALSLGLTPNFKSNFDLAEDAKLQLSKDTYDDDLDNLLAQIGDQYADLFLAAKNLSDAILLSDILRVNTEITKAPLSASMIKRYDEHHQDLTLLKALVRQQLPEKYKEIFFDQSKNGYAGYIDGGASQEEFYKFIKPILEKMDGTEELLVKLNREDLLRKQRTFDNGSIPHQIHLGELHAILRRQEDFYPFLKDNREKIEKILTFRIPYYVGPLARGNSRFAWMTRKSEETITPWNFEEVVDKGASAQSFIERMTNFDKNLPNEKVLPKHSLLYEYFTVYNELTKVKYVTEGMRKPAFLSGEQKKAIVDLLFKTNRKVTVKQLKEDYFKKIECFDSVEISGVEDRFNASLGTYHDLLKIIKDKDFLDNEENEDILEDIVLTLTLFEDREMIEERLKTYAHLFDDKVMKQLKRRRYTGWGRLSRKLINGIRDKQSGKTILDFLKSDGFANRNFMQLIHDDSLTFKEDIQKAQVSGQGDSLHEHIANLAGSPAIKKGILQTVKVVDELVKVMGRHKPENIVIEMARENQTTQKGQKNSRERMKRIEEGIKELGSQILKEHPVENTQLQNEKLYLYYLQNGRDMYVDQELDINRLSDYDVDHIVPQSFLKDDSIDNKVLTRSDKARGKSDNVPSEEVVKKMKNYWRQLLNAKLITQRKFDNLTKAERGGLSELDKAGFIKRQLVETRQITKHVAQILDSRMNTKYDENDKLIREVKVITLKSKLVSDFRKDFQFYKVREINNYHHAHDAYLNAVVGTALIKKYPKLESEFVYGDYKVYDVRKMIAKSEQEIGKATAKYFFYSNIMNFFKTEITLANGEIRKRPLIETNGETGEIVWDKGRDFATVRKVLSMPQVNIVKKTEVQTGGFSKESILPKRNSDKLIARKKDWDPKKYGGFDSPTVAYSVLVVAKVEKGKSKKLKSVKELLGITIMERSSFEKNPIDFLEAKGYKEVKKDLIIKLPKYSLFELENGRKRMLASAGELQKGNELALPSKYVNFLYLASHYEKLKGSPEDNEQKQLFVEQHKHYLDEIIEQISEFSKRVILADANLDKVLSAYNKHRDKPIREQAENIIHLFTLTNLGAPAAFKYFDTTIDRKRYTSTKEVLDATLIHQSITGLYETRIDLSQLGGDGGGSSGSSGSSGSSGSSGSSGGTLNIEDEYRLHETSKGPDVPLGSTWLSDFPQAWAETGGMGLAFRQAPLIISLKATSTPVSIKQYPMSQEARLGIKPHIQRLLDQGILVPCQSPWNTPLLPVKKPGTNDYRPVQDLREVNKRVEDIHPTVPNPYNLLSGLPPSHQWYTVLDLKDAFFCLRLHPTSQSLFAFEWKDPEMGISGQLTWTRLPQGFKNSPTLFDEALHRDLADFRIQHPDLILLQYVDDLLLAATSELDCQQGTRALLQTLGDLGYRASAKKAQICQKQVKYLGYLLKEGQRWLTEARKETVMGQPTPKTPRQLREFLGTAGLCRLWIPGFAEMAAPLYPLTKTGTLFKWGPDQQKAYQEIKQALLTAPALGLPDLTKPFELFVDEKQGYAKGVLTQKLGPWRRPVAYLSKKLDPVAAGWPPCLRMVAAIAVLTKDVGKLTMGQPLVILAPHAVEALVKQPPDRWLSNARMTHYQALLLDTDRVQFGPIVALNPATLLPLPEEGLQHDCLDILAEAHGTRPDLTDQPLPDADHTWYTDGSSFLQEGQRRAGAAVTTETEVIWAKALPAGTSAQRAELIALTQALKMAAGKKLNVYTDSRYAFATAHIHGEIYRRRGLLTSEGKEIKNKDEILALLKALFLPKRLSIIHCPGHQKGNHAEARGNRMADQAAREVATRETPETSTLLAGKRTADGSEFEKRTADGSEFESPKKKAKVE

SEQ ID NO: 6351 - protein, 2103 aa, synthetic construct
MPAAKRVKLDGGDKKYSIGLDIGTNSVGWAVITDEYKVPSKKFKVLGNTDRHSIKKNLIGALLFDSGETAEATRLKRTARRRYTRRKNRICYLQEIFSNEMAKVDDSFFHRLEESFLVEEDKKHERHPIFGNIVDEVAYHEKYPTIYHLRKKLVDSTDKADLRLIYLALAHMIKFRGHFLIEGDLNPDNSDVDKLFIQLVQTYNQLFEENPINASGVDAKAILSARLSKSRRLENLIAQLPGEKKNGLFGNLIALSLGLTPNFKSNFDLAEDAKLQLSKDTYDDDLDNLLAQIGDQYADLFLAAKNLSDAILLSDILRVNTEITKAPLSASMIKRYDEHHQDLTLLKALVRQQLPEKYKEIFFDQSKNGYAGYIDGGASQEEFYKFIKPILEKMDGTEELLVKLNREDLLRKQRTFDNGSIPHQIHLGELHAILRRQEDFYPFLKDNREKIEKILTFRIPYYVGPLARGNSRFAWMTRKSEETITPWNFEEVVDKGASAQSFIERMTNFDKNLPNEKVLPKHSLLYEYFTVYNELTKVKYVTEGMRKPAFLSGEQKKAIVDLLFKTNRKVTVKQLKEDYFKKIECFDSVEISGVEDRFNASLGTYHDLLKIIKDKDFLDNEENEDILEDIVLTLTLFEDREMIEERLKTYAHLFDDKVMKQLKRRRYTGWGRLSRKLINGIRDKQSGKTILDFLKSDGFANRNFMQLIHDDSLTFKEDIQKAQVSGQGDSLHEHIANLAGSPAIKKGILQTVKVVDELVKVMGRHKPENIVIEMARENQTTQKGQKNSRERMKRIEEGIKELGSQILKEHPVENTQLQNEKLYLYYLQNGRDMYVDQELDINRLSDYDVDHIVPQSFLKDDSIDNKVLTRSDKARGKSDNVPSEEVVKKMKNYWRQLLNAKLITQRKFDNLTKAERGGLSELDKAGFIKRQLVETRQITKHVAQILDSRMNTKYDENDKLIREVKVITLKSKLVSDFRKDFQFYKVREINNYHHAHDAYLNAVVGTALIKKYPKLESEFVYGDYKVYDVRKMIAKSEQEIGKATAKYFFYSNIMNFFKTEITLANGEIRKRPLIETNGETGEIVWDKGRDFATVRKVLSMPQVNIVKKTEVQTGGFSKESILPKRNSDKLIARKKDWDPKKYGGFDSPTVAYSVLVVAKVEKGKSKKLKSVKELLGITIMERSSFEKNPIDFLEAKGYKEVKKDLIIKLPKYSLFELENGRKRMLASAGELQKGNELALPSKYVNFLYLASHYEKLKGSPEDNEQKQLFVEQHKHYLDEIIEQISEFSKRVILADANLDKVLSAYNKHRDKPIREQAENIIHLFTLTNLGAPAAFKYFDTTIDRKRYTSTKEVLDATLIHQSITGLYETRIDLSQLGGDGGGSSGSSGSSGSSGSSGSSGGTLNIEDEYRLHETSKGPDVPLGSTWLSDFPQAWAETGGMGLAVRQAPLIIPLKATSTPVSIKQYPMSQEARLGIKPHIQRLLDQGILVPCQSPWNTPLLPVKKPGTNDYRPVQDLREVNKRVEDIHPTVPNPYNLLSGLPPSHQWYTVLDLKDAFFCLRLHPTSQSLFAFEWRDPEMGISGQLTWTRLPQGFKNSPTLFNEALHRDLADFRIQHPDLILLQYVDDLLLAATSELDCQQGTRALLQTLGDLGYRASAKKAQICQKQVKYLGYLLKEGQRWLTEARKETVMGQPTPKTPRQLREFLGTAGFCRLWIPGFAEMAAPLYPLTKPGTLFEWGPDQQKAYQEIKQALLTAPALGLPDLTKPFELFVDEKQGYAKGVLTQKLGPWRRPVAYLSKKLDPVAAGWPPCLRMVAAIAVLTKDAGKLTMGQPLVILAPHAVEALVKQPPDRWLSNARMTHYQALLLDTDRVQFGPIVALNPATLLPLPEEGLQHDCLDILAEAHGTRPDLTDQPLPDADHTWYTDGSSFLQEGQRKAGAAVTTETEVVWAKALPAGTSAQRAELIALTQALKMAEGKKLNVYTDSRYAFATAHIHGEIYRRRGWLTSEGKEIKNKDEILALLKALFLPKRLSIIHCPGHQKGNRAEARGNRMADQAAREVATRETPETSTLLAGKRTADGSEFEKRTADGSEFESPKKKAKVE

SEQ ID NO: 6352 - protein, 2103 aa, synthetic construct
MPAAKRVKLDGGDKKYSIGLDIGTNSVGWAVITDEYKVPSKKFKVLGNTDRHSIKKNLIGALLFDSGETAEATRLKRTARRRYTRRKNRICYLQEIFSNEMAKVDDSFFHRLEESFLVEEDKKHERHPIFGNIVDEVAYHEKYPTIYHLRKKLVDSTDKADLRLIYLALAHMIKFRGHFLIEGDLNPDNSDVDKLFIQLVQTYNQLFEENPINASGVDAKAILSARLSKSRRLENLIAQLPGEKKNGLFGNLIALSLGLTPNFKSNFDLAEDAKLQLSKDTYDDDLDNLLAQIGDQYADLFLAAKNLSDAILLSDILRVNTEITKAPLSASMIKRYDEHHQDLTLLKALVRQQLPEKYKEIFFDQSKNGYAGYIDGGASQEEFYKFIKPILEKMDGTEELLVKLNREDLLRKQRTFDNGSIPHQIHLGELHAILRRQEDFYPFLKDNREKIEKILTFRIPYYVGPLARGNSRFAWMTRKSEETITPWNFEEVVDKGASAQSFIERMTNFDKNLPNEKVLPKHSLLYEYFTVYNELTKVKYVTEGMRKPAFLSGEQKKAIVDLLFKTNRKVTVKQLKEDYFKKIECFDSVEISGVEDRFNASLGTYHDLLKIIKDKDFLDNEENEDILEDIVLTLTLFEDREMIEERLKTYAHLFDDKVMKQLKRRRYTGWGRLSRKLINGIRDKQSGKTILDFLKSDGFANRNFMQLIHDDSLTFKEDIQKAQVSGQGDSLHEHIANLAGSPAIKKGILQTVKVVDELVKVMGRHKPENIVIEMARENQTTQKGQKNSRERMKRIEEGIKELGSQILKEHPVENTQLQNEKLYLYYLQNGRDMYVDQELDINRLSDYDVDHIVPQSFLKDDSIDNKVLTRSDKARGKSDNVPSEEVVKKMKNYWRQLLNAKLITQRKFDNLTKAERGGLSELDKAGFIKRQLVETRQITKHVAQILDSRMNTKYDENDKLIREVKVITLKSKLVSDFRKDFQFYKVREINNYHHAHDAYLNAVVGTALIKKYPKLESEFVYGDYKVYDVRKMIAKSEQEIGKATAKYFFYSNIMNFFKTEITLANGEIRKRPLIETNGETGEIVWDKGRDFATVRKVLSMPQVNIVKKTEVQTGGFSKESILPKRNSDKLIARKKDWDPKKYGGFDSPTVAYSVLVVAKVEKGKSKKLKSVKELLGITIMERSSFEKNPIDFLEAKGYKEVKKDLIIKLPKYSLFELENGRKRMLASAGELQKGNELALPSKYVNFLYLASHYEKLKGSPEDNEQKQLFVEQHKHYLDEIIEQISEFSKRVILADANLDKVLSAYNKHRDKPIREQAENIIHLFTLTNLGAPAAFKYFDTTIDRKRYTSTKEVLDATLIHQSITGLYETRIDLSQLGGDGGGSSGSSGSSGSSGSSGSSGGTLNIEDEHRLHETSKEPDVSLGSTWLSDFPQAWAETGGMGLAVRQAPLIIPLKATSTPVSIKQYPMSQEARLGIKPHIQRLLDQGILVPCQSPWNTPLLPVKKPGTNDYRPVQDLREVNKRVEDIHPTVPNPYNLLSGLPPSHQWYTVLDLKDAFFCLRLHPTSQPLFAFEWRDPEMGISGQLTWTRLPQGFKNSPTLFDEALHRDLADFRIQHPDLILLQYVDDLLLAATSELDCQQGTRALLQTLGNLGYRASAKKAQICQKQVKYLGYLLKEGQRWLTEARKETVMGQPTPKTPRQLREFLGTAGFCRLWIPGFAEMAAPLYPLTKTGTLFNWGPDQQKAYQEIKQALLTAPALGLPDLTKPFELFVDEKQGYAKGVLTQKLGPWRRPVAYLSKKLDPVAAGWPPCLRMVAAIAVLTKDAGKLTMGQPLVILAPHAVEALVKQPPDRWLSNARMTHYQALLLDTDRVQFGPVVALNPATLLPLPEEGLQHNCLDILAEAHGTRPDLTDQPLPDADHTWYTDGSSLLQEGQRKAGAAVTTETEVIWAKALPAGTSAQRAELIALTQALKMAEGKKLNVYTDSRYAFATAHIHGEIYRRRGLLTSEGKEIKNKDEILALLKALFLPKRLSIIHCPGHQKGHSAEARGNRMADQAARKAAITETPDTSTLLAGKRTADGSEFEKRTADGSEFESPKKKAKVE

SEQ ID NO: 6353 - protein, 2103 aa, synthetic construct
MPAAKRVKLDGGDKKYSIGLDIGTNSVGWAVITDEYKVPSKKFKVLGNTDRHSIKKNLIGALLFDSGETAEATRLKRTARRRYTRRKNRICYLQEIFSNEMAKVDDSFFHRLEESFLVEEDKKHERHPIFGNIVDEVAYHEKYPTIYHLRKKLVDSTDKADLRLIYLALAHMIKFRGHFLIEGDLNPDNSDVDKLFIQLVQTYNQLFEENPINASGVDAKAILSARLSKSRRLENLIAQLPGEKKNGLFGNLIALSLGLTPNFKSNFDLAEDAKLQLSKDTYDDDLDNLLAQIGDQYADLFLAAKNLSDAILLSDILRVNTEITKAPLSASMIKRYDEHHQDLTLLKALVRQQLPEKYKEIFFDQSKNGYAGYIDGGASQEEFYKFIKPILEKMDGTEELLVKLNREDLLRKQRTFDNGSIPHQIHLGELHAILRRQEDFYPFLKDNREKIEKILTFRIPYYVGPLARGNSRFAWMTRKSEETITPWNFEEVVDKGASAQSFIERMTNFDKNLPNEKVLPKHSLLYEYFTVYNELTKVKYVTEGMRKPAFLSGEQKKAIVDLLFKTNRKVTVKQLKEDYFKKIECFDSVEISGVEDRFNASLGTYHDLLKIIKDKDFLDNEENEDILEDIVLTLTLFEDREMIEERLKTYAHLFDDKVMKQLKRRRYTGWGRLSRKLINGIRDKQSGKTILDFLKSDGFANRNFMQLIHDDSLTFKEDIQKAQVSGQGDSLHEHIANLAGSPAIKKGILQTVKVVDELVKVMGRHKPENIVIEMARENQTTQKGQKNSRERMKRIEEGIKELGSQILKEHPVENTQLQNEKLYLYYLQNGRDMYVDQELDINRLSDYDVDHIVPQSFLKDDSIDNKVLTRSDKARGKSDNVPSEEVVKKMKNYWRQLLNAKLITQRKFDNLTKAERGGLSELDKAGFIKRQLVETRQITKHVAQILDSRMNTKYDENDKLIREVKVITLKSKLVSDFRKDFQFYKVREINNYHHAHDAYLNAVVGTALIKKYPKLESEFVYGDYKVYDVRKMIAKSEQEIGKATAKYFFYSNIMNFFKTEITLANGEIRKRPLIETNGETGEIVWDKGRDFATVRKVLSMPQVNIVKKTEVQTGGFSKESILPKRNSDKLIARKKDWDPKKYGGFDSPTVAYSVLVVAKVEKGKSKKLKSVKELLGITIMERSSFEKNPIDFLEAKGYKEVKKDLIIKLPKYSLFELENGRKRMLASAGELQKGNELALPSKYVNFLYLASHYEKLKGSPEDNEQKQLFVEQHKHYLDEIIEQISEFSKRVILADANLDKVLSAYNKHRDKPIREQAENIIHLFTLTNLGAPAAFKYFDTTIDRKRYTSTKEVLDATLIHQSITGLYETRIDLSQLGGDGGGSSGSSGSSGSSGSSGSSGGTLNIEDEYRLHEISTEPDVSPGSTWLSDFPQAWAETGGMGLAVRQAPLIIPLKATSTPVSIKQYPMSQEAKLGIKPHIQRLLDQGILVPCQSPWNTPLLPVKKPGTNDYRPVQGLREVNKRVEDIHPTVPNPYNLLSGLPTSHRWYTVLDLKDAFFCLRLHPTSQPLFASEWRDPGMGISGQLTWTRLPQGFKNSPTLFDEALHRGLADFRIQHPDLILLQYVDDLLLAATSELDCQQGTRALLKTLGNLGYRASAKKAQICQKQVKYLGYLLREGQRWLTEARKETVMGQPTPKTPRQLREFLGTAGFCRLWIPRFAEMAAPLYPLTKTGTLFNWGPDQQKAYHEIKQALLTAPALGLPDLTKPFELFVDEKQGYAKGVLTQKLGPWRRPVAYLSKKLDPVAAGWPPCLRMVAAIAVLTKDAGKLTMGQPLVILAPHAVEALVKQPPDRWLSNARMTHYQAMLLDTDRVQFGPVVALNPATLLPLPEEGAPHDCLEILAETHGTEPDLTDQPIPDADHTWYTDGSSFLQEGQRKAGAAVTTETEVIWARALPAGTSAQRAELIALTQALKMAEGKRLNVYTDSRYAFATAHIHGEIYKRRGLLTSEGREIKNKSEILALLKALFLPKRLSIIHCLGHQKGDSAEARGNRLADQAAREAAIKTPPDTSTLLAGKRTADGSEFEKRTADGSEFESPKKKAKVE

SEQ ID NO: 6354 - protein, 2097 aa, synthetic construct
MPAAKRVKLDGGDKKYSIGLDIGTNSVGWAVITDEYKVPSKKFKVLGNTDRHSIKKNLIGALLFDSGETAEATRLKRTARRRYTRRKNRICYLQEIFSNEMAKVDDSFFHRLEESFLVEEDKKHERHPIFGNIVDEVAYHEKYPTIYHLRKKLVDSTDKADLRLIYLALAHMIKFRGHFLIEGDLNPDNSDVDKLFIQLVQTYNQLFEENPINASGVDAKAILSARLSKSRRLENLIAQLPGEKKNGLFGNLIALSLGLTPNFKSNFDLAEDAKLQLSKDTYDDDLDNLLAQIGDQYADLFLAAKNLSDAILLSDILRVNTEITKAPLSASMIKRYDEHHQDLTLLKALVRQQLPEKYKEIFFDQSKNGYAGYIDGGASQEEFYKFIKPILEKMDGTEELLVKLNREDLLRKQRTFDNGSIPHQIHLGELHAILRRQEDFYPFLKDNREKIEKILTFRIPYYVGPLARGNSRFAWMTRKSEETITPWNFEEVVDKGASAQSFIERMTNFDKNLPNEKVLPKHSLLYEYFTVYNELTKVKYVTEGMRKPAFLSGEQKKAIVDLLFKTNRKVTVKQLKEDYFKKIECFDSVEISGVEDRFNASLGTYHDLLKIIKDKDFLDNEENEDILEDIVLTLTLFEDREMIEERLKTYAHLFDDKVMKQLKRRRYTGWGRLSRKLINGIRDKQSGKTILDFLKSDGFANRNFMQLIHDDSLTFKEDIQKAQVSGQGDSLHEHIANLAGSPAIKKGILQTVKVVDELVKVMGRHKPENIVIEMARENQTTQKGQKNSRERMKRIEEGIKELGSQILKEHPVENTQLQNEKLYLYYLQNGRDMYVDQELDINRLSDYDVDHIVPQSFLKDDSIDNKVLTRSDKARGKSDNVPSEEVVKKMKNYWRQLLNAKLITQRKFDNLTKAERGGLSELDKAGFIKRQLVETRQITKHVAQILDSRMNTKYDENDKLIREVKVITLKSKLVSDFRKDFQFYKVREINNYHHAHDAYLNAVVGTALIKKYPKLESEFVYGDYKVYDVRKMIAKSEQEIGKATAKYFFYSNIMNFFKTEITLANGEIRKRPLIETNGETGEIVWDKGRDFATVRKVLSMPQVNIVKKTEVQTGGFSKESILPKRNSDKLIARKKDWDPKKYGGFDSPTVAYSVLVVAKVEKGKSKKLKSVKELLGITIMERSSFEKNPIDFLEAKGYKEVKKDLIIKLPKYSLFELENGRKRMLASAGELQKGNELALPSKYVNFLYLASHYEKLKGSPEDNEQKQLFVEQHKHYLDEIIEQISEFSKRVILADANLDKVLSAYNKHRDKPIREQAENIIHLFTLTNLGAPAAFKYFDTTIDRKRYTSTKEVLDATLIHQSITGLYETRIDLSQLGGDGGGSSGSSGSSGSSGSSGSSGGTLQLDDEYRLYSPLVKPDQNIQFWLEQFPQAWAETAGMGLAKQVPPQVIQLKASATPVSVRQYPLSKEAQEGIRPHVQRLIQQGILVPVQSPWNTPLLPVRKPGTNDYRPVQDLREVNKRVQDIHPTVPNPYNLLCALPPQRSWYTVLDLKDAFFCLRLHPTSQPLFAFEWRDPGTGRTGQLTWTRLPQGFKNSPTIFDEALHRDLANFRIQHPQVTLLQYVDDLLLAGATKQDCLEGTKALLLELSDLGYRASAKKAQICRREVTYLGYSLRDGQRWLTEARKKTVVQIPAPTTAKQVREFLGTAGFCRLWIPGFATLAAPLYPLTKEKGEFSWAPEHQKAFDAIKKALLSAPALALPDVTKPFTLYVDERKGVARGVLTQTLGPWRRPVAYLSKKLDPVASGWPVCLKAIAAVAILVKDADKLTLGQNITVIAPHALENIVRQPPDRWMTNARMTHYQSLLLTERVTFAPPAALNPATLLPEETDEPVTHDCHQLLIEETGVRKDLTDIPLTGEVLTWFTDGSSYVVEGKRMAGAAVVDGTRTIWASSLPEGTSAQKAELMALTQALRLAEGKSINIYTDSRYAFATAHVHGAIYKQRGLLTSAGREIKNKEEILSLLEALHLPKRLAIIHCPGHQKAKDPISRGNQMADRVAKQAAQGVNLLAGKRTADGSEFEKRTADGSEFESPKKKAKVE

SEQ ID NO: 6355 - protein, 2183 aa, synthetic construct
MPAAKRVKLDGGDKKYSIGLDIGTNSVGWAVITDEYKVPSKKFKVLGNTDRHSIKKNLIGALLFDSGETAEATRLKRTARRRYTRRKNRICYLQEIFSNEMAKVDDSFFHRLEESFLVEEDKKHERHPIFGNIVDEVAYHEKYPTIYHLRKKLVDSTDKADLRLIYLALAHMIKFRGHFLIEGDLNPDNSDVDKLFIQLVQTYNQLFEENPINASGVDAKAILSARLSKSRRLENLIAQLPGEKKNGLFGNLIALSLGLTPNFKSNFDLAEDAKLQLSKDTYDDDLDNLLAQIGDQYADLFLAAKNLSDAILLSDILRVNTEITKAPLSASMIKRYDEHHQDLTLLKALVRQQLPEKYKEIFFDQSKNGYAGYIDGGASQEEFYKFIKPILEKMDGTEELLVKLNREDLLRKQRTFDNGSIPHQIHLGELHAILRRQEDFYPFLKDNREKIEKILTFRIPYYVGPLARGNSRFAWMTRKSEETITPWNFEEVVDKGASAQSFIERMTNFDKNLPNEKVLPKHSLLYEYFTVYNELTKVKYVTEGMRKPAFLSGEQKKAIVDLLFKTNRKVTVKQLKEDYFKKIECFDSVEISGVEDRFNASLGTYHDLLKIIKDKDFLDNEENEDILEDIVLTLTLFEDREMIEERLKTYAHLFDDKVMKQLKRRRYTGWGRLSRKLINGIRDKQSGKTILDFLKSDGFANRNFMQLIHDDSLTFKEDIQKAQVSGQGDSLHEHIANLAGSPAIKKGILQTVKVVDELVKVMGRHKPENIVIEMARENQTTQKGQKNSRERMKRIEEGIKELGSQILKEHPVENTQLQNEKLYLYYLQNGRDMYVDQELDINRLSDYDVDHIVPQSFLKDDSIDNKVLTRSDKARGKSDNVPSEEVVKKMKNYWRQLLNAKLITQRKFDNLTKAERGGLSELDKAGFIKRQLVETRQITKHVAQILDSRMNTKYDENDKLIREVKVITLKSKLVSDFRKDFQFYKVREINNYHHAHDAYLNAVVGTALIKKYPKLESEFVYGDYKVYDVRKMIAKSEQEIGKATAKYFFYSNIMNFFKTEITLANGEIRKRPLIETNGETGEIVWDKGRDFATVRKVLSMPQVNIVKKTEVQTGGFSKESILPKRNSDKLIARKKDWDPKKYGGFDSPTVAYSVLVVAKVEKGKSKKLKSVKELLGITIMERSSFEKNPIDFLEAKGYKEVKKDLIIKLPKYSLFELENGRKRMLASAGELQKGNELALPSKYVNFLYLASHYEKLKGSPEDNEQKQLFVEQHKHYLDEIIEQISEFSKRVILADANLDKVLSAYNKHRDKPIREQAENIIHLFTLTNLGAPAAFKYFDTTIDRKRYTSTKEVLDATLIHQSITGLYETRIDLSQLGGDGGGSSGSSGSSGSSGSSGSSGGMDPLQLLQPLEAEIKGTKLKAHWNSGATITCVPEAFLEDERPIQTMLIKTIHGEKQQDVYYLTFKVQGRKVEAEVLASPYDYILLNPSDVPWLMKKPLQLTVLVPLHEYQERLLQQTALPKEQKELLQKLFLKYDALWQHWENQVGHRRIKPHNIATGTLAPRPQKQYPINPKAKPSIQIVIDDLLKQGVLIQQNSTMNTPVYPVPKPDGKWRMVLDYREVNKTIPLIAAQNQHSAGILSSIYRGKYKTTLDLTNGFWAHPITPESYWLTAFTWQGKQYCWTRLPQGFLNSPALFNADVVDLLKEIPNVQAYVDDIYISHDDPQEHLEQLEKIFSILLNAGYVVSLKKSEIAQREVEFLGFNITKEGRGLTDTFKQKLLNITPPKDLKQLQSILGLLNFARNFIPNYSELVKPLYTIVAPANGKFISWTEDNSNQLQHIISVLNQADNLEERNPETRLIIKVNSSPSAGYIRYYNEGSKRPIMYVNYIFSKAEAKFTQTEKLLTTMHKGLIKAMDLAMGQEILVYSPIVSMTKIQRTPLPERKALPVRWITWMTYLEDPRIQFHYDKSLPELQQIPNVTEDVIAKTKHPSEFAMVFYTDGSAIKHPDVNKSHSAGMGIAQVQFIPEYKIVHQWSIPLGDHTAQLAEIAAVEFACKKALKISGPVLIVTDSFYVAESANKELPYWKSNGFLNNKKKPLRHVSKWKSIAECLQLKPDIIIMHEKGHQQPMTTLHTEGNNLADKLATQGSYVVHAGKRTADGSEFEKRTADGSEFESPKKKAKVE

SEQ ID NO: 6356 - protein, 2094 aa, synthetic construct
MPAAKRVKLDGGDKKYSIGLDIGTNSVGWAVITDEYKVPSKKFKVLGNTDRHSIKKNLIGALLFDSGETAEATRLKRTARRRYTRRKNRICYLQEIFSNEMAKVDDSFFHRLEESFLVEEDKKHERHPIFGNIVDEVAYHEKYPTIYHLRKKLVDSTDKADLRLIYLALAHMIKFRGHFLIEGDLNPDNSDVDKLFIQLVQTYNQLFEENPINASGVDAKAILSARLSKSRRLENLIAQLPGEKKNGLFGNLIALSLGLTPNFKSNFDLAEDAKLQLSKDTYDDDLDNLLAQIGDQYADLFLAAKNLSDAILLSDILRVNTEITKAPLSASMIKRYDEHHQDLTLLKALVRQQLPEKYKEIFFDQSKNGYAGYIDGGASQEEFYKFIKPILEKMDGTEELLVKLNREDLLRKQRTFDNGSIPHQIHLGELHAILRRQEDFYPFLKDNREKIEKILTFRIPYYVGPLARGNSRFAWMTRKSEETITPWNFEEVVDKGASAQSFIERMTNFDKNLPNEKVLPKHSLLYEYFTVYNELTKVKYVTEGMRKPAFLSGEQKKAIVDLLFKTNRKVTVKQLKEDYFKKIECFDSVEISGVEDRFNASLGTYHDLLKIIKDKDFLDNEENEDILEDIVLTLTLFEDREMIEERLKTYAHLFDDKVMKQLKRRRYTGWGRLSRKLINGIRDKQSGKTILDFLKSDGFANRNFMQLIHDDSLTFKEDIQKAQVSGQGDSLHEHIANLAGSPAIKKGILQTVKVVDELVKVMGRHKPENIVIEMARENQTTQKGQKNSRERMKRIEEGIKELGSQILKEHPVENTQLQNEKLYLYYLQNGRDMYVDQELDINRLSDYDVDHIVPQSFLKDDSIDNKVLTRSDKARGKSDNVPSEEVVKKMKNYWRQLLNAKLITQRKFDNLTKAERGGLSELDKAGFIKRQLVETRQITKHVAQILDSRMNTKYDENDKLIREVKVITLKSKLVSDFRKDFQFYKVREINNYHHAHDAYLNAVVGTALIKKYPKLESEFVYGDYKVYDVRKMIAKSEQEIGKATAKYFFYSNIMNFFKTEITLANGEIRKRPLIETNGETGEIVWDKGRDFATVRKVLSMPQVNIVKKTEVQTGGFSKESILPKRNSDKLIARKKDWDPKKYGGFDSPTVAYSVLVVAKVEKGKSKKLKSVKELLGITIMERSSFEKNPIDFLEAKGYKEVKKDLIIKLPKYSLFELENGRKRMLASAGELQKGNELALPSKYVNFLYLASHYEKLKGSPEDNEQKQLFVEQHKHYLDEIIEQISEFSKRVILADANLDKVLSAYNKHRDKPIREQAENIIHLFTLTNLGAPAAFKYFDTTIDRKRYTSTKEVLDATLIHQSITGLYETRIDLSQLGGDGGGSSGSSGSSGSSGSSGSSGGIPWLMKKPLQLTTLVPLQEYEERLLKQTMLTGSYKEKLQSLFLKYDALWQHWENQVGHRRIKPHHIATGTVNPRPQKQYPINPKAKASIQTVINDLLKQGVLIQQNSIMNTPVYPVPKPDGKWRMVLDYREVNKTIPLIAAQNQHSAGILSSIFRGKYKTTLDLSNGFWAHSITPESYWLTAFTWLGQQYCWTRLPQGFLNSPALFNADVVDLLKEVPNVQVYVDDIYISHDDPREHLEQLEKVFSLLLNAGYVVSLKKSEIAQHEVEFLGFNITKEGRGLTETFKQKLLNITPPRDLKQLQSILGKLNFARNFIPNFSELVKPLYNIIATAPGKYITWTTDNSQQLQNIISMLNSAENLEERNPEVRLIMKVNTSPSAGYIRFYNEFAKRPIMYLNYVYTKAEVKFTNTEKLLTTIHKGLIKALDLGMGQEILVYSPIVSMTKIQKTPLPERKALPIRWITWMSYLEDPRIQFHYDKTLPELQQVPTVTDDIIAKIKHPSEFSMVFYTDGSAIKHPNVNKSHNAGMGIAQVQFKPEFTVINTWSIPLGDHTAQLAEVAAVEFACKKALKIDGPVLIVTDSFYVAESVNKELPYWQSNGFFNNKKKPLKHVSKWKSIADCIQLKPDIIIIHEKGHQPTASTFHTEGNNLADKLATQGSYVVNAGKRTADGSEFEKRTADGSEFESPKKKAKVE

SEQ ID NO: 6357 - protein, 2183 aa, synthetic construct
MPAAKRVKLDGGDKKYSIGLDIGTNSVGWAVITDEYKVPSKKFKVLGNTDRHSIKKNLIGALLFDSGETAEATRLKRTARRRYTRRKNRICYLQEIFSNEMAKVDDSFFHRLEESFLVEEDKKHERHPIFGNIVDEVAYHEKYPTIYHLRKKLVDSTDKADLRLIYLALAHMIKFRGHFLIEGDLNPDNSDVDKLFIQLVQTYNQLFEENPINASGVDAKAILSARLSKSRRLENLIAQLPGEKKNGLFGNLIALSLGLTPNFKSNFDLAEDAKLQLSKDTYDDDLDNLLAQIGDQYADLFLAAKNLSDAILLSDILRVNTEITKAPLSASMIKRYDEHHQDLTLLKALVRQQLPEKYKEIFFDQSKNGYAGYIDGGASQEEFYKFIKPILEKMDGTEELLVKLNREDLLRKQRTFDNGSIPHQIHLGELHAILRRQEDFYPFLKDNREKIEKILTFRIPYYVGPLARGNSRFAWMTRKSEETITPWNFEEVVDKGASAQSFIERMTNFDKNLPNEKVLPKHSLLYEYFTVYNELTKVKYVTEGMRKPAFLSGEQKKAIVDLLFKTNRKVTVKQLKEDYFKKIECFDSVEISGVEDRFNASLGTYHDLLKIIKDKDFLDNEENEDILEDIVLTLTLFEDREMIEERLKTYAHLFDDKVMKQLKRRRYTGWGRLSRKLINGIRDKQSGKTILDFLKSDGFANRNFMQLIHDDSLTFKEDIQKAQVSGQGDSLHEHIANLAGSPAIKKGILQTVKVVDELVKVMGRHKPENIVIEMARENQTTQKGQKNSRERMKRIEEGIKELGSQILKEHPVENTQLQNEKLYLYYLQNGRDMYVDQELDINRLSDYDVDHIVPQSFLKDDSIDNKVLTRSDKARGKSDNVPSEEVVKKMKNYWRQLLNAKLITQRKFDNLTKAERGGLSELDKAGFIKRQLVETRQITKHVAQILDSRMNTKYDENDKLIREVKVITLKSKLVSDFRKDFQFYKVREINNYHHAHDAYLNAVVGTALIKKYPKLESEFVYGDYKVYDVRKMIAKSEQEIGKATAKYFFYSNIMNFFKTEITLANGEIRKRPLIETNGETGEIVWDKGRDFATVRKVLSMPQVNIVKKTEVQTGGFSKESILPKRNSDKLIARKKDWDPKKYGGFDSPTVAYSVLVVAKVEKGKSKKLKSVKELLGITIMERSSFEKNPIDFLEAKGYKEVKKDLIIKLPKYSLFELENGRKRMLASAGELQKGNELALPSKYVNFLYLASHYEKLKGSPEDNEQKQLFVEQHKHYLDEIIEQISEFSKRVILADANLDKVLSAYNKHRDKPIREQAENIIHLFTLTNLGAPAAFKYFDTTIDRKRYTSTKEVLDATLIHQSITGLYETRIDLSQLGGDGGGSSGSSGSSGSSGSSGSSGGMDPLQLLQPLEAEIKGTKLKAHWNSGATITCVPQAFLEEEVPIKNIWIKTIHGEKEQPVYYLTFKIQGRKVEAEVISSPYDYILVSPSDIPWLMKKPLQLTTLVPLQEYEERLLKQTMLTGSYKEKLQSLFLKYDALWQHWENQVGHRRIKPHHIATGTVNPRPQKQYPINPKAKASIQTVINDLLKQGVLIQQNSIMNTPVYPVPKPDGKWRMVLDYREVNKTIPLIAAQNQHSAGILSSIFRGKYKTTLDLSNGFWAHSITPESYWLTAFTWLGQQYCWTRLPQGFLNSPALFNADVVDLLKEVPNVQVYVDDIYISHDDPREHLEQLEKVFSLLLNAGYVVSLKKSEIAQHEVEFLGFNITKEGRGLTETFKQKLLNITPPRDLKQLQSILGLLNFARNFIPNFSELVKPLYNIIATAPGKYITWTTDNSQQLQNIISMLNSAENLEERNPEVRLIMKVNTSPSAGYIRFYNEFAKRPIMYLNYVYTKAEVKFTNTEKLLTTIHKGLIKALDLGMGQEILVYSPIVSMTKIQKTPLPERKALPIRWITWMSYLEDPRIQFHYDKTLPELQQVPTVTDDIIAKIKHPSEFSMVFYTDGSAIKHPNVNKSHNAGMGIAQVQFKPEFTVINTWSIPLGDHTAQLAEVAAVEFACKKALKIDGPVLIVTDSFYVAESVNKELPYWQSNGFFNNKKKPLKHVSKWKSIADCIQLKPDIIIIHEKGHQPTASTFHTEGNNLADKLATQGSYVVNAGKRTADGSEFEKRTADGSEFESPKKKAKVE

SEQ ID NO: 6358 - protein, 2101 aa, synthetic construct
MPAAKRVKLDGGDKKYSIGLDIGTNSVGWAVITDEYKVPSKKFKVLGNTDRHSIKKNLIGALLFDSGETAEATRLKRTARRRYTRRKNRICYLQEIFSNEMAKVDDSFFHRLEESFLVEEDKKHERHPIFGNIVDEVAYHEKYPTIYHLRKKLVDSTDKADLRLIYLALAHMIKFRGHFLIEGDLNPDNSDVDKLFIQLVQTYNQLFEENPINASGVDAKAILSARLSKSRRLENLIAQLPGEKKNGLFGNLIALSLGLTPNFKSNFDLAEDAKLQLSKDTYDDDLDNLLAQIGDQYADLFLAAKNLSDAILLSDILRVNTEITKAPLSASMIKRYDEHHQDLTLLKALVRQQLPEKYKEIFFDQSKNGYAGYIDGGASQEEFYKFIKPILEKMDGTEELLVKLNREDLLRKQRTFDNGSIPHQIHLGELHAILRRQEDFYPFLKDNREKIEKILTFRIPYYVGPLARGNSRFAWMTRKSEETITPWNFEEVVDKGASAQSFIERMTNFDKNLPNEKVLPKHSLLYEYFTVYNELTKVKYVTEGMRKPAFLSGEQKKAIVDLLFKTNRKVTVKQLKEDYFKKIECFDSVEISGVEDRFNASLGTYHDLLKIIKDKDFLDNEENEDILEDIVLTLTLFEDREMIEERLKTYAHLFDDKVMKQLKRRRYTGWGRLSRKLINGIRDKQSGKTILDFLKSDGFANRNFMQLIHDDSLTFKEDIQKAQVSGQGDSLHEHIANLAGSPAIKKGILQTVKVVDELVKVMGRHKPENIVIEMARENQTTQKGQKNSRERMKRIEEGIKELGSQILKEHPVENTQLQNEKLYLYYLQNGRDMYVDQELDINRLSDYDVDHIVPQSFLKDDSIDNKVLTRSDKARGKSDNVPSEEVVKKMKNYWRQLLNAKLITQRKFDNLTKAERGGLSELDKAGFIKRQLVETRQITKHVAQILDSRMNTKYDENDKLIREVKVITLKSKLVSDFRKDFQFYKVREINNYHHAHDAYLNAVVGTALIKKYPKLESEFVYGDYKVYDVRKMIAKSEQEIGKATAKYFFYSNIMNFFKTEITLANGEIRKRPLIETNGETGEIVWDKGRDFATVRKVLSMPQVNIVKKTEVQTGGFSKESILPKRNSDKLIARKKDWDPKKYGGFDSPTVAYSVLVVAKVEKGKSKKLKSVKELLGITIMERSSFEKNPIDFLEAKGYKEVKKDLIIKLPKYSLFELENGRKRMLASAGELQKGNELALPSKYVNFLYLASHYEKLKGSPEDNEQKQLFVEQHKHYLDEIIEQISEFSKRVILADANLDKVLSAYNKHRDKPIREQAENIIHLFTLTNLGAPAAFKYFDTTIDRKRYTSTKEVLDATLIHQSITGLYETRIDLSQLGGDGGGSSGSSGSSGSSGSSGSSGGVLNLEEEYRLHEKPVPSSIDPSWLQLFPTVWAERAGMGLANQVPPVVVELRSGASPVAVRQYPMSKEAREGIRPHIQRFLDLGVLVPCQSPWNTPLLPVKKPGTNDYRPVQDLREINKRVQDIHPTVPNPYNLLSSLPPSHTWYSVLDLKDAFFCLKLHPNSQPLFAFEWRDPEKGNTGQLTWTRLPQGFKNSPTLFDEALHRDLAPFRALNPQVVLLQYVDDLLVAAPTYRDCKEGTQKLLQELSKLGYRVSAKKAQLCQKEVTYLGYLLKEGKRWLTPARKATVMKIPPPTTPRQVREFLGTAGFCRLWIPGFASLAAPLYPLTKESIPFIWTEEHQKAFDRIKEALLSAPALALPDLTKPFTLYVDERAGVARGVLTQTLGPWRRPVAYLSKKLDPVASGWPTCLKAVAAVALLLKDADKLTLGQNVTVIASHSLESIVRQPPDRWMTNARMTHYQSLLLNERVSFAPPAVLNPATLLPVESEATPVHRCSEILAEETGTRRDLKDQPLPGVPAWYTDGSSFIAEGKRRAGAAIVDGKRTVWASSLPEGTSAQKAELVALTQALRLAEGKDINIYTDSRYAFATAHIHGAIYKQRGLLTSAGKDIKNKEEILALLEAIHLPKRVAIIHCPGHQKGNDPVATGNRRADEAAKQAALSTRVLAETTKPAGKRTADGSEFEKRTADGSEFESPKKKAKVE

SEQ ID NO: 6359 - protein, 2103 aa, synthetic construct
MPAAKRVKLDGGDKKYSIGLDIGTNSVGWAVITDEYKVPSKKFKVLGNTDRHSIKKNLIGALLFDSGETAEATRLKRTARRRYTRRKNRICYLQEIFSNEMAKVDDSFFHRLEESFLVEEDKKHERHPIFGNIVDEVAYHEKYPTIYHLRKKLVDSTDKADLRLIYLALAHMIKFRGHFLIEGDLNPDNSDVDKLFIQLVQTYNQLFEENPINASGVDAKAILSARLSKSRRLENLIAQLPGEKKNGLFGNLIALSLGLTPNFKSNFDLAEDAKLQLSKDTYDDDLDNLLAQIGDQYADLFLAAKNLSDAILLSDILRVNTEITKAPLSASMIKRYDEHHQDLTLLKALVRQQLPEKYKEIFFDQSKNGYAGYIDGGASQEEFYKFIKPILEKMDGTEELLVKLNREDLLRKQRTFDNGSIPHQIHLGELHAILRRQEDFYPFLKDNREKIEKILTFRIPYYVGPLARGNSRFAWMTRKSEETITPWNFEEVVDKGASAQSFIERMTNFDKNLPNEKVLPKHSLLYEYFTVYNELTKVKYVTEGMRKPAFLSGEQKKAIVDLLFKTNRKVTVKQLKEDYFKKIECFDSVEISGVEDRFNASLGTYHDLLKIIKDKDFLDNEENEDILEDIVLTLTLFEDREMIEERLKTYAHLFDDKVMKQLKRRRYTGWGRLSRKLINGIRDKQSGKTILDFLKSDGFANRNFMQLIHDDSLTFKEDIQKAQVSGQGDSLHEHIANLAGSPAIKKGILQTVKVVDELVKVMGRHKPENIVIEMARENQTTQKGQKNSRERMKRIEEGIKELGSQILKEHPVENTQLQNEKLYLYYLQNGRDMYVDQELDINRLSDYDVDHIVPQSFLKDDSIDNKVLTRSDKARGKSDNVPSEEVVKKMKNYWRQLLNAKLITQRKFDNLTKAERGGLSELDKAGFIKRQLVETRQITKHVAQILDSRMNTKYDENDKLIREVKVITLKSKLVSDFRKDFQFYKVREINNYHHAHDAYLNAVVGTALIKKYPKLESEFVYGDYKVYDVRKMIAKSEQEIGKATAKYFFYSNIMNFFKTEITLANGEIRKRPLIETNGETGEIVWDKGRDFATVRKVLSMPQVNIVKKTEVQTGGFSKESILPKRNSDKLIARKKDWDPKKYGGFDSPTVAYSVLVVAKVEKGKSKKLKSVKELLGITIMERSSFEKNPIDFLEAKGYKEVKKDLIIKLPKYSLFELENGRKRMLASAGELQKGNELALPSKYVNFLYLASHYEKLKGSPEDNEQKQLFVEQHKHYLDEIIEQISEFSKRVILADANLDKVLSAYNKHRDKPIREQAENIIHLFTLTNLGAPAAFKYFDTTIDRKRYTSTKEVLDATLIHQSITGLYETRIDLSQLGGDGGGSSGSSGSSGSSGSSGSSGGTLNIEDEYRLHETSKEPDVPLGSTWLSDFPQAWAETGGMGLAVRQAPLIIPLKATSTPVSIKQYPMSQEARLGIKPHIQRLLDQGILVPCQSPWNTPLLPVKKPGTNDYRPVQDLREVNKRVEDIHPTVPNPYNLLSGLPPSHQWYTVLDLKDAFFCLRLHPTSQPLFAFEWRDPEMGISGQLTWTRLPQGFKNSPTLFNEALHRDLADFRIQHPDLILLQYVDDLLLAATSEQDCQRGTRALLQTLGNLGYRASAKKAQICQKQVKYLGYLLKEGQRWLTEARKETVMGQPTPKTPRQLREFLGTAGFCRLWIPGFAEMAAPLYPLTKPGTLFNWGPDQQKAYQEIKQALLTAPALGLPDLTKPFELFVDEKQGYAKGVLTQKLGPWRRPVAYLSKKLDPVAAGWPPCLRMVAAIAVLTKDAGKLTMGQPLVILAPHAVEALVKQPPDRWLSNARMTHYQAMLLDTDRVQFGPVVALNPATLLPLPEKEAPHDCLEILAETHGTRPDLTDQPIPDADYTWYTDGSSFLQEGQRRAGAAVTTETEVIWARALPAGTSAQRAELIALTQALKMAEGKKLNVYTDSRYAFATAHVHGEIYRRRGWLTSEGREIKNKNEILALLKALFLPKRLSIIHCPGHQKGNSAEARGNRMADQAAREAAMKAVLETSTLLAGKRTADGSEFEKRTADGSEFESPKKKAKVE

SEQ ID NO: 6360 - protein, 2096 aa, synthetic construct
MPAAKRVKLDGGDKKYSIGLDIGTNSVGWAVITDEYKVPSKKFKVLGNTDRHSIKKNLIGALLFDSGETAEATRLKRTARRRYTRRKNRICYLQEIFSNEMAKVDDSFFHRLEESFLVEEDKKHERHPIFGNIVDEVAYHEKYPTIYHLRKKLVDSTDKADLRLIYLALAHMIKFRGHFLIEGDLNPDNSDVDKLFIQLVQTYNQLFEENPINASGVDAKAILSARLSKSRRLENLIAQLPGEKKNGLFGNLIALSLGLTPNFKSNFDLAEDAKLQLSKDTYDDDLDNLLAQIGDQYADLFLAAKNLSDAILLSDILRVNTEITKAPLSASMIKRYDEHHQDLTLLKALVRQQLPEKYKEIFFDQSKNGYAGYIDGGASQEEFYKFIKPILEKMDGTEELLVKLNREDLLRKQRTFDNGSIPHQIHLGELHAILRRQEDFYPFLKDNREKIEKILTFRIPYYVGPLARGNSRFAWMTRKSEETITPWNFEEVVDKGASAQSFIERMTNFDKNLPNEKVLPKHSLLYEYFTVYNELTKVKYVTEGMRKPAFLSGEQKKAIVDLLFKTNRKVTVKQLKEDYFKKIECFDSVEISGVEDRFNASLGTYHDLLKIIKDKDFLDNEENEDILEDIVLTLTLFEDREMIEERLKTYAHLFDDKVMKQLKRRRYTGWGRLSRKLINGIRDKQSGKTILDFLKSDGFANRNFMQLIHDDSLTFKEDIQKAQVSGQGDSLHEHIANLAGSPAIKKGILQTVKVVDELVKVMGRHKPENIVIEMARENQTTQKGQKNSRERMKRIEEGIKELGSQILKEHPVENTQLQNEKLYLYYLQNGRDMYVDQELDINRLSDYDVDHIVPQSFLKDDSIDNKVLTRSDKARGKSDNVPSEEVVKKMKNYWRQLLNAKLITQRKFDNLTKAERGGLSELDKAGFIKRQLVETRQITKHVAQILDSRMNTKYDENDKLIREVKVITLKSKLVSDFRKDFQFYKVREINNYHHAHDAYLNAVVGTALIKKYPKLESEFVYGDYKVYDVRKMIAKSEQEIGKATAKYFFYSNIMNFFKTEITLANGEIRKRPLIETNGETGEIVWDKGRDFATVRKVLSMPQVNIVKKTEVQTGGFSKESILPKRNSDKLIARKKDWDPKKYGGFDSPTVAYSVLVVAKVEKGKSKKLKSVKELLGITIMERSSFEKNPIDFLEAKGYKEVKKDLIIKLPKYSLFELENGRKRMLASAGELQKGNELALPSKYVNFLYLASHYEKLKGSPEDNEQKQLFVEQHKHYLDEIIEQISEFSKRVILADANLDKVLSAYNKHRDKPIREQAENIIHLFTLTNLGAPAAFKYFDTTIDRKRYTSTKEVLDATLIHQSITGLYETRIDLSQLGGDGGEAAAKGGTVSLQDEHRLFDIPVTTSLPDVWLQDFPQAWAETGGLGRAKCQAPIIIDLKPTAVPVSIKQYPMSLEAHMGIRQHIIKFLELGVLRPCRSPWNTPLLPVKKPGTQDYRPVQDLREINKRTVDIHPTVPNPYNLLSTLKPDYSWYTVLDLKDAFFCLPLAPQSQELFAFEWKDPERGISGQLTWTRLPQGFKNSPTLFNEALHRDLTDFRTQHPEVTLLQYVDDLLLAAPTKKACTQGTRHLLQELGEKGYRASAKKAQICQTKVTYLGYILSEGKRWLTPGRIETVARIPPPRNPREVREFLGTAGFCRLWIPGFAELAAPLYALTKPSTPFTWQTEHQLAFEALKKALLSAPALGLPDTSKPFTLFLDERQGIAKGVLTQKLGPWKRPVAYLSKKLDPVAAGWPPCLRIMAATAMLVKDSAKLTLGQPLTVITPHTLEAIVRQPPDRWITNARLTHYQALLLDTDRVQFGPPVTLNPATLLPVPENQPSPHDCRQVLAETHGTREDLKDQELPDADHTWYTDGSSYLDSGTRRAGAAVVDGHNTIWAQSLPPGTSAQKAELIALTKALELSKGKKANIYTDSRYAFATAHTHGSIYERRGWLTSEGKEIKNKAEIIALLKALFLPQEVAIIHCPGHQKGQDPVAVGNRQADRVARQAAMAEVLTLATEPDNTSHITAGKRTADGSEFEKRTADGSEFESPKKKAKVE

SEQ ID NO: 6361 - protein, 2167 aa, synthetic construct
MPAAKRVKLDGGDKKYSIGLDIGTNSVGWAVITDEYKVPSKKFKVLGNTDRHSIKKNLIGALLFDSGETAEATRLKRTARRRYTRRKNRICYLQEIFSNEMAKVDDSFFHRLEESFLVEEDKKHERHPIFGNIVDEVAYHEKYPTIYHLRKKLVDSTDKADLRLIYLALAHMIKFRGHFLIEGDLNPDNSDVDKLFIQLVQTYNQLFEENPINASGVDAKAILSARLSKSRRLENLIAQLPGEKKNGLFGNLIALSLGLTPNFKSNFDLAEDAKLQLSKDTYDDDLDNLLAQIGDQYADLFLAAKNLSDAILLSDILRVNTEITKAPLSASMIKRYDEHHQDLTLLKALVRQQLPEKYKEIFFDQSKNGYAGYIDGGASQEEFYKFIKPILEKMDGTEELLVKLNREDLLRKQRTFDNGSIPHQIHLGELHAILRRQEDFYPFLKDNREKIEKILTFRIPYYVGPLARGNSRFAWMTRKSEETITPWNFEEVVDKGASAQSFIERMTNFDKNLPNEKVLPKHSLLYEYFTVYNELTKVKYVTEGMRKPAFLSGEQKKAIVDLLFKTNRKVTVKQLKEDYFKKIECFDSVEISGVEDRFNASLGTYHDLLKIIKDKDFLDNEENEDILEDIVLTLTLFEDREMIEERLKTYAHLFDDKVMKQLKRRRYTGWGRLSRKLINGIRDKQSGKTILDFLKSDGFANRNFMQLIHDDSLTFKEDIQKAQVSGQGDSLHEHIANLAGSPAIKKGILQTVKVVDELVKVMGRHKPENIVIEMARENQTTQKGQKNSRERMKRIEEGIKELGSQILKEHPVENTQLQNEKLYLYYLQNGRDMYVDQELDINRLSDYDVDHIVPQSFLKDDSIDNKVLTRSDKARGKSDNVPSEEVVKKMKNYWRQLLNAKLITQRKFDNLTKAERGGLSELDKAGFIKRQLVETRQITKHVAQILDSRMNTKYDENDKLIREVKVITLKSKLVSDFRKDFQFYKVREINNYHHAHDAYLNAVVGTALIKKYPKLESEFVYGDYKVYDVRKMIAKSEQEIGKATAKYFFYSNIMNFFKTEITLANGEIRKRPLIETNGETGEIVWDKGRDFATVRKVLSMPQVNIVKKTEVQTGGFSKESILPKRNSDKLIARKKDWDPKKYGGFDSPTVAYSVLVVAKVEKGKSKKLKSVKELLGITIMERSSFEKNPIDFLEAKGYKEVKKDLIIKLPKYSLFELENGRKRMLASAGELQKGNELALPSKYVNFLYLASHYEKLKGSPEDNEQKQLFVEQHKHYLDEIIEQISEFSKRVILADANLDKVLSAYNKHRDKPIREQAENIIHLFTLTNLGAPAAFKYFDTTIDRKRYTSTKEVLDATLIHQSITGLYETRIDLSQLGGDGGEAAAKGGMDLLKPLTVERKGVKIKGYWNSQADITCVPKDLLQGEEPVRQQNVTTIHGTQEGDVYYVNLKIDGRRINTEVIGTTLDYAIITPGDVPWILKKPLELTIKLDLEEQQGTLLNNSILSKKGKEELKQLFEKYSALWQSWENQVGHRRIRPHKIATGTVKPTPQKQYHINPKAKPDIQIVINDLLKQGVLIQKESTMNTPVYPVPKPNGRWRMVLDYRAVNKVTPLIAVQNQHSYGILGSLFKGRYKTTIDLSNGFWAHPIVPEDYWITAFTWQGKQYCWTVLPQGFLNSPGLFNGDVVDLLQGIPNVEVYVDDVYISHDSEKEHLEYLDILFNRLKEAGYIISLKKSNIANSIVDFLGFQITNEGRGLTDTFKEKLENITAPTTLKQLQSILGLLNFARNFIPDFTELIAPLYALIPKSPKNYVPWQIEHSTTLETLITKLNGAEYLQGRKGDKTLIMKVNASYTTGYIRYYNEGEKKPISYVSIVFSKTELKFTELEKLLTTVHKGLLKALDLSMGQNIHVYSPIVSMQNIQKTPQTAKKALASRWLSWLSYLEDPRIRFFYDPQMPALKDLPAVDTGKDNKKHPSNFQHIFYTDGSAITSPTKEGHLNAGMGIVYFINKDGNLQKQQEWSISLGNHTAQFAEIAAFEFALKKCLPLGGNILVVTDSNYVAKAYNEELDVWASNGFVNNRKKPLKHISKWKSVADLKRLRPDVVVTHEPGHQKLDSSPHAYGNNLADQLATQASFKVHAGKRTADGSEFEKRTADGSEFESPKKKAKVE

SEQ ID NO: 6362 - protein, 2121 aa, synthetic construct
MPAAKRVKLDGGDKKYSIGLDIGTNSVGWAVITDEYKVPSKKFKVLGNTDRHSIKKNLIGALLFDSGETAEATRLKRTARRRYTRRKNRICYLQEIFSNEMAKVDDSFFHRLEESFLVEEDKKHERHPIFGNIVDEVAYHEKYPTIYHLRKKLVDSTDKADLRLIYLALAHMIKFRGHFLIEGDLNPDNSDVDKLFIQLVQTYNQLFEENPINASGVDAKAILSARLSKSRRLENLIAQLPGEKKNGLFGNLIALSLGLTPNFKSNFDLAEDAKLQLSKDTYDDDLDNLLAQIGDQYADLFLAAKNLSDAILLSDILRVNTEITKAPLSASMIKRYDEHHQDLTLLKALVRQQLPEKYKEIFFDQSKNGYAGYIDGGASQEEFYKFIKPILEKMDGTEELLVKLNREDLLRKQRTFDNGSIPHQIHLGELHAILRRQEDFYPFLKDNREKIEKILTFRIPYYVGPLARGNSRFAWMTRKSEETITPWNFEEVVDKGASAQSFIERMTNFDKNLPNEKVLPKHSLLYEYFTVYNELTKVKYVTEGMRKPAFLSGEQKKAIVDLLFKTNRKVTVKQLKEDYFKKIECFDSVEISGVEDRFNASLGTYHDLLKIIKDKDFLDNEENEDILEDIVLTLTLFEDREMIEERLKTYAHLFDDKVMKQLKRRRYTGWGRLSRKLINGIRDKQSGKTILDFLKSDGFANRNFMQLIHDDSLTFKEDIQKAQVSGQGDSLHEHIANLAGSPAIKKGILQTVKVVDELVKVMGRHKPENIVIEMARENQTTQKGQKNSRERMKRIEEGIKELGSQILKEHPVENTQLQNEKLYLYYLQNGRDMYVDQELDINRLSDYDVDHIVPQSFLKDDSIDNKVLTRSDKARGKSDNVPSEEVVKKMKNYWRQLLNAKLITQRKFDNLTKAERGGLSELDKAGFIKRQLVETRQITKHVAQILDSRMNTKYDENDKLIREVKVITLKSKLVSDFRKDFQFYKVREINNYHHAHDAYLNAVVGTALIKKYPKLESEFVYGDYKVYDVRKMIAKSEQEIGKATAKYFFYSNIMNFFKTEITLANGEIRKRPLIETNGETGEIVWDKGRDFATVRKVLSMPQVNIVKKTEVQTGGFSKESILPKRNSDKLIARKKDWDPKKYGGFDSPTVAYSVLVVAKVEKGKSKKLKSVKELLGITIMERSSFEKNPIDFLEAKGYKEVKKDLIIKLPKYSLFELENGRKRMLASAGELQKGNELALPSKYVNFLYLASHYEKLKGSPEDNEQKQLFVEQHKHYLDEIIEQISEFSKRVILADANLDKVLSAYNKHRDKPIREQAENIIHLFTLTNLGAPAAFKYFDTTIDRKRYTSTKEVLDATLIHQSITGLYETRIDLSQLGGDGGEAAAKGGLLGRDLLTKLKAQIQFSTEGPQVTWEDRPAMCLVLNLEEEYRLHEKPVPPSIDPSWLQLFPMVWAEKAGMGLANQVPPVVVELKSDASPVAVRQYPMSKEAREGIRPHIQRFLDLGILVPCQSPWNTPLLPVKKPGTNDYRPVQDLREVNKRVQDIHPTVPNPYNLLSSLPPSHTWYSVLDLKDAFFCLKLHPNSQPLFAFEWRDPEKGNTGQLTWTRLPQGFKNSPTLFNEALHRDLASFRALNPQVVMLQYVDDLLVAAPTYRDCKEGTRRLLQELSKLGYRVSAKKAQLCREEVTYLGYLLKGGKRWLTPARKATVMKIPTPTTPRQVREFLGTAGFCRLWIPGFASLAAPLYPLTRPKVPFTWTEAHQEAFGRIKEALLSAPALALPDLTKPFALYVDEKEGVARGVLTQTLGPWRRPVAYLSKKLDPVASGWPTCLKAIAAVALLLKDADKLTLGQNVLVIAPHNLESIVRQPPDRWMTNARMTHYQSLLLNERVSFAPPAILNPATLLPVESDDTPIHICSEILAEETGTRPDLRDQPLPGVPAWYTDGSSFIMDGRRQAGAAIVDNKRTVWASNLPEGTSAQKAELIALTQALRLAEGKSINIYTDSRYAFATAHVHGAIYKQRGWLTSAGKDIKNKEEILALLEAIHLPKRVAIIHCPGHQRGTDPVATGNRKADEAAKQAAQSTRILTETTKNAGKRTADGSEFEKRTADGSEFESPKKKAKVE

SEQ ID NO: 6363 - protein, 2212 aa, synthetic construct
MPAAKRVKLDGGDKKYSIGLDIGTNSVGWAVITDEYKVPSKKFKVLGNTDRHSIKKNLIGALLFDSGETAEATRLKRTARRRYTRRKNRICYLQEIFSNEMAKVDDSFFHRLEESFLVEEDKKHERHPIFGNIVDEVAYHEKYPTIYHLRKKLVDSTDKADLRLIYLALAHMIKFRGHFLIEGDLNPDNSDVDKLFIQLVQTYNQLFEENPINASGVDAKAILSARLSKSRRLENLIAQLPGEKKNGLFGNLIALSLGLTPNFKSNFDLAEDAKLQLSKDTYDDDLDNLLAQIGDQYADLFLAAKNLSDAILLSDILRVNTEITKAPLSASMIKRYDEHHQDLTLLKALVRQQLPEKYKEIFFDQSKNGYAGYIDGGASQEEFYKFIKPILEKMDGTEELLVKLNREDLLRKQRTFDNGSIPHQIHLGELHAILRRQEDFYPFLKDNREKIEKILTFRIPYYVGPLARGNSRFAWMTRKSEETITPWNFEEVVDKGASAQSFIERMTNFDKNLPNEKVLPKHSLLYEYFTVYNELTKVKYVTEGMRKPAFLSGEQKKAIVDLLFKTNRKVTVKQLKEDYFKKIECFDSVEISGVEDRFNASLGTYHDLLKIIKDKDFLDNEENEDILEDIVLTLTLFEDREMIEERLKTYAHLFDDKVMKQLKRRRYTGWGRLSRKLINGIRDKQSGKTILDFLKSDGFANRNFMQLIHDDSLTFKEDIQKAQVSGQGDSLHEHIANLAGSPAIKKGILQTVKVVDELVKVMGRHKPENIVIEMARENQTTQKGQKNSRERMKRIEEGIKELGSQILKEHPVENTQLQNEKLYLYYLQNGRDMYVDQELDINRLSDYDVDHIVPQSFLKDDSIDNKVLTRSDKARGKSDNVPSEEVVKKMKNYWRQLLNAKLITQRKFDNLTKAERGGLSELDKAGFIKRQLVETRQITKHVAQILDSRMNTKYDENDKLIREVKVITLKSKLVSDFRKDFQFYKVREINNYHHAHDAYLNAVVGTALIKKYPKLESEFVYGDYKVYDVRKMIAKSEQEIGKATAKYFFYSNIMNFFKTEITLANGEIRKRPLIETNGETGEIVWDKGRDFATVRKVLSMPQVNIVKKTEVQTGGFSKESILPKRNSDKLIARKKDWDPKKYGGFDSPTVAYSVLVVAKVEKGKSKKLKSVKELLGITIMERSSFEKNPIDFLEAKGYKEVKKDLIIKLPKYSLFELENGRKRMLASAGELQKGNELALPSKYVNFLYLASHYEKLKGSPEDNEQKQLFVEQHKHYLDEIIEQISEFSKRVILADANLDKVLSAYNKHRDKPIREQAENIIHLFTLTNLGAPAAFKYFDTTIDRKRYTSTKEVLDATLIHQSITGLYETRIDLSQLGGDGGEAAAKGGTLGDQGSRGSDPLPEPRVTLTVEGIPTEFLVNTGAEHSVLTKPMGKMGSKRTVVAGATGSKVYPWTTKRLLKIGQKQVTHSFLVIPECPAPLLGRDLLTKLKAQIQFSTEGPQVTWEDRPAMCLVLNLEEEYRLHEKPVPPSIDPSWLQLFPMVWAEKAGMGLANQVPPVVVELKSDASPVAVRQYPMSKEAREGIRPHIQRFLDLGILVPCQSPWNTPLLPVKKPGTNDYRPVQDLREVNKRVQDIHPTVPNPYNLLSSLPPSHTWYSVLDLKDAFFCLKLHPNSQPLFAFEWRDPEKGNTGQLTWTRLPQGFKNSPTLFNEALHRDLASFRALNPQVVMLQYVDDLLVAAPTYRDCKEGTRRLLQELSKLGYRVSAKKAQLCREEVTYLGYLLKGGKRWLTPARKATVMKIPTPTTPRQVREFLGTAGFCRLWIPGFASLAAPLYPLTRPKVPFTWTEAHQEAFGRIKEALLSAPALALPDLTKPFALYVDEKEGVARGVLTQTLGPWRRPVAYLSKKLDPVASGWPTCLKAIAAVALLLKDADKLTLGQNVLVIAPHNLESIVRQPPDRWMTNARMTHYQSLLLNERVSFAPPAILNPATLLPVESDDTPIHICSEILAEETGTRPDLRDQPLPGVPAWYTDGSSFIMDGRRQAGAAIVDNKRTVWASNLPEGTSAQKAELIALTQALRLAEGKSINIYTDSRYAFATAHVHGAIYKQRGWLTSAGKDIKNKEEILALLEAIHLPKRVAIIHCPGHQRGTDPVATGNRKADEAAKQAAQSTRILTETTKNAGKRTADGSEFEKRTADGSEFESPKKKAKVE

SEQ ID NO: 6364 - protein, 2212 aa, synthetic construct
MPAAKRVKLDGGDKKYSIGLDIGTNSVGWAVITDEYKVPSKKFKVLGNTDRHSIKKNLIGALLFDSGETAEATRLKRTARRRYTRRKNRICYLQEIFSNEMAKVDDSFFHRLEESFLVEEDKKHERHPIFGNIVDEVAYHEKYPTIYHLRKKLVDSTDKADLRLIYLALAHMIKFRGHFLIEGDLNPDNSDVDKLFIQLVQTYNQLFEENPINASGVDAKAILSARLSKSRRLENLIAQLPGEKKNGLFGNLIALSLGLTPNFKSNFDLAEDAKLQLSKDTYDDDLDNLLAQIGDQYADLFLAAKNLSDAILLSDILRVNTEITKAPLSASMIKRYDEHHQDLTLLKALVRQQLPEKYKEIFFDQSKNGYAGYIDGGASQEEFYKFIKPILEKMDGTEELLVKLNREDLLRKQRTFDNGSIPHQIHLGELHAILRRQEDFYPFLKDNREKIEKILTFRIPYYVGPLARGNSRFAWMTRKSEETITPWNFEEVVDKGASAQSFIERMTNFDKNLPNEKVLPKHSLLYEYFTVYNELTKVKYVTEGMRKPAFLSGEQKKAIVDLLFKTNRKVTVKQLKEDYFKKIECFDSVEISGVEDRFNASLGTYHDLLKIIKDKDFLDNEENEDILEDIVLTLTLFEDREMIEERLKTYAHLFDDKVMKQLKRRRYTGWGRLSRKLINGIRDKQSGKTILDFLKSDGFANRNFMQLIHDDSLTFKEDIQKAQVSGQGDSLHEHIANLAGSPAIKKGILQTVKVVDELVKVMGRHKPENIVIEMARENQTTQKGQKNSRERMKRIEEGIKELGSQILKEHPVENTQLQNEKLYLYYLQNGRDMYVDQELDINRLSDYDVDHIVPQSFLKDDSIDNKVLTRSDKARGKSDNVPSEEVVKKMKNYWRQLLNAKLITQRKFDNLTKAERGGLSELDKAGFIKRQLVETRQITKHVAQILDSRMNTKYDENDKLIREVKVITLKSKLVSDFRKDFQFYKVREINNYHHAHDAYLNAVVGTALIKKYPKLESEFVYGDYKVYDVRKMIAKSEQEIGKATAKYFFYSNIMNFFKTEITLANGEIRKRPLIETNGETGEIVWDKGRDFATVRKVLSMPQVNIVKKTEVQTGGFSKESILPKRNSDKLIARKKDWDPKKYGGFDSPTVAYSVLVVAKVEKGKSKKLKSVKELLGITIMERSSFEKNPIDFLEAKGYKEVKKDLIIKLPKYSLFELENGRKRMLASAGELQKGNELALPSKYVNFLYLASHYEKLKGSPEDNEQKQLFVEQHKHYLDEIIEQISEFSKRVILADANLDKVLSAYNKHRDKPIREQAENIIHLFTLTNLGAPAAFKYFDTTIDRKRYTSTKEVLDATLIHQSITGLYETRIDLSQLGGDGGEAAAKGGTLGDQGSRGSDPLPEPRVTLTVEGIPTEFLVNTGAEHSVLTKPMGKMGSKRTVVAGATGSKVYPWTTKRLLKIGQKQVTHSFLVIPECPAPLLGRDLLTKLKAQIQFSTEGPQVTWEDRPAMCLVLNLEEEYRLHEKPVPPSIDPSWLQLFPMVWAEKAGMGLANQVPPVVVELKSDASPVAVRQYPMSKEAREGIRPHIQRFLDLGILVPCQSPWNTPLLPVKKPGTNDYRPVQDLREVNKRVQDIHPTVPNPYNLLSSLPPSHTWYSVLDLKDAFFCLKLHPNSQPLFAFEWRDPEKGNTGQLTWTRLPQGFKNSPTLFNEALHRDLASFRALNPQVVMLQYVDDLLVAAPTYRDCKEGTRRLLQELSKLGYRVSAKKAQLCREEVTYLGYLLKGGKRWLTPARKATVMKIPTPTTPRQVREFLGKAGFCRLFIPGFASLAAPLYPLTRPKVPFTWTEAHQEAFGRIKEALLSAPALALPDLTKPFALYVDEKEGVARGVLTQTLGPWRRPVAYLSKKLDPVASGWPTCLKAIAAVALLLKDADKLTLGQNVLVIAPHNLESIVRQPPDRWMTNARMTHYQSLLLNERVSFAPPAILNPATLLPVESDDTPIHICSEILAEETGTRPDLRDQPLPGVPAWYTDGSSFIMDGRRQAGAAIVDNKRTVWASNLPEGTSAQKAELIALTQALRLAEGKSINIYTDSRYAFATAHVHGAIYKQRGWLTSAGKDIKNKEEILALLEAIHLPKRVAIIHCPGHQRGTDPVATGNRKADEAAKQAAQSTRILTETTKNAGKRTADGSEFEKRTADGSEFESPKKKAKVE

SEQ ID NO: 6365 - protein, 2090 aa, synthetic construct
MPAAKRVKLDGGDKKYSIGLDIGTNSVGWAVITDEYKVPSKKFKVLGNTDRHSIKKNLIGALLFDSGETAEATRLKRTARRRYTRRKNRICYLQEIFSNEMAKVDDSFFHRLEESFLVEEDKKHERHPIFGNIVDEVAYHEKYPTIYHLRKKLVDSTDKADLRLIYLALAHMIKFRGHFLIEGDLNPDNSDVDKLFIQLVQTYNQLFEENPINASGVDAKAILSARLSKSRRLENLIAQLPGEKKNGLFGNLIALSLGLTPNFKSNFDLAEDAKLQLSKDTYDDDLDNLLAQIGDQYADLFLAAKNLSDAILLSDILRVNTEITKAPLSASMIKRYDEHHQDLTLLKALVRQQLPEKYKEIFFDQSKNGYAGYIDGGASQEEFYKFIKPILEKMDGTEELLVKLNREDLLRKQRTFDNGSIPHQIHLGELHAILRRQEDFYPFLKDNREKIEKILTFRIPYYVGPLARGNSRFAWMTRKSEETITPWNFEEVVDKGASAQSFIERMTNFDKNLPNEKVLPKHSLLYEYFTVYNELTKVKYVTEGMRKPAFLSGEQKKAIVDLLFKTNRKVTVKQLKEDYFKKIECFDSVEISGVEDRFNASLGTYHDLLKIIKDKDFLDNEENEDILEDIVLTLTLFEDREMIEERLKTYAHLFDDKVMKQLKRRRYTGWGRLSRKLINGIRDKQSGKTILDFLKSDGFANRNFMQLIHDDSLTFKEDIQKAQVSGQGDSLHEHIANLAGSPAIKKGILQTVKVVDELVKVMGRHKPENIVIEMARENQTTQKGQKNSRERMKRIEEGIKELGSQILKEHPVENTQLQNEKLYLYYLQNGRDMYVDQELDINRLSDYDVDHIVPQSFLKDDSIDNKVLTRSDKARGKSDNVPSEEVVKKMKNYWRQLLNAKLITQRKFDNLTKAERGGLSELDKAGFIKRQLVETRQITKHVAQILDSRMNTKYDENDKLIREVKVITLKSKLVSDFRKDFQFYKVREINNYHHAHDAYLNAVVGTALIKKYPKLESEFVYGDYKVYDVRKMIAKSEQEIGKATAKYFFYSNIMNFFKTEITLANGEIRKRPLIETNGETGEIVWDKGRDFATVRKVLSMPQVNIVKKTEVQTGGFSKESILPKRNSDKLIARKKDWDPKKYGGFDSPTVAYSVLVVAKVEKGKSKKLKSVKELLGITIMERSSFEKNPIDFLEAKGYKEVKKDLIIKLPKYSLFELENGRKRMLASAGELQKGNELALPSKYVNFLYLASHYEKLKGSPEDNEQKQLFVEQHKHYLDEIIEQISEFSKRVILADANLDKVLSAYNKHRDKPIREQAENIIHLFTLTNLGAPAAFKYFDTTIDRKRYTSTKEVLDATLIHQSITGLYETRIDLSQLGGDGGEAAAKGGTLNIEDEHRLHETSKEPDVSLGSTWLSDFPQAWAETGGMGLAVRQAPLIIPLKATSTPVSIKQYPMSQEARLGIKPHIQRLLDQGILVPCQSPWNTPLLPVKKPGTNDYRPVQDLREVNKRVEDIHPTVPNPYNLLSGLPPSHQWYTVLDLKDAFFCLRLHPTSQPLFAFEWRDPEMGISGQLTWTRLPQGFKNSPTLFDEALHRDLADFRIQHPDLILLQYVDDLLLAATSELDCQQGTRALLQTLGNLGYRASAKKAQICQKQVKYLGYLLKEGQRWLTEARKETVMGQPTPKTPRQLREFLGTAGFCRLWIPGFAEMAAPLYPLTKTGTLFNWGPDQQKAYQEIKQALLTAPALGLPDLTKPFELFVDEKQGYAKGVLTQKLGPWRRPVAYLSKKLDPVAAGWPPCLRMVAAIAVLTKDAGKLTMGQPLVILAPHAVEALVKQPPDRWLSNARMTHYQALLLDTDRVQFGPVVALNPATLLPLPEEGLQHNCLDILAEAHGTRPDLTDQPLPDADHTWYTDGSSLLQEGQRKAGAAVTTETEVIWAKALPAGTSAQRAELIALTQALKMAEGKKLNVYTDSRYAFATAHIHGEIYRRRGLLTSEGKEIKNKDEILALLKALFLPKRLSIIHCPGHQKGHSAEARGNRMADQAARKAAITETPDTSTLLAGKRTADGSEFEKRTADGSEFESPKKKAKVE

SEQ ID NO: 6366 - protein, 2082 aa, synthetic construct
MPAAKRVKLDGGDKKYSIGLDIGTNSVGWAVITDEYKVPSKKFKVLGNTDRHSIKKNLIGALLFDSGETAEATRLKRTARRRYTRRKNRICYLQEIFSNEMAKVDDSFFHRLEESFLVEEDKKHERHPIFGNIVDEVAYHEKYPTIYHLRKKLVDSTDKADLRLIYLALAHMIKFRGHFLIEGDLNPDNSDVDKLFIQLVQTYNQLFEENPINASGVDAKAILSARLSKSRRLENLIAQLPGEKKNGLFGNLIALSLGLTPNFKSNFDLAEDAKLQLSKDTYDDDLDNLLAQIGDQYADLFLAAKNLSDAILLSDILRVNTEITKAPLSASMIKRYDEHHQDLTLLKALVRQQLPEKYKEIFFDQSKNGYAGYIDGGASQEEFYKFIKPILEKMDGTEELLVKLNREDLLRKQRTFDNGSIPHQIHLGELHAILRRQEDFYPFLKDNREKIEKILTFRIPYYVGPLARGNSRFAWMTRKSEETITPWNFEEVVDKGASAQSFIERMTNFDKNLPNEKVLPKHSLLYEYFTVYNELTKVKYVTEGMRKPAFLSGEQKKAIVDLLFKTNRKVTVKQLKEDYFKKIECFDSVEISGVEDRFNASLGTYHDLLKIIKDKDFLDNEENEDILEDIVLTLTLFEDREMIEERLKTYAHLFDDKVMKQLKRRRYTGWGRLSRKLINGIRDKQSGKTILDFLKSDGFANRNFMQLIHDDSLTFKEDIQKAQVSGQGDSLHEHIANLAGSPAIKKGILQTVKVVDELVKVMGRHKPENIVIEMARENQTTQKGQKNSRERMKRIEEGIKELGSQILKEHPVENTQLQNEKLYLYYLQNGRDMYVDQELDINRLSDYDVDHIVPQSFLKDDSIDNKVLTRSDKARGKSDNVPSEEVVKKMKNYWRQLLNAKLITQRKFDNLTKAERGGLSELDKAGFIKRQLVETRQITKHVAQILDSRMNTKYDENDKLIREVKVITLKSKLVSDFRKDFQFYKVREINNYHHAHDAYLNAVVGTALIKKYPKLESEFVYGDYKVYDVRKMIAKSEQEIGKATAKYFFYSNIMNFFKTEITLANGEIRKRPLIETNGETGEIVWDKGRDFATVRKVLSMPQVNIVKKTEVQTGGFSKESILPKRNSDKLIARKKDWDPKKYGGFDSPTVAYSVLVVAKVEKGKSKKLKSVKELLGITIMERSSFEKNPIDFLEAKGYKEVKKDLIIKLPKYSLFELENGRKRMLASAGELQKGNELALPSKYVNFLYLASHYEKLKGSPEDNEQKQLFVEQHKHYLDEIIEQISEFSKRVILADANLDKVLSAYNKHRDKPIREQAENIIHLFTLTNLGAPAAFKYFDTTIDRKRYTSTKEVLDATLIHQSITGLYETRIDLSQLGGDGGEAAAKGGLDDEYRLYSPLVKPDQNIQFWLEQFPQAWAETAGMGLAKQVPPQVIQLKASATPVSVRQYPLSKEAQEGIRPHVQRLIQQGILVPVQSPWNTPLLPVRKPGTNDYRPVQDLREVNKRVQDIHPTVPNPYNLLCALPPQRSWYTVLDLKDAFFCLRLHPTSQPLFAFEWRDPGTGRTGQLTWTRLPQGFKNSPTIFNEALHRDLANFRIQHPQVTLLQYVDDLLLAGATKQDCLEGTKALLLELSDLGYRASAKKAQICRREVTYLGYSLRDGQRWLTEARKKTVVQIPAPTTAKQVREFLGKAGFCRLFIPGFATLAAPLYPLTKPKGEFSWAPEHQKAFDAIKKALLSAPALALPDVTKPFTLYVDERKGVARGVLTQTLGPWRRPVAYLSKKLDPVASGWPVCLKAIAAVAILVKDADKLTLGQNITVIAPHALENIVRQPPDRWMTNARMTHYQSLLLTERVTFAPPAALNPATLLPEETDEPVTHDCHQLLIEETGVRKDLTDIPLTGEVLTWFTDGSSYVVEGKRMAGAAVVDGTRTIWASSLPEGTSAQKAELMALTQALRLAEGKSINIYTDSRYAFATAHVHGAIYKQRGWLTSAGREIKNKEEILSLLEALHLPKRLAIIHCPGHQKAKDPISRGNQMADRVAKQAAQGVNLLPAGKRTADGSEFEKRTADGSEFESPKKKAKVE

SEQ ID NO: 6367 - protein, 2084 aa, synthetic construct
MPAAKRVKLDGGDKKYSIGLDIGTNSVGWAVITDEYKVPSKKFKVLGNTDRHSIKKNLIGALLFDSGETAEATRLKRTARRRYTRRKNRICYLQEIFSNEMAKVDDSFFHRLEESFLVEEDKKHERHPIFGNIVDEVAYHEKYPTIYHLRKKLVDSTDKADLRLIYLALAHMIKFRGHFLIEGDLNPDNSDVDKLFIQLVQTYNQLFEENPINASGVDAKAILSARLSKSRRLENLIAQLPGEKKNGLFGNLIALSLGLTPNFKSNFDLAEDAKLQLSKDTYDDDLDNLLAQIGDQYADLFLAAKNLSDAILLSDILRVNTEITKAPLSASMIKRYDEHHQDLTLLKALVRQQLPEKYKEIFFDQSKNGYAGYIDGGASQEEFYKFIKPILEKMDGTEELLVKLNREDLLRKQRTFDNGSIPHQIHLGELHAILRRQEDFYPFLKDNREKIEKILTFRIPYYVGPLARGNSRFAWMTRKSEETITPWNFEEVVDKGASAQSFIERMTNFDKNLPNEKVLPKHSLLYEYFTVYNELTKVKYVTEGMRKPAFLSGEQKKAIVDLLFKTNRKVTVKQLKEDYFKKIECFDSVEISGVEDRFNASLGTYHDLLKIIKDKDFLDNEENEDILEDIVLTLTLFEDREMIEERLKTYAHLFDDKVMKQLKRRRYTGWGRLSRKLINGIRDKQSGKTILDFLKSDGFANRNFMQLIHDDSLTFKEDIQKAQVSGQGDSLHEHIANLAGSPAIKKGILQTVKVVDELVKVMGRHKPENIVIEMARENQTTQKGQKNSRERMKRIEEGIKELGSQILKEHPVENTQLQNEKLYLYYLQNGRDMYVDQELDINRLSDYDVDHIVPQSFLKDDSIDNKVLTRSDKARGKSDNVPSEEVVKKMKNYWRQLLNAKLITQRKFDNLTKAERGGLSELDKAGFIKRQLVETRQITKHVAQILDSRMNTKYDENDKLIREVKVITLKSKLVSDFRKDFQFYKVREINNYHHAHDAYLNAVVGTALIKKYPKLESEFVYGDYKVYDVRKMIAKSEQEIGKATAKYFFYSNIMNFFKTEITLANGEIRKRPLIETNGETGEIVWDKGRDFATVRKVLSMPQVNIVKKTEVQTGGFSKESILPKRNSDKLIARKKDWDPKKYGGFDSPTVAYSVLVVAKVEKGKSKKLKSVKELLGITIMERSSFEKNPIDFLEAKGYKEVKKDLIIKLPKYSLFELENGRKRMLASAGELQKGNELALPSKYVNFLYLASHYEKLKGSPEDNEQKQLFVEQHKHYLDEIIEQISEFSKRVILADANLDKVLSAYNKHRDKPIREQAENIIHLFTLTNLGAPAAFKYFDTTIDRKRYTSTKEVLDATLIHQSITGLYETRIDLSQLGGDGGEAAAKGGTLQLDDEYRLYSPLVKPDQNIQFWLEQFPQAWAETAGMGLAKQVPPQVIQLKASATPVSVRQYPLSKEAQEGIRPHVQRLIQQGILVPVQSPWNTPLLPVRKPGTNDYRPVQDLREVNKRVQDIHPTVPNPYNLLCALPPQRSWYTVLDLKDAFFCLRLHPTSQPLFAFEWRDPGTGRTGQLTWTRLPQGFKNSPTIFDEALHRDLANFRIQHPQVTLLQYVDDLLLAGATKQDCLEGTKALLLELSDLGYRASAKKAQICRREVTYLGYSLRDGQRWLTEARKKTVVQIPAPTTAKQVREFLGTAGFCRLWIPGFATLAAPLYPLTKEKGEFSWAPEHQKAFDAIKKALLSAPALALPDVTKPFTLYVDERKGVARGVLTQTLGPWRRPVAYLSKKLDPVASGWPVCLKAIAAVAILVKDADKLTLGQNITVIAPHALENIVRQPPDRWMTNARMTHYQSLLLTERVTFAPPAALNPATLLPEETDEPVTHDCHQLLIEETGVRKDLTDIPLTGEVLTWFTDGSSYVVEGKRMAGAAVVDGTRTIWASSLPEGTSAQKAELMALTQALRLAEGKSINIYTDSRYAFATAHVHGAIYKQRGLLTSAGREIKNKEEILSLLEALHLPKRLAIIHCPGHQKAKDPISRGNQMADRVAKQAAQGVNLLAGKRTADGSEFEKRTADGSEFESPKKKAKVE

SEQ ID NO: 6368 - protein, 2082 aa, synthetic construct; identical to SEQ ID NO: 6366

SEQ ID NO: 6369 - protein, 2081 aa, synthetic construct
MPAAKRVKLDGGDKKYSIGLDIGTNSVGWAVITDEYKVPSKKFKVLGNTDRHSIKKNLIGALLFDSGETAEATRLKRTARRRYTRRKNRICYLQEIFSNEMAKVDDSFFHRLEESFLVEEDKKHERHPIFGNIVDEVAYHEKYPTIYHLRKKLVDSTDKADLRLIYLALAHMIKFRGHFLIEGDLNPDNSDVDKLFIQLVQTYNQLFEENPINASGVDAKAILSARLSKSRRLENLIAQLPGEKKNGLFGNLIALSLGLTPNFKSNFDLAEDAKLQLSKDTYDDDLDNLLAQIGDQYADLFLAAKNLSDAILLSDILRVNTEITKAPLSASMIKRYDEHHQDLTLLKALVRQQLPEKYKEIFFDQSKNGYAGYIDGGASQEEFYKFIKPILEKMDGTEELLVKLNREDLLRKQRTFDNGSIPHQIHLGELHAILRRQEDFYPFLKDNREKIEKILTFRIPYYVGPLARGNSRFAWMTRKSEETITPWNFEEVVDKGASAQSFIERMTNFDKNLPNEKVLPKHSLLYEYFTVYNELTKVKYVTEGMRKPAFLSGEQKKAIVDLLFKTNRKVTVKQLKEDYFKKIECFDSVEISGVEDRFNASLGTYHDLLKIIKDKDFLDNEENEDILEDIVLTLTLFEDREMIEERLKTYAHLFDDKVMKQLKRRRYTGWGRLSRKLINGIRDKQSGKTILDFLKSDGFANRNFMQLIHDDSLTFKEDIQKAQVSGQGDSLHEHIANLAGSPAIKKGILQTVKVVDELVKVMGRHKPENIVIEMARENQTTQKGQKNSRERMKRIEEGIKELGSQILKEHPVENTQLQNEKLYLYYLQNGRDMYVDQELDINRLSDYDVDHIVPQSFLKDDSIDNKVLTRSDKARGKSDNVPSEEVVKKMKNYWRQLLNAKLITQRKFDNLTKAERGGLSELDKAGFIKRQLVETRQITKHVAQILDSRMNTKYDENDKLIREVKVITLKSKLVSDFRKDFQFYKVREINNYHHAHDAYLNAVVGTALIKKYPKLESEFVYGDYKVYDVRKMIAKSEQEIGKATAKYFFYSNIMNFFKTEITLANGEIRKRPLIETNGETGEIVWDKGRDFATVRKVLSMPQVNIVKKTEVQTGGFSKESILPKRNSDKLIARKKDWDPKKYGGFDSPTVAYSVLVVAKVEKGKSKKLKSVKELLGITIMERSSFEKNPIDFLEAKGYKEVKKDLIIKLPKYSLFELENGRKRMLASAGELQKGNELALPSKYVNFLYLASHYEKLKGSPEDNEQKQLFVEQHKHYLDEIIEQISEFSKRVILADANLDKVLSAYNKHRDKPIREQAENIIHLFTLTNLGAPAAFKYFDTTIDRKRYTSTKEVLDATLIHQSITGLYETRIDLSQLGGDGGEAAAKGGIPWLMKKPLQLTTLVPLQEYEERLLKQTMLTGSYKEKLQSLFLKYDALWQHWENQVGHRRIKPHHIATGTVNPRPQKQYPINPKAKASIQTVINDLLKQGVLIQQNSIMNTPVYPVPKPDGKWRMVLDYREVNKTIPLIAAQNQHSAGILSSIFRGKYKTTLDLSNGFWAHSITPESYWLTAFTWLGQQYCWTRLPQGFLNSPALFNADVVDLLKEVPNVQVYVDDIYISHDDPREHLEQLEKVFSLLLNAGYVVSLKKSEIAQHEVEFLGFNITKEGRGLTETFKQKLLNITPPRDLKQLQSILGLLNFARNFIPNFSELVKPLYNIIATAPGKYITWTTDNSQQLQNIISMLNSAENLEERNPEVRLIMKVNTSPSAGYIRFYNEFAKRPIMYLNYVYTKAEVKFTNTEKLLTTIHKGLIKALDLGMGQEILVYSPIVSMTKIQKTPLPERKALPIRWITWMSYLEDPRIQFHYDKTLPELQQVPTVTDDIIAKIKHPSEFSMVFYTDGSAIKHPNVNKSHNAGMGIAQVQFKPEFTVINTWSIPLGDHTAQLAEVAAVEFACKKALKIDGPVLIVTDSFYVAESVNKELPYWQSNGFFNNKKKPLKHVSKWKSIADCIQLKPDIIIIHEKGHQPTASTFHTEGNNLADKLATQGSYVVNAGKRTADGSEFEKRTADGSEFESPKKKAKVE

SEQ ID NO: 6370 - protein, 2097 aa, synthetic construct
MPAAKRVKLDGGDKKYSIGLDIGTNSVGWAVITDEYKVPSKKFKVLGNTDRHSIKKNLIGALLFDSGETAEATRLKRTARRRYTRRKNRICYLQEIFSNEMAKVDDSFFHRLEESFLVEEDKKHERHPIFGNIVDEVAYHEKYPTIYHLRKKLVDSTDKADLRLIYLALAHMIKFRGHFLIEGDLNPDNSDVDKLFIQLVQTYNQLFEENPINASGVDAKAILSARLSKSRRLENLIAQLPGEKKNGLFGNLIALSLGLTPNFKSNFDLAEDAKLQLSKDTYDDDLDNLLAQIGDQYADLFLAAKNLSDAILLSDILRVNTEITKAPLSASMIKRYDEHHQDLTLLKALVRQQLPEKYKEIFFDQSKNGYAGYIDGGASQEEFYKFIKPILEKMDGTEELLVKLNREDLLRKQRTFDNGSIPHQIHLGELHAILRRQEDFYPFLKDNREKIEKILTFRIPYYVGPLARGNSRFAWMTRKSEETITPWNFEEVVDKGASAQSFIERMTNFDKNLPNEKVLPKHSLLYEYFTVYNELTKVKYVTEGMRKPAFLSGEQKKAIVDLLFKTNRKVTVKQLKEDYFKKIECFDSVEISGVEDRFNASLGTYHDLLKIIKDKDFLDNEENEDILEDIVLTLTLFEDREMIEERLKTYAHLFDDKVMKQLKRRRYTGWGRLSRKLINGIRDKQSGKTILDFLKSDGFANRNFMQLIHDDSLTFKEDIQKAQVSGQGDSLHEHIANLAGSPAIKKGILQTVKVVDELVKVMGRHKPENIVIEMARENQTTQKGQKNSRERMKRIEEGIKELGSQILKEHPVENTQLQNEKLYLYYLQNGRDMYVDQELDINRLSDYDVDHIVPQSFLKDDSIDNKVLTRSDKARGKSDNVPSEEVVKKMKNYWRQLLNAKLITQRKFDNLTKAERGGLSELDKAGFIKRQLVETRQITKHVAQILDSRMNTKYDENDKLIREVKVITLKSKLVSDFRKDFQFYKVREINNYHHAHDAYLNAVVGTALIKKYPKLESEFVYGDYKVYDVRKMIAKSEQEIGKATAKYFFYSNIMNFFKTEITLANGEIRKRPLIETNGETGEIVWDKGRDFATVRKVLSMPQVNIVKKTEVQTGGFSKESILPKRNSDKLIARKKDWDPKKYGGFDSPTVAYSVLVVAKVEKGKSKKLKSVKELLGITIMERSSFEKNPIDFLEAKGYKEVKKDLIIKLPKYSLFELENGRKRMLASAGELQKGNELALPSKYVNFLYLASHYEKLKGSPEDNEQKQLFVEQHKHYLDEIIEQISEFSKRVILADANLDKVLSAYNKHRDKPIREQAENIIHLFTLTNLGAPAAFKYFDTTIDRKRYTSTKEVLDATLIHQSITGLYETRIDLSQLGGDGGEAAAKEAAAKGGTAPLEEEYRLFLEAPIQNVTLLEQWKREIPKVWAEINPPGLASTQAPIHVQLLSTALPVRVRQYPITLEAKRSLRETIRKFRAAGILRPVHSPWNTPLLPVRKSGTSEYRMVQDLREVNKRVETIHPTVPNPYTLLSLLPPDRIWYSVLDLKDAFFCIPLAPESQLIFAFEWADAEEGESGQLTWTRLPQGFKNSPTLFNEALNRDLQGFRLDHPSVSLLQYVDDLLIAADTQAACLSATRDLLMTLAELGYRVSGKKAQLCQEEVTYLGFKIHKGSRSLSNSRTQAILQIPVPKTKRQVREFLGKIGYCRLFIPGFAELAQPLYAATRPGNDPLVWGEKEEEAFQSLKLALTQPPALALPSLDKPFQLFVEETSGAAKGVLTQALGPWKRPVAYLSKRLDPVAAGWPRCLRAIAAAALLTREASKLTFGQDIEITSSHNLESLLRSPPDKWLTNARITQYQVLLLDPPRVRFKQTAALNPATLLPETDDTLPIHHCLDTLDSLTSTRPDLTDQPLAQAEATLFTDGSSYIRDGKRYAGAAVVTLDSVIWAEPLPIGTSAQKAELIALTKALEWSKDKSVNIYTDSRYAFATLHVHGMIYRERGWLTAGGKAIKNAPEILALLTAVWLPKRVAVMHCKGHQKDDAPTSTGNRRADEVAREVAIRPLSTQATISAGKRTADGSEFEKRTADGSEFESPKKKAKVE

SEQ ID NO: 6371 - protein, 2172 aa, synthetic construct
MPAAKRVKLDGGDKKYSIGLDIGTNSVGWAVITDEYKVPSKKFKVLGNTDRHSIKKNLIGALLFDSGETAEATRLKRTARRRYTRRKNRICYLQEIFSNEMAKVDDSFFHRLEESFLVEEDKKHERHPIFGNIVDEVAYHEKYPTIYHLRKKLVDSTDKADLRLIYLALAHMIKFRGHFLIEGDLNPDNSDVDKLFIQLVQTYNQLFEENPINASGVDAKAILSARLSKSRRLENLIAQLPGEKKNGLFGNLIALSLGLTPNFKSNFDLAEDAKLQLSKDTYDDDLDNLLAQIGDQYADLFLAAKNLSDAILLSDILRVNTEITKAPLSASMIKRYDEHHQDLTLLKALVRQQLPEKYKEIFFDQSKNGYAGYIDGGASQEEFYKFIKPILEKMDGTEELLVKLNREDLLRKQRTFDNGSIPHQIHLGELHAILRRQEDFYPFLKDNREKIEKILTFRIPYYVGPLARGNSRFAWMTRKSEETITPWNFEEVVDKGASAQSFIERMTNFDKNLPNEKVLPKHSLLYEYFTVYNELTKVKYVTEGMRKPAFLSGEQKKAIVDLLFKTNRKVTVKQLKEDYFKKIECFDSVEISGVEDRFNASLGTYHDLLKIIKDKDFLDNEENEDILEDIVLTLTLFEDREMIEERLKTYAHLFDDKVMKQLKRRRYTGWGRLSRKLINGIRDKQSGKTILDFLKSDGFANRNFMQLIHDDSLTFKEDIQKAQVSGQGDSLHEHIANLAGSPAIKKGILQTVKVVDELVKVMGRHKPENIVIEMARENQTTQKGQKNSRERMKRIEEGIKELGSQILKEHPVENTQLQNEKLYLYYLQNGRDMYVDQELDINRLSDYDVDHIVPQSFLKDDSIDNKVLTRSDKARGKSDNVPSEEVVKKMKNYWRQLLNAKLITQRKFDNLTKAERGGLSELDKAGFIKRQLVETRQITKHVAQILDSRMNTKYDENDKLIREVKVITLKSKLVSDFRKDFQFYKVREINNYHHAHDAYLNAVVGTALIKKYPKLESEFVYGDYKVYDVRKMIAKSEQEIGKATAKYFFYSNIMNFFKTEITLANGEIRKRPLIETNGETGEIVWDKGRDFATVRKVLSMPQVNIVKKTEVQTGGFSKESILPKRNSDKLIARKKDWDPKKYGGFDSPTVAYSVLVVAKVEKGKSKKLKSVKELLGITIMERSSFEKNPIDFLEAKGYKEVKKDLIIKLPKYSLFELENGRKRMLASAGELQKGNELALPSKYVNFLYLASHYEKLKGSPEDNEQKQLFVEQHKHYLDEIIEQISEFSKRVILADANLDKVLSAYNKHRDKPIREQAENIIHLFTLTNLGAPAAFKYFDTTIDRKRYTSTKEVLDATLIHQSITGLYETRIDLSQLGGDGGEAAAKEAAAKGGMDLLKPLTVERKGVKIKGYWNSQADITCVPKDLLQGEEPVRQQNVTTIHGTQEGDVYYVNLKIDGRRINTEVIGTTLDYAIITPGDVPWILKKPLELTIKLDLEEQQGTLLNNSILSKKGKEELKQLFEKYSALWQSWENQVGHRRIRPHKIATGTVKPTPQKQYHINPKAKPDIQIVINDLLKQGVLIQKESTMNTPVYPVPKPNGRWRMVLDYRAVNKVTPLIAVQNQHSYGILGSLFKGRYKTTIDLSNGFWAHPIVPEDYWITAFTWQGKQYCWTVLPQGFLNSPGLFTGDVVDLLQGIPNVEVYVDDVYISHDSEKEHLEYLDILFNRLKEAGYIISLKKSNIANSIVDFLGFQITNEGRGLTDTFKEKLENITAPTTLKQLQSILGLLNFARNFIPDFTELIAPLYALIPKSTKNYVPWQIEHSTTLETLITKLNGAEYLQGRKGDKTLIMKVNASYTTGYIRYYNEGEKKPISYVSIVFSKTELKFTELEKLLTTVHKGLLKALDLSMGQNIHVYSPIVSMQNIQKTPQTAKKALASRWLSWLSYLEDPRIRFFYDPQMPALKDLPAVDTGKDNKKHPSNFQHIFYTDGSAITSPTKEGHLNAGMGIVYFINKDGNLQKQQEWSISLGNHTAQFAEIAAFEFALKKCLPLGGNILVVTDSNYVAKAYNEELDVWASNGFVNNRKKPLKHISKWKSVADLKRLRPDVVVTHEPGHQKLDSSPHAYGNNLADQLATQASFKVHAGKRTADGSEFEKRTADGSEFESPKKKAKVE

SEQ ID NO: 6372 - protein, 2086 aa, synthetic construct
MPAAKRVKLDGGDKKYSIGLDIGTNSVGWAVITDEYKVPSKKFKVLGNTDRHSIKKNLIGALLFDSGETAEATRLKRTARRRYTRRKNRICYLQEIFSNEMAKVDDSFFHRLEESFLVEEDKKHERHPIFGNIVDEVAYHEKYPTIYHLRKKLVDSTDKADLRLIYLALAHMIKFRGHFLIEGDLNPDNSDVDKLFIQLVQTYNQLFEENPINASGVDAKAILSARLSKSRRLENLIAQLPGEKKNGLFGNLIALSLGLTPNFKSNFDLAEDAKLQLSKDTYDDDLDNLLAQIGDQYADLFLAAKNLSDAILLSDILRVNTEITKAPLSASMIKRYDEHHQDLTLLKALVRQQLPEKYKEIFFDQSKNGYAGYIDGGASQEEFYKFIKPILEKMDGTEELLVKLNREDLLRKQRTFDNGSIPHQIHLGELHAILRRQEDFYPFLKDNREKIEKILTFRIPYYVGPLARGNSRFAWMTRKSEETITPWNFEEVVDKGASAQSFIERMTNFDKNLPNEKVLPKHSLLYEYFTVYNELTKVKYVTEGMRKPAFLSGEQKKAIVDLLFKTNRKVTVKQLKEDYFKKIECFDSVEISGVEDRFNASLGTYHDLLKIIKDKDFLDNEENEDILEDIVLTLTLFEDREMIEERLKTYAHLFDDKVMKQLKRRRYTGWGRLSRKLINGIRDKQSGKTILDFLKSDGFANRNFMQLIHDDSLTFKEDIQKAQVSGQGDSLHEHIANLAGSPAIKKGILQTVKVVDELVKVMGRHKPENIVIEMARENQTTQKGQKNSRERMKRIEEGIKELGSQILKEHPVENTQLQNEKLYLYYLQNGRDMYVDQELDINRLSDYDVDHIVPQSFLKDDSIDNKVLTRSDKARGKSDNVPSEEVVKKMKNYWRQLLNAKLITQRKFDNLTKAERGGLSELDKAGFIKRQLVETRQITKHVAQILDSRMNTKYDENDKLIREVKVITLKSKLVSDFRKDFQFYKVREINNYHHAHDAYLNAVVGTALIKKYPKLESEFVYGDYKVYDVRKMIAKSEQEIGKATAKYFFYSNIMNFFKTEITLANGEIRKRPLIETNGETGEIVWDKGRDFATVRKVLSMPQVNIVKKTEVQTGGFSKESILPKRNSDKLIARKKDWDPKKYGGFDSPTVAYSVLVVAKVEKGKSKKLKSVKELLGITIMERSSFEKNPIDFLEAKGYKEVKKDLIIKLPKYSLFELENGRKRMLASAGELQKGNELALPSKYVNFLYLASHYEKLKGSPEDNEQKQLFVEQHKHYLDEIIEQISEFSKRVILADANLDKVLSAYNKHRDKPIREQAENIIHLFTLTNLGAPAAFKYFDTTIDRKRYTSTKEVLDATLIHQSITGLYETRIDLSQLGGDGGEAAAKEAAAKGGVPWILKKPLELTIKLDLEEQQGTLLNNSILSKKGKEELKQLFEKYSALWQSWENQVGHRRIRPHKIATGTVKPTPQKQYHINPKAKPDIQIVINDLLKQGVLIQKESTMNTPVYPVPKPNGRWRMVLDYRAVNKVTPLIAVQNQHSYGILGSLFKGRYKTTIDLSNGFWAHPIVPEDYWITAFTWQGKQYCWTVLPQGFLNSPGLFTGDVVDLLQGIPNVEVYVDDVYISHDSEKEHLEYLDILFNRLKEAGYIISLKKSNIANSIVDFLGFQITNEGRGLTDTFKEKLENITAPTTLKQLQSILGLLNFARNFIPDFTELIAPLYALIPKSTKNYVPWQIEHSTTLETLITKLNGAEYLQGRKGDKTLIMKVNASYTTGYIRYYNEGEKKPISYVSIVFSKTELKFTELEKLLTTVHKGLLKALDLSMGQNIHVYSPIVSMQNIQKTPQTAKKALASRWLSWLSYLEDPRIRFFYDPQMPALKDLPAVDTGKDNKKHPSNFQHIFYTDGSAITSPTKEGHLNAGMGIVYFINKDGNLQKQQEWSISLGNHTAQFAEIAAFEFALKKCLPLGGNILVVTDSNYVAKAYNEELDVWASNGFVNNRKKPLKHISKWKSVADLKRLRPDVVVTHEPGHQKLDSSPHAYGNNLADQLATQASFKVHAGKRTADGSEFEKRTADGSEFESPKKKAKVE

SEQ ID NO: 6373 - protein, 2172 aa, synthetic construct
MPAAKRVKLDGGDKKYSIGLDIGTNSVGWAVITDEYKVPSKKFKVLGNTDRHSIKKNLIGALLFDSGETAEATRLKRTARRRYTRRKNRICYLQEIFSNEMAKVDDSFFHRLEESFLVEEDKKHERHPIFGNIVDEVAYHEKYPTIYHLRKKLVDSTDKADLRLIYLALAHMIKFRGHFLIEGDLNPDNSDVDKLFIQLVQTYNQLFEENPINASGVDAKAILSARLSKSRRLENLIAQLPGEKKNGLFGNLIALSLGLTPNFKSNFDLAEDAKLQLSKDTYDDDLDNLLAQIGDQYADLFLAAKNLSDAILLSDILRVNTEITKAPLSASMIKRYDEHHQDLTLLKALVRQQLPEKYKEIFFDQSKNGYAGYIDGGASQEEFYKFIKPILEKMDGTEELLVKLNREDLLRKQRTFDNGSIPHQIHLGELHAILRRQEDFYPFLKDNREKIEKILTFRIPYYVGPLARGNSRFAWMTRKSEETITPWNFEEVVDKGASAQSFIERMTNFDKNLPNEKVLPKHSLLYEYFTVYNELTKVKYVTEGMRKPAFLSGEQKKAIVDLLFKTNRKVTVKQLKEDYFKKIECFDSVEISGVEDRFNASLGTYHDLLKIIKDKDFLDNEENEDILEDIVLTLTLFEDREMIEERLKTYAHLFDDKVMKQLKRRRYTGWGRLSRKLINGIRDKQSGKTILDFLKSDGFANRNFMQLIHDDSLTFKEDIQKAQVSGQGDSLHEHIANLAGSPAIKKGILQTVKVVDELVKVMGRHKPENIVIEMARENQTTQKGQKNSRERMKRIEEGIKELGSQILKEHPVENTQLQNEKLYLYYLQNGRDMYVDQELDINRLSDYDVDHIVPQSFLKDDSIDNKVLTRSDKARGKSDNVPSEEVVKKMKNYWRQLLNAKLITQRKFDNLTKAERGGLSELDKAGFIKRQLVETRQITKHVAQILDSRMNTKYDENDKLIREVKVITLKSKLVSDFRKDFQFYKVREINNYHHAHDAYLNAVVGTALIKKYPKLESEFVYGDYKVYDVRKMIAKSEQEIGKATAKYFFYSNIMNFFKTEITLANGEIRKRPLIETNGETGEIVWDKGRDFATVRKVLSMPQVNIVKKTEVQTGGFSKESILPKRNSDKLIARKKDWDPKKYGGFDSPTVAYSVLVVAKVEKGKSKKLKSVKELLGITIMERSSFEKNPIDFLEAKGYKEVKKDLIIKLPKYSLFELENGRKRMLASAGELQKGNELALPSKYVNFLYLASHYEKLKGSPEDNEQKQLFVEQHKHYLDEIIEQISEFSKRVILADANLDKVLSAYNKHRDKPIREQAENIIHLFTLTNLGAPAAFKYFDTTIDRKRYTSTKEVLDATLIHQSITGLYETRIDLSQLGGDGGEAAAKEAAAKGGMDLLKPLTVERKGVKIKGYWNSQADITCVPKDLLQGEEPVRQQNVTTIHGTQEGDVYYVNLKIDGRRINTEVIGTTLDYAIITPGDVPWILKKPLELTIKLDLEEQQGTLLNNSILSKKGKEELKQLFEKYSALWQSWENQVGHRRIRPHKIATGTVKPTPQKQYHINPKAKPDIQIVINDLLKQGVLIQKESTMNTPVYPVPKPNGRWRMVLDYRAVNKVTPLIAVQNQHSYGILGSLFKGRYKTTIDLSNGFWAHPIVPEDYWITAFTWQGKQYCWTVLPQGFLNSPGLFNGDVVDLLQGIPNVEVYVDDVYISHDSEKEHLEYLDILFNRLKEAGYIISLKKSNIANSIVDFLGFQITNEGRGLTDTFKEKLENITAPTTLKQLQSILGLLNFARNFIPDFTELIAPLYALIPKSPKNYVPWQIEHSTTLETLITKLNGAEYLQGRKGDKTLIMKVNASYTTGYIRYYNEGEKKPISYVSIVFSKTELKFTELEKLLTTVHKGLLKALDLSMGQNIHVYSPIVSMQNIQKTPQTAKKALASRWLSWLSYLEDPRIRFFYDPQMPALKDLPAVDTGKDNKKHPSNFQHIFYTDGSAITSPTKEGHLNAGMGIVYFINKDGNLQKQQEWSISLGNHTAQFAEIAAFEFALKKCLPLGGNILVVTDSNYVAKAYNEELDVWASNGFVNNRKKPLKHISKWKSVADLKRLRPDVVVTHEPGHQKLDSSPHAYGNNLADQLATQASFKVHAGKRTADGSEFEKRTADGSEFESPKKKAKVE

SEQ ID NO: 6374 - protein, 2093 aa, synthetic construct
MPAAKRVKLDGGDKKYSIGLDIGTNSVGWAVITDEYKVPSKKFKVLGNTDRHSIKKNLIGALLFDSGETAEATRLKRTARRRYTRRKNRICYLQEIFSNEMAKVDDSFFHRLEESFLVEEDKKHERHPIFGNIVDEVAYHEKYPTIYHLRKKLVDSTDKADLRLIYLALAHMIKFRGHFLIEGDLNPDNSDVDKLFIQLVQTYNQLFEENPINASGVDAKAILSARLSKSRRLENLIAQLPGEKKNGLFGNLIALSLGLTPNFKSNFDLAEDAKLQLSKDTYDDDLDNLLAQIGDQYADLFLAAKNLSDAILLSDILRVNTEITKAPLSASMIKRYDEHHQDLTLLKALVRQQLPEKYKEIFFDQSKNGYAGYIDGGASQEEFYKFIKPILEKMDGTEELLVKLNREDLLRKQRTFDNGSIPHQIHLGELHAILRRQEDFYPFLKDNREKIEKILTFRIPYYVGPLARGNSRFAWMTRKSEETITPWNFEEVVDKGASAQSFIERMTNFDKNLPNEKVLPKHSLLYEYFTVYNELTKVKYVTEGMRKPAFLSGEQKKAIVDLLFKTNRKVTVKQLKEDYFKKIECFDSVEISGVEDRFNASLGTYHDLLKIIKDKDFLDNEENEDILEDIVLTLTLFEDREMIEERLKTYAHLFDDKVMKQLKRRRYTGWGRLSRKLINGIRDKQSGKTILDFLKSDGFANRNFMQLIHDDSLTFKEDIQKAQVSGQGDSLHEHIANLAGSPAIKKGILQTVKVVDELVKVMGRHKPENIVIEMARENQTTQKGQKNSRERMKRIEEGIKELGSQILKEHPVENTQLQNEKLYLYYLQNGRDMYVDQELDINRLSDYDVDHIVPQSFLKDDSIDNKVLTRSDKARGKSDNVPSEEVVKKMKNYWRQLLNAKLITQRKFDNLTKAERGGLSELDKAGFIKRQLVETRQITKHVAQILDSRMNTKYDENDKLIREVKVITLKSKLVSDFRKDFQFYKVREINNYHHAHDAYLNAVVGTALIKKYPKLESEFVYGDYKVYDVRKMIAKSEQEIGKATAKYFFYSNIMNFFKTEITLANGEIRKRPLIETNGETGEIVWDKGRDFATVRKVLSMPQVNIVKKTEVQTGGFSKESILPKRNSDKLIARKKDWDPKKYGGFDSPTVAYSVLVVAKVEKGKSKKLKSVKELLGITIMERSSFEKNPIDFLEAKGYKEVKKDLIIKLPKYSLFELENGRKRMLASAGELQKGNELALPSKYVNFLYLASHYEKLKGSPEDNEQKQLFVEQHKHYLDEIIEQISEFSKRVILADANLDKVLSAYNKHRDKPIREQAENIIHLFTLTNLGAPAAFKYFDTTIDRKRYTSTKEVLDATLIHQSITGLYETRIDLSQLGGDGGEAAAKEAAAKGGVLNLEEEYRLHEKPVPSSIDPSWLQLFPTVWAERAGMGLANQVPPVVVELRSGASPVAVRQYPMSKEAREGIRPHIQKFLDLGVLVPCRSPWNTPLLPVKKPGTNDYRPVQDLREINKRVQDIHPTVPNPYNLLSSLPPSYTWYSVLDLKDAFFCLRLHPNSQPLFAFEWKDPEKGNTGQLTWTRLPQGFKNSPTLFNEALHRDLAPFRALNPQVVLLQYVDDLLVAAPTYEDCKKGTQKLLQELSKLGYRVSAKKAQLCQREVTYLGYLLKEGKRWLTPARKATVMKIPVPTTPRQVREFLGKAGFCRLFIPGFASLAAPLYPLTKPSIPFIWTEEHQQAFDHIKKALLSAPALALPDLTKPFTLYIDERAGVARGVLTQTLGPWRRPVAYLSKKLDPVASGWPTCLKAVAAVALLLKDADKLTLGQNVTVIASHSLESIVRQPPDRWMTNARMTHYQSLLLNERVSFAPPAVLNPATLLPVESEATPVHRCSEILAEETGTRRDLEDQPLPGVPTWYTDGSSFITEGKRRAGAPIVDGKRTVWASSLPEGTSAQKAELVALTQALRLAEGKNINIYTDSRYAFATAHIHGAIYKQRGWLTSAGKDIKNKEEILALLEAIHLPRRVAIIHCPGHQRGSNPVATGNRRADEAAKQAALSTRVLAGTTKPAGKRTADGSEFEKRTADGSEFESPKKKAKVE

SEQ ID NO: 6375 - protein, 2126 aa, synthetic construct
MPAAKRVKLDGGDKKYSIGLDIGTNSVGWAVITDEYKVPSKKFKVLGNTDRHSIKKNLIGALLFDSGETAEATRLKRTARRRYTRRKNRICYLQEIFSNEMAKVDDSFFHRLEESFLVEEDKKHERHPIFGNIVDEVAYHEKYPTIYHLRKKLVDSTDKADLRLIYLALAHMIKFRGHFLIEGDLNPDNSDVDKLFIQLVQTYNQLFEENPINASGVDAKAILSARLSKSRRLENLIAQLPGEKKNGLFGNLIALSLGLTPNFKSNFDLAEDAKLQLSKDTYDDDLDNLLAQIGDQYADLFLAAKNLSDAILLSDILRVNTEITKAPLSASMIKRYDEHHQDLTLLKALVRQQLPEKYKEIFFDQSKNGYAGYIDGGASQEEFYKFIKPILEKMDGTEELLVKLNREDLLRKQRTFDNGSIPHQIHLGELHAILRRQEDFYPFLKDNREKIEKILTFRIPYYVGPLARGNSRFAWMTRKSEETITPWNFEEVVDKGASAQSFIERMTNFDKNLPNEKVLPKHSLLYEYFTVYNELTKVKYVTEGMRKPAFLSGEQKKAIVDLLFKTNRKVTVKQLKEDYFKKIECFDSVEISGVEDRFNASLGTYHDLLKIIKDKDFLDNEENEDILEDIVLTLTLFEDREMIEERLKTYAHLFDDKVMKQLKRRRYTGWGRLSRKLINGIRDKQSGKTILDFLKSDGFANRNFMQLIHDDSLTFKEDIQKAQVSGQGDSLHEHIANLAGSPAIKKGILQTVKVVDELVKVMGRHKPENIVIEMARENQTTQKGQKNSRERMKRIEEGIKELGSQILKEHPVENTQLQNEKLYLYYLQNGRDMYVDQELDINRLSDYDVDHIVPQSFLKDDSIDNKVLTRSDKARGKSDNVPSEEVVKKMKNYWRQLLNAKLITQRKFDNLTKAERGGLSELDKAGFIKRQLVETRQITKHVAQILDSRMNTKYDENDKLIREVKVITLKSKLVSDFRKDFQFYKVREINNYHHAHDAYLNAVVGTALIKKYPKLESEFVYGDYKVYDVRKMIAKSEQEIGKATAKYFFYSNIMNFFKTEITLANGEIRKRPLIETNGETGEIVWDKGRDFATVRKVLSMPQVNIVKKTEVQTGGFSKESILPKRNSDKLIARKKDWDPKKYGGFDSPTVAYSVLVVAKVEKGKSKKLKSVKELLGITIMERSSFEKNPIDFLEAKGYKEVKKDLIIKLPKYSLFELENGRKRMLASAGELQKGNELALPSKYVNFLYLASHYEKLKGSPEDNEQKQLFVEQHKHYLDEIIEQISEFSKRVILADANLDKVLSAYNKHRDKPIREQAENIIHLFTLTNLGAPAAFKYFDTTIDRKRYTSTKEVLDATLIHQSITGLYETRIDLSQLGGDGGEAAAKEAAAKGGLLGRDLLTKLKAQIQFSTEGPQVTWEDRPAMCLVLNLEEEYRLHEKPVPPSIDPSWLQLFPMVWAEKAGMGLANQVPPVVVELKSDASPVAVRQYPMSKEAREGIRPHIQRFLDLGILVPCQSPWNTPLLPVKKPGTNDYRPVQDLREVNKRVQDIHPTVPNPYNLLSSLPPSHTWYSVLDLKDAFFCLKLHPNSQPLFAFEWRDPEKGNTGQLTWTRLPQGFKNSPTLFNEALHRDLASFRALNPQVVMLQYVDDLLVAAPTYRDCKEGTRRLLQELSKLGYRVSAKKAQLCREEVTYLGYLLKGGKRWLTPARKATVMKIPTPTTPRQVREFLGTAGFCRLWIPGFASLAAPLYPLTRPKVPFTWTEAHQEAFGRIKEALLSAPALALPDLTKPFALYVDEKEGVARGVLTQTLGPWRRPVAYLSKKLDPVASGWPTCLKAIAAVALLLKDADKLTLGQNVLVIAPHNLESIVRQPPDRWMTNARMTHYQSLLLNERVSFAPPAILNPATLLPVESDDTPIHICSEILAEETGTRPDLRDQPLPGVPAWYTDGSSFIMDGRRQAGAAIVDNKRTVWASNLPEGTSAQKAELIALTQALRLAEGKSINIYTDSRYAFATAHVHGAIYKQRGWLTSAGKDIKNKEEILALLEAIHLPKRVAIIHCPGHQRGTDPVATGNRKADEAAKQAAQSTRILTETTKNAGKRTADGSEFEKRTADGSEFESPKKKAKVE

SEQ ID NO: 6376 - protein, 2126 aa, synthetic construct
MPAAKRVKLDGGDKKYSIGLDIGTNSVGWAVITDEYKVPSKKFKVLGNTDRHSIKKNLIGALLFDSGETAEATRLKRTARRRYTRRKNRICYLQEIFSNEMAKVDDSFFHRLEESFLVEEDKKHERHPIFGNIVDEVAYHEKYPTIYHLRKKLVDSTDKADLRLIYLALAHMIKFRGHFLIEGDLNPDNSDVDKLFIQLVQTYNQLFEENPINASGVDAKAILSARLSKSRRLENLIAQLPGEKKNGLFGNLIALSLGLTPNFKSNFDLAEDAKLQLSKDTYDDDLDNLLAQIGDQYADLFLAAKNLSDAILLSDILRVNTEITKAPLSASMIKRYDEHHQDLTLLKALVRQQLPEKYKEIFFDQSKNGYAGYIDGGASQEEFYKFIKPILEKMDGTEELLVKLNREDLLRKQRTFDNGSIPHQIHLGELHAILRRQEDFYPFLKDNREKIEKILTFRIPYYVGPLARGNSRFAWMTRKSEETITPWNFEEVVDKGASAQSFIERMTNFDKNLPNEKVLPKHSLLYEYFTVYNELTKVKYVTEGMRKPAFLSGEQKKAIVDLLFKTNRKVTVKQLKEDYFKKIECFDSVEISGVEDRFNASLGTYHDLLKIIKDKDFLDNEENEDILEDIVLTLTLFEDREMIEERLKTYAHLFDDKVMKQLKRRRYTGWGRLSRKLINGIRDKQSGKTILDFLKSDGFANRNFMQLIHDDSLTFKEDIQKAQVSGQGDSLHEHIANLAGSPAIKKGILQTVKVVDELVKVMGRHKPENIVIEMARENQTTQKGQKNSRERMKRIEEGIKELGSQILKEHPVENTQLQNEKLYLYYLQNGRDMYVDQELDINRLSDYDVDHIVPQSFLKDDSIDNKVLTRSDKARGKSDNVPSEEVVKKMKNYWRQLLNAKLITQRKFDNLTKAERGGLSELDKAGFIKRQLVETRQITKHVAQILDSRMNTKYDENDKLIREVKVITLKSKLVSDFRKDFQFYKVREINNYHHAHDAYLNAVVGTALIKKYPKLESEFVYGDYKVYDVRKMIAKSEQEIGKATAKYFFYSNIMNFFKTEITLANGEIRKRPLIETNGETGEIVWDKGRDFATVRKVLSMPQVNIVKKTEVQTGGFSKESILPKRNSDKLIARKKDWDPKKYGGFDSPTVAYSVLVVAKVEKGKSKKLKSVKELLGITIMERSSFEKNPIDFLEAKGYKEVKKDLIIKLPKYSLFELENGRKRMLASAGELQKGNELALPSKYVNFLYLASHYEKLKGSPEDNEQKQLFVEQHKHYLDEIIEQISEFSKRVILADANLDKVLSAYNKHRDKPIREQAENIIHLFTLTNLGAPAAFKYFDTTIDRKRYTSTKEVLDATLIHQSITGLYETRIDLSQLGGDGGEAAAKEAAAKGGLLGRDLLTKLKAQIQFSTEGPQVTWEDRPAMCLVLNLEEEYRLHEKPVPPSIDPSWLQLFPMVWAEKAGMGLANQVPPVVVELKSDASPVAVRQYPMSKEAREGIRPHIQRFLDLGILVPCQSPWNTPLLPVKKPGTNDYRPVQDLREVNKRVQDIHPTVPNPYNLLSSLPPSHTWYSVLDLKDAFFCLKLHPNSQPLFAFEWRDPEKGNTGQLTWTRLPQGFKNSPTLFNEALHRDLASFRALNPQVVMLQYVDDLLVAAPTYRDCKEGTRRLLQELSKLGYRVSAKKAQLCREEVTYLGYLLKGGKRWLTPARKATVMKIPTPTTPRQVREFLGKAGFCRLFIPGFASLAAPLYPLTRPKVPFTWTEAHQEAFGRIKEALLSAPALALPDLTKPFALYVDEKEGVARGVLTQTLGPWRRPVAYLSKKLDPVASGWPTCLKAIAAVALLLKDADKLTLGQNVLVIAPHNLESIVRQPPDRWMTNARMTHYQSLLLNERVSFAPPAILNPATLLPVESDDTPIHICSEILAEETGTRPDLRDQPLPGVPAWYTDGSSFIMDGRRQAGAAIVDNKRTVWASNLPEGTSAQKAELIALTQALRLAEGKSINIYTDSRYAFATAHVHGAIYKQRGWLTSAGKDIKNKEEILALLEAIHLPKRVAIIHCPGHQRGTDPVATGNRKADEAAKQAAQSTRILTETTKNAGKRTADGSEFEKRTADGSEFESPKKKAKVE

SEQ ID NO: 6377 - protein, 2095 aa, synthetic construct
MPAAKRVKLDGGDKKYSIGLDIGTNSVGWAVITDEYKVPSKKFKVLGNTDRHSIKKNLIGALLFDSGETAEATRLKRTARRRYTRRKNRICYLQEIFSNEMAKVDDSFFHRLEESFLVEEDKKHERHPIFGNIVDEVAYHEKYPTIYHLRKKLVDSTDKADLRLIYLALAHMIKFRGHFLIEGDLNPDNSDVDKLFIQLVQTYNQLFEENPINASGVDAKAILSARLSKSRRLENLIAQLPGEKKNGLFGNLIALSLGLTPNFKSNFDLAEDAKLQLSKDTYDDDLDNLLAQIGDQYADLFLAAKNLSDAILLSDILRVNTEITKAPLSASMIKRYDEHHQDLTLLKALVRQQLPEKYKEIFFDQSKNGYAGYIDGGASQEEFYKFIKPILEKMDGTEELLVKLNREDLLRKQRTFDNGSIPHQIHLGELHAILRRQEDFYPFLKDNREKIEKILTFRIPYYVGPLARGNSRFAWMTRKSEETITPWNFEEVVDKGASAQSFIERMTNFDKNLPNEKVLPKHSLLYEYFTVYNELTKVKYVTEGMRKPAFLSGEQKKAIVDLLFKTNRKVTVKQLKEDYFKKIECFDSVEISGVEDRFNASLGTYHDLLKIIKDKDFLDNEENEDILEDIVLTLTLFEDREMIEERLKTYAHLFDDKVMKQLKRRRYTGWGRLSRKLINGIRDKQSGKTILDFLKSDGFANRNFMQLIHDDSLTFKEDIQKAQVSGQGDSLHEHIANLAGSPAIKKGILQTVKVVDELVKVMGRHKPENIVIEMARENQTTQKGQKNSRERMKRIEEGIKELGSQILKEHPVENTQLQNEKLYLYYLQNGRDMYVDQELDINRLSDYDVDHIVPQSFLKDDSIDNKVLTRSDKARGKSDNVPSEEVVKKMKNYWRQLLNAKLITQRKFDNLTKAERGGLSELDKAGFIKRQLVETRQITKHVAQILDSRMNTKYDENDKLIREVKVITLKSKLVSDFRKDFQFYKVREINNYHHAHDAYLNAVVGTALIKKYPKLESEFVYGDYKVYDVRKMIAKSEQEIGKATAKYFFYSNIMNFFKTEITLANGEIRKRPLIETNGETGEIVWDKGRDFATVRKVLSMPQVNIVKKTEVQTGGFSKESILPKRNSDKLIARKKDWDPKKYGGFDSPTVAYSVLVVAKVEKGKSKKLKSVKELLGITIMERSSFEKNPIDFLEAKGYKEVKKDLIIKLPKYSLFELENGRKRMLASAGELQKGNELALPSKYVNFLYLASHYEKLKGSPEDNEQKQLFVEQHKHYLDEIIEQISEFSKRVILADANLDKVLSAYNKHRDKPIREQAENIIHLFTLTNLGAPAAFKYFDTTIDRKRYTSTKEVLDATLIHQSITGLYETRIDLSQLGGDGGEAAAKEAAAKGGTLNLEDEYRLYETSAEPEVSPGSTWLSDFPQAWAETGGMGLAVRQAPLIIPLKATSTPVSIKQYPMSQEAKLGIKPHIQRLLDQGILVPCQSPWNTPLLPVKKPGTNDYRPVQDLREVNKRVEDIHPTVPNPYNLLSGLPPSHRWYTVLDLKDAFFCLRLHPTSQPLFAFEWRDPGMGISGQLTWTRLPQGFKNSPTLFNEALHRDLADFRIQHPDLILLQYVDDILLAATSELDCQQGTRALLLTLGNLGYRASAKKAQLCQKQVKYLGYLLKEGQRWLTEARKETVMGQPTPKTPRQLREFLGKAGFCRLFIPGFAEMAAPLYPLTKPGTLFNWGPDQQKAYQEIKQALLTAPALGLPDLTKPFELFVDEKQGYAKGVLTQKLGPWRRPVAYLSKKLDPVAAGWPPCLRMVAAIAVLRKDAGKLTMGQPLVILAPHAVEALVKQPPDRWLSNARMTHYQAMLLDTDRVQFGPVVALNPATLLPLPEEGAPHDCLEILAETHGTRPDLTDQPIPDADHTWYTDGSSFLQEGQRKAGAAVTTETEVIWARALPAGTSAQRAELIALTQALKMAEGKRLNVYTDSRYAFATAHIHGEIYRRRGWLTSEGREIKNKSEILALLKALFLPKRLSIIHCLGHQKGDSAEARGNRLADQAAREAAIKTPPDTSTLLAGKRTADGSEFEKRTADGSEFESPKKKAKVE

SEQ ID NO: 6378 - protein, 2095 aa, synthetic construct
MPAAKRVKLDGGDKKYSIGLDIGTNSVGWAVITDEYKVPSKKFKVLGNTDRHSIKKNLIGALLFDSGETAEATRLKRTARRRYTRRKNRICYLQEIFSNEMAKVDDSFFHRLEESFLVEEDKKHERHPIFGNIVDEVAYHEKYPTIYHLRKKLVDSTDKADLRLIYLALAHMIKFRGHFLIEGDLNPDNSDVDKLFIQLVQTYNQLFEENPINASGVDAKAILSARLSKSRRLENLIAQLPGEKKNGLFGNLIALSLGLTPNFKSNFDLAEDAKLQLSKDTYDDDLDNLLAQIGDQYADLFLAAKNLSDAILLSDILRVNTEITKAPLSASMIKRYDEHHQDLTLLKALVRQQLPEKYKEIFFDQSKNGYAGYIDGGASQEEFYKFIKPILEKMDGTEELLVKLNREDLLRKQRTFDNGSIPHQIHLGELHAILRRQEDFYPFLKDNREKIEKILTFRIPYYVGPLARGNSRFAWMTRKSEETITPWNFEEVVDKGASAQSFIERMTNFDKNLPNEKVLPKHSLLYEYFTVYNELTKVKYVTEGMRKPAFLSGEQKKAIVDLLFKTNRKVTVKQLKEDYFKKIECFDSVEISGVEDRFNASLGTYHDLLKIIKDKDFLDNEENEDILEDIVLTLTLFEDREMIEERLKTYAHLFDDKVMKQLKRRRYTGWGRLSRKLINGIRDKQSGKTILDFLKSDGFANRNFMQLIHDDSLTFKEDIQKAQVSGQGDSLHEHIANLAGSPAIKKGILQTVKVVDELVKVMGRHKPENIVIEMARENQTTQKGQKNSRERMKRIEEGIKELGSQILKEHPVENTQLQNEKLYLYYLQNGRDMYVDQELDINRLSDYDVDHIVPQSFLKDDSIDNKVLTRSDKARGKSDNVPSEEVVKKMKNYWRQLLNAKLITQRKFDNLTKAERGGLSELDKAGFIKRQLVETRQITKHVAQILDSRMNTKYDENDKLIREVKVITLKSKLVSDFRKDFQFYKVREINNYHHAHDAYLNAVVGTALIKKYPKLESEFVYGDYKVYDVRKMIAKSEQEIGKATAKYFFYSNIMNFFKTEITLANGEIRKRPLIETNGETGEIVWDKGRDFATVRKVLSMPQVNIVKKTEVQTGGFSKESILPKRNSDKLIARKKDWDPKKYGGFDSPTVAYSVLVVAKVEKGKSKKLKSVKELLGITIMERSSFEKNPIDFLEAKGYKEVKKDLIIKLPKYSLFELENGRKRMLASAGELQKGNELALPSKYVNFLYLASHYEKLKGSPEDNEQKQLFVEQHKHYLDEIIEQISEFSKRVILADANLDKVLSAYNKHRDKPIREQAENIIHLFTLTNLGAPAAFKYFDTTIDRKRYTSTKEVLDATLIHQSITGLYETRIDLSQLGGDGGEAAAKEAAAKGGTLGIEDEYRLHETSTEPDVSLGSTWLSDFPQAWAETGGMGLAVRQAPLIIPLKATSTPVSIQQYPMSHEARLGIKPHIQRLLDQGILVPCQSPWNTPLLPVKKPGTNDYRPVQDLREVNKRVEDIHPTVPNPYNLLSGLPPSHQWYTVLDLKDAFFCLRLHPTSQPLFAFEWRDPGMGISGQLTWTRLPQGFKNSPTLFNEALHRDLADFRIQHPDLILLQYVDDILLAATSELDCQQGTRALLQTLGDLGYRASAKKAQICQKQVKYLGYLLREGQRWLTEARKETVMGQPVPKTPRQLREFLGTAGFCRLWIPGFAEMAAPLYPLTKPGTLFSWGPDQQKAYQEIKQALLTAPALGLPDLTKPFELFVDEKQGYAKGVLTQKLGPWRRPVAYLSKKLDPVAAGWPPCLRMVAAIAVLTKDAGKLTMGQPLVILAPHAVEALVKQPPDRWLSNARMTHYQAMLLDTDRVQFGPVVALNPATLLPLPEEGAPHDCLEILAETHGTRPDLTDQPIPDADHTWYTDGSSFLQEGQRKAGAAVTTETEVIWAGALPAGTSAQRAELIALTQALKMAEGKRLNVYTDSRYAFATAHIHGEIYRRRGWLTSEGREIKNKSEILALLKALFLPKRLSIIHCLGHQKGDSAEARGNRLADQAAREAAIKTPPDTSTLLAGKRTADGSEFEKRTADGSEFESPKKKAKVE

SEQ ID NO: 6379 - protein, 2087 aa, synthetic construct
MPAAKRVKLDGGDKKYSIGLDIGTNSVGWAVITDEYKVPSKKFKVLGNTDRHSIKKNLIGALLFDSGETAEATRLKRTARRRYTRRKNRICYLQEIFSNEMAKVDDSFFHRLEESFLVEEDKKHERHPIFGNIVDEVAYHEKYPTIYHLRKKLVDSTDKADLRLIYLALAHMIKFRGHFLIEGDLNPDNSDVDKLFIQLVQTYNQLFEENPINASGVDAKAILSARLSKSRRLENLIAQLPGEKKNGLFGNLIALSLGLTPNFKSNFDLAEDAKLQLSKDTYDDDLDNLLAQIGDQYADLFLAAKNLSDAILLSDILRVNTEITKAPLSASMIKRYDEHHQDLTLLKALVRQQLPEKYKEIFFDQSKNGYAGYIDGGASQEEFYKFIKPILEKMDGTEELLVKLNREDLLRKQRTFDNGSIPHQIHLGELHAILRRQEDFYPFLKDNREKIEKILTFRIPYYVGPLARGNSRFAWMTRKSEETITPWNFEEVVDKGASAQSFIERMTNFDKNLPNEKVLPKHSLLYEYFTVYNELTKVKYVTEGMRKPAFLSGEQKKAIVDLLFKTNRKVTVKQLKEDYFKKIECFDSVEISGVEDRFNASLGTYHDLLKIIKDKDFLDNEENEDILEDIVLTLTLFEDREMIEERLKTYAHLFDDKVMKQLKRRRYTGWGRLSRKLINGIRDKQSGKTILDFLKSDGFANRNFMQLIHDDSLTFKEDIQKAQVSGQGDSLHEHIANLAGSPAIKKGILQTVKVVDELVKVMGRHKPENIVIEMARENQTTQKGQKNSRERMKRIEEGIKELGSQILKEHPVENTQLQNEKLYLYYLQNGRDMYVDQELDINRLSDYDVDHIVPQSFLKDDSIDNKVLTRSDKARGKSDNVPSEEVVKKMKNYWRQLLNAKLITQRKFDNLTKAERGGLSELDKAGFIKRQLVETRQITKHVAQILDSRMNTKYDENDKLIREVKVITLKSKLVSDFRKDFQFYKVREINNYHHAHDAYLNAVVGTALIKKYPKLESEFVYGDYKVYDVRKMIAKSEQEIGKATAKYFFYSNIMNFFKTEITLANGEIRKRPLIETNGETGEIVWDKGRDFATVRKVLSMPQVNIVKKTEVQTGGFSKESILPKRNSDKLIARKKDWDPKKYGGFDSPTVAYSVLVVAKVEKGKSKKLKSVKELLGITIMERSSFEKNPIDFLEAKGYKEVKKDLIIKLPKYSLFELENGRKRMLASAGELQKGNELALPSKYVNFLYLASHYEKLKGSPEDNEQKQLFVEQHKHYLDEIIEQISEFSKRVILADANLDKVLSAYNKHRDKPIREQAENIIHLFTLTNLGAPAAFKYFDTTIDRKRYTSTKEVLDATLIHQSITGLYETRIDLSQLGGDGGEAAAKEAAAKGGLDDEYRLYSPLVKPDQNIQFWLEQFPQAWAETAGMGLAKQVPPQVIQLKASATPVSVRQYPLSKEAQEGIRPHVQRLIQQGILVPVQSPWNTPLLPVRKPGTNDYRPVQDLREVNKRVQDIHPTVPNPYNLLCALPPQRSWYTVLDLKDAFFCLRLHPTSQPLFAFEWRDPGTGRTGQLTWTRLPQGFKNSPTIFNEALHRDLANFRIQHPQVTLLQYVDDLLLAGATKQDCLEGTKALLLELSDLGYRASAKKAQICRREVTYLGYSLRDGQRWLTEARKKTVVQIPAPTTAKQVREFLGKAGFCRLFIPGFATLAAPLYPLTKPKGEFSWAPEHQKAFDAIKKALLSAPALALPDVTKPFTLYVDERKGVARGVLTQTLGPWRRPVAYLSKKLDPVASGWPVCLKAIAAVAILVKDADKLTLGQNITVIAPHALENIVRQPPDRWMTNARMTHYQSLLLTERVTFAPPAALNPATLLPEETDEPVTHDCHQLLIEETGVRKDLTDIPLTGEVLTWFTDGSSYVVEGKRMAGAAVVDGTRTIWASSLPEGTSAQKAELMALTQALRLAEGKSINIYTDSRYAFATAHVHGAIYKQRGWLTSAGREIKNKEEILSLLEALHLPKRLAIIHCPGHQKAKDPISRGNQMADRVAKQAAQGVNLLPAGKRTADGSEFEKRTADGSEFESPKKKAKVE

SEQ ID NO: 6380 - protein, 2089 aa, synthetic construct
MPAAKRVKLDGGDKKYSIGLDIGTNSVGWAVITDEYKVPSKKFKVLGNTDRHSIKKNLIGALLFDSGETAEATRLKRTARRRYTRRKNRICYLQEIFSNEMAKVDDSFFHRLEESFLVEEDKKHERHPIFGNIVDEVAYHEKYPTIYHLRKKLVDSTDKADLRLIYLALAHMIKFRGHFLIEGDLNPDNSDVDKLFIQLVQTYNQLFEENPINASGVDAKAILSARLSKSRRLENLIAQLPGEKKNGLFGNLIALSLGLTPNFKSNFDLAEDAKLQLSKDTYDDDLDNLLAQIGDQYADLFLAAKNLSDAILLSDILRVNTEITKAPLSASMIKRYDEHHQDLTLLKALVRQQLPEKYKEIFFDQSKNGYAGYIDGGASQEEFYKFIKPILEKMDGTEELLVKLNREDLLRKQRTFDNGSIPHQIHLGELHAILRRQEDFYPFLKDNREKIEKILTFRIPYYVGPLARGNSRFAWMTRKSEETITPWNFEEVVDKGASAQSFIERMTNFDKNLPNEKVLPKHSLLYEYFTVYNELTKVKYVTEGMRKPAFLSGEQKKAIVDLLFKTNRKVTVKQLKEDYFKKIECFDSVEISGVEDRFNASLGTYHDLLKIIKDKDFLDNEENEDILEDIVLTLTLFEDREMIEERLKTYAHLFDDKVMKQLKRRRYTGWGRLSRKLINGIRDKQSGKTILDFLKSDGFANRNFMQLIHDDSLTFKEDIQKAQVSGQGDSLHEHIANLAGSPAIKKGILQTVKVVDELVKVMGRHKPENIVIEMARENQTTQKGQKNSRERMKRIEEGIKELGSQILKEHPVENTQLQNEKLYLYYLQNGRDMYVDQELDINRLSDYDVDHIVPQSFLKDDSIDNKVLTRSDKARGKSDNVPSEEVVKKMKNYWRQLLNAKLITQRKFDNLTKAERGGLSELDKAGFIKRQLVETRQITKHVAQILDSRMNTKYDENDKLIREVKVITLKSKLVSDFRKDFQFYKVREINNYHHAHDAYLNAVVGTALIKKYPKLESEFVYGDYKVYDVRKMIAKSEQEIGKATAKYFFYSNIMNFFKTEITLANGEIRKRPLIETNGETGEIVWDKGRDFATVRKVLSMPQVNIVKKTEVQTGGFSKESILPKRNSDKLIARKKDWDPKKYGGFDSPTVAYSVLVVAKVEKGKSKKLKSVKELLGITIMERSSFEKNPIDFLEAKGYKEVKKDLIIKLPKYSLFELENGRKRMLASAGELQKGNELALPSKYVNFLYLASHYEKLKGSPEDNEQKQLFVEQHKHYLDEIIEQISEFSKRVILADANLDKVLSAYNKHRDKPIREQAENIIHLFTLTNLGAPAAFKYFDTTIDRKRYTSTKEVLDATLIHQSITGLYETRIDLSQLGGDGGEAAAKEAAAKGGTLQLDDEYRLYSPLVKPDQNIQFWLEQFPQAWAETAGMGLAKQVPPQVIQLKASATPVSVRQYPLSKEAQEGIRPHVQRLIQQGILVPVQSPWNTPLLPVRKPGTNDYRPVQDLREVNKRVQDIHPTVPNPYNLLCALPPQRSWYTVLDLKDAFFCLRLHPTSQPLFAFEWRDPGTGRTGQLTWTRLPQGFKNSPTIFDEALHRDLANFRIQHPQVTLLQYVDDLLLAGATKQDCLEGTKALLLELSDLGYRASAKKAQICRREVTYLGYSLRDGQRWLTEARKKTVVQIPAPTTAKQVREFLGTAGFCRLWIPGFATLAAPLYPLTKEKGEFSWAPEHQKAFDAIKKALLSAPALALPDVTKPFTLYVDERKGVARGVLTQTLGPWRRPVAYLSKKLDPVASGWPVCLKAIAAVAILVKDADKLTLGQNITVIAPHALENIVRQPPDRWMTNARMTHYQSLLLTERVTFAPPAALNPATLLPEETDEPVTHDCHQLLIEETGVRKDLTDIPLTGEVLTWFTDGSSYVVEGKRMAGAAVVDGTRTIWASSLPEGTSAQKAELMALTQALRLAEGKSINIYTDSRYAFATAHVHGAIYKQRGLLTSAGREIKNKEEILSLLEALHLPKRLAIIHCPGHQKAKDPISRGNQMADRVAKQAAQGVNLLAGKRTADGSEFEKRTADGSEFESPKKKAKVE

SEQ ID NO: 6381 - protein, 2087 aa, synthetic construct; identical to SEQ ID NO: 6379

SEQ ID NO: 6382 - protein, 2175 aa, synthetic construct
MPAAKRVKLDGGDKKYSIGLDIGTNSVGWAVITDEYKVPSKKFKVLGNTDRHSIKKNLIGALLFDSGETAEATRLKRTARRRYTRRKNRICYLQEIFSNEMAKVDDSFFHRLEESFLVEEDKKHERHPIFGNIVDEVAYHEKYPTIYHLRKKLVDSTDKADLRLIYLALAHMIKFRGHFLIEGDLNPDNSDVDKLFIQLVQTYNQLFEENPINASGVDAKAILSARLSKSRRLENLIAQLPGEKKNGLFGNLIALSLGLTPNFKSNFDLAEDAKLQLSKDTYDDDLDNLLAQIGDQYADLFLAAKNLSDAILLSDILRVNTEITKAPLSASMIKRYDEHHQDLTLLKALVRQQLPEKYKEIFFDQSKNGYAGYIDGGASQEEFYKFIKPILEKMDGTEELLVKLNREDLLRKQRTFDNGSIPHQIHLGELHAILRRQEDFYPFLKDNREKIEKILTFRIPYYVGPLARGNSRFAWMTRKSEETITPWNFEEVVDKGASAQSFIERMTNFDKNLPNEKVLPKHSLLYEYFTVYNELTKVKYVTEGMRKPAFLSGEQKKAIVDLLFKTNRKVTVKQLKEDYFKKIECFDSVEISGVEDRFNASLGTYHDLLKIIKDKDFLDNEENEDILEDIVLTLTLFEDREMIEERLKTYAHLFDDKVMKQLKRRRYTGWGRLSRKLINGIRDKQSGKTILDFLKSDGFANRNFMQLIHDDSLTFKEDIQKAQVSGQGDSLHEHIANLAGSPAIKKGILQTVKVVDELVKVMGRHKPENIVIEMARENQTTQKGQKNSRERMKRIEEGIKELGSQILKEHPVENTQLQNEKLYLYYLQNGRDMYVDQELDINRLSDYDVDHIVPQSFLKDDSIDNKVLTRSDKARGKSDNVPSEEVVKKMKNYWRQLLNAKLITQRKFDNLTKAERGGLSELDKAGFIKRQLVETRQITKHVAQILDSRMNTKYDENDKLIREVKVITLKSKLVSDFRKDFQFYKVREINNYHHAHDAYLNAVVGTALIKKYPKLESEFVYGDYKVYDVRKMIAKSEQEIGKATAKYFFYSNIMNFFKTEITLANGEIRKRPLIETNGETGEIVWDKGRDFATVRKVLSMPQVNIVKKTEVQTGGFSKESILPKRNSDKLIARKKDWDPKKYGGFDSPTVAYSVLVVAKVEKGKSKKLKSVKELLGITIMERSSFEKNPIDFLEAKGYKEVKKDLIIKLPKYSLFELENGRKRMLASAGELQKGNELALPSKYVNFLYLASHYEKLKGSPEDNEQKQLFVEQHKHYLDEIIEQISEFSKRVILADANLDKVLSAYNKHRDKPIREQAENIIHLFTLTNLGAPAAFKYFDTTIDRKRYTSTKEVLDATLIHQSITGLYETRIDLSQLGGDGGEAAAKEAAAKGGMDPLQLLQPLEAEIKGTKLKAHWNSGATITCVPQAFLEEEVPIKNIWIKTIHGEKEQPVYYLTFKIQGRKVEAEVISSPYDYILVSPSDIPWLMKKPLQLTTLVPLQEYEERLLKQTMLTGSYKEKLQSLFLKYDALWQHWENQVGHRRIKPHHIATGTVNPRPQKQYPINPKAKASIQTVINDLLKQGVLIQQNSIMNTPVYPVPKPDGKWRMVLDYREVNKTIPLIAAQNQHSAGILSSIFRGKYKTTLDLSNGFWAHSITPESYWLTAFTWLGQQYCWTRLPQGFLNSPALFNADVVDLLKEVPNVQVYVDDIYISHDDPREHLEQLEKVFSLLLNAGYVVSLKKSEIAQHEVEFLGFNITKEGRGLTETFKQKLLNITPPRDLKQLQSILGKLNFARNFIPNFSELVKPLYNIIATAPGKYITWTTDNSQQLQNIISMLNSAENLEERNPEVRLIMKVNTSPSAGYIRFYNEFAKRPIMYLNYVYTKAEVKFTNTEKLLTTIHKGLIKALDLGMGQEILVYSPIVSMTKIQKTPLPERKALPIRWITWMSYLEDPRIQFHYDKTLPELQQVPTVTDDIIAKIKHPSEFSMVFYTDGSAIKHPNVNKSHNAGMGIAQVQFKPEFTVINTWSIPLGDHTAQLAEVAAVEFACKKALKIDGPVLIVTDSFYVAESVNKELPYWQSNGFFNNKKKPLKHVSKWKSIADCIQLKPDIIIIHEKGHQPTASTFHTEGNNLADKLATQGSYVVNAGKRTADGSEFEKRTADGSEFESPKKKAKVE

SEQ ID NO: 6383 - protein, 2095 aa, synthetic construct
MPAAKRVKLDGGDKKYSIGLDIGTNSVGWAVITDEYKVPSKKFKVLGNTDRHSIKKNLIGALLFDSGETAEATRLKRTARRRYTRRKNRICYLQEIFSNEMAKVDDSFFHRLEESFLVEEDKKHERHPIFGNIVDEVAYHEKYPTIYHLRKKLVDSTDKADLRLIYLALAHMIKFRGHFLIEGDLNPDNSDVDKLFIQLVQTYNQLFEENPINASGVDAKAILSARLSKSRRLENLIAQLPGEKKNGLFGNLIALSLGLTPNFKSNFDLAEDAKLQLSKDTYDDDLDNLLAQIGDQYADLFLAAKNLSDAILLSDILRVNTEITKAPLSASMIKRYDEHHQDLTLLKALVRQQLPEKYKEIFFDQSKNGYAGYIDGGASQEEFYKFIKPILEKMDGTEELLVKLNREDLLRKQRTFDNGSIPHQIHLGELHAILRRQEDFYPFLKDNREKIEKILTFRIPYYVGPLARGNSRFAWMTRKSEETITPWNFEEVVDKGASAQSFIERMTNFDKNLPNEKVLPKHSLLYEYFTVYNELTKVKYVTEGMRKPAFLSGEQKKAIVDLLFKTNRKVTVKQLKEDYFKKIECFDSVEISGVEDRFNASLGTYHDLLKIIKDKDFLDNEENEDILEDIVLTLTLFEDREMIEERLKTYAHLFDDKVMKQLKRRRYTGWGRLSRKLINGIRDKQSGKTILDFLKSDGFANRNFMQLIHDDSLTFKEDIQKAQVSGQGDSLHEHIANLAGSPAIKKGILQTVKVVDELVKVMGRHKPENIVIEMARENQTTQKGQKNSRERMKRIEEGIKELGSQILKEHPVENTQLQNEKLYLYYLQNGRDMYVDQELDINRLSDYDVDHIVPQSFLKDDSIDNKVLTRSDKARGKSDNVPSEEVVKKMKNYWRQLLNAKLITQRKFDNLTKAERGGLSELDKAGFIKRQLVETRQITKHVAQILDSRMNTKYDENDKLIREVKVITLKSKLVSDFRKDFQFYKVREINNYHHAHDAYLNAVVGTALIKKYPKLESEFVYGDYKVYDVRKMIAKSEQEIGKATAKYFFYSNIMNFFKTEITLANGEIRKRPLIETNGETGEIVWDKGRDFATVRKVLSMPQVNIVKKTEVQTGGFSKESILPKRNSDKLIARKKDWDPKKYGGFDSPTVAYSVLVVAKVEKGKSKKLKSVKELLGITIMERSSFEKNPIDFLEAKGYKEVKKDLIIKLPKYSLFELENGRKRMLASAGELQKGNELALPSKYVNFLYLASHYEKLKGSPEDNEQKQLFVEQHKHYLDEIIEQISEFSKRVILADANLDKVLSAYNKHRDKPIREQAENIIHLFTLTNLGAPAAFKYFDTTIDRKRYTSTKEVLDATLIHQSITGLYETRIDLSQLGGDGGEAAAKEAAAKGGTLNIEDEYRLHETSKEPDVPLGSTWLSDFPQAWAETGGMGLAVRQAPLIIPLKATSTPVSIKQYPMSQEARLGIKPHIQRLLDQGILVPCQSPWNTPLLPVKKPGTNDYRPVQDLREVNKRVEDIHPTVPNPYNLLSGLPPSHQWYTVLDLKDAFFCLRLHPTSQPLFAFEWRDPEMGISGQLTWTRLPQGFKNSPTLFNEALHRDLADFRIQHPDLILLQYVDDLLLAATSEQDCQRGTRALLQTLGNLGYRASAKKAQICQKQVKYLGYLLKEGQRWLTEARKETVMGQPTPKTPRQLREFLGKAGFCRLFIPGFAEMAAPLYPLTKPGTLFNWGPDQQKAYQEIKQALLTAPALGLPDLTKPFELFVDEKQGYAKGVLTQKLGPWRRPVAYLSKKLDPVAAGWPPCLRMVAAIAVLTKDAGKLTMGQPLVILAPHAVEALVKQPPDRWLSNARMTHYQAMLLDTDRVQFGPVVALNPATLLPLPEKEAPHDCLEILAETHGTRPDLTDQPIPDADYTWYTDGSSFLQEGQRRAGAAVTTETEVIWARALPAGTSAQRAELIALTQALKMAEGKKLNVYTDSRYAFATAHVHGEIYRRRGWLTSEGREIKNKNEILALLKALFLPKRLSIIHCPGHQKGNSAEARGNRMADQAAREAAMKAVLETSTLLAGKRTADGSEFEKRTADGSEFESPKKKAKVE

SEQ ID NO: 6384 - protein, 2102 aa, synthetic construct
MPAAKRVKLDGGDKKYSIGLDIGTNSVGWAVITDEYKVPSKKFKVLGNTDRHSIKKNLIGALLFDSGETAEATRLKRTARRRYTRRKNRICYLQEIFSNEMAKVDDSFFHRLEESFLVEEDKKHERHPIFGNIVDEVAYHEKYPTIYHLRKKLVDSTDKADLRLIYLALAHMIKFRGHFLIEGDLNPDNSDVDKLFIQLVQTYNQLFEENPINASGVDAKAILSARLSKSRRLENLIAQLPGEKKNGLFGNLIALSLGLTPNFKSNFDLAEDAKLQLSKDTYDDDLDNLLAQIGDQYADLFLAAKNLSDAILLSDILRVNTEITKAPLSASMIKRYDEHHQDLTLLKALVRQQLPEKYKEIFFDQSKNGYAGYIDGGASQEEFYKFIKPILEKMDGTEELLVKLNREDLLRKQRTFDNGSIPHQIHLGELHAILRRQEDFYPFLKDNREKIEKILTFRIPYYVGPLARGNSRFAWMTRKSEETITPWNFEEVVDKGASAQSFIERMTNFDKNLPNEKVLPKHSLLYEYFTVYNELTKVKYVTEGMRKPAFLSGEQKKAIVDLLFKTNRKVTVKQLKEDYFKKIECFDSVEISGVEDRFNASLGTYHDLLKIIKDKDFLDNEENEDILEDIVLTLTLFEDREMIEERLKTYAHLFDDKVMKQLKRRRYTGWGRLSRKLINGIRDKQSGKTILDFLKSDGFANRNFMQLIHDDSLTFKEDIQKAQVSGQGDSLHEHIANLAGSPAIKKGILQTVKVVDELVKVMGRHKPENIVIEMARENQTTQKGQKNSRERMKRIEEGIKELGSQILKEHPVENTQLQNEKLYLYYLQNGRDMYVDQELDINRLSDYDVDHIVPQSFLKDDSIDNKVLTRSDKARGKSDNVPSEEVVKKMKNYWRQLLNAKLITQRKFDNLTKAERGGLSELDKAGFIKRQLVETRQITKHVAQILDSRMNTKYDENDKLIREVKVITLKSKLVSDFRKDFQFYKVREINNYHHAHDAYLNAVVGTALIKKYPKLESEFVYGDYKVYDVRKMIAKSEQEIGKATAKYFFYSNIMNFFKTEITLANGEIRKRPLIETNGETGEIVWDKGRDFATVRKVLSMPQVNIVKKTEVQTGGFSKESILPKRNSDKLIARKKDWDPKKYGGFDSPTVAYSVLVVAKVEKGKSKKLKSVKELLGITIMERSSFEKNPIDFLEAKGYKEVKKDLIIKLPKYSLFELENGRKRMLASAGELQKGNELALPSKYVNFLYLASHYEKLKGSPEDNEQKQLFVEQHKHYLDEIIEQISEFSKRVILADANLDKVLSAYNKHRDKPIREQAENIIHLFTLTNLGAPAAFKYFDTTIDRKRYTSTKEVLDATLIHQSITGLYETRIDLSQLGGDGGEAAAKEAAAKEAAAKGGTAPLEEEYRLFLEAPIQNVTLLEQWKREIPKVWAEINPPGLASTQAPIHVQLLSTALPVRVRQYPITLEAKRSLRETIRKFRAAGILRPVHSPWNTPLLPVRKSGTSEYRMVQDLREVNKRVETIHPTVPNPYTLLSLLPPDRIWYSVLDLKDAFFCIPLAPESQLIFAFEWADAEEGESGQLTWTRLPQGFKNSPTLFNEALNRDLQGFRLDHPSVSLLQYVDDLLIAADTQAACLSATRDLLMTLAELGYRVSGKKAQLCQEEVTYLGFKIHKGSRSLSNSRTQAILQIPVPKTKRQVREFLGTIGYCRLWIPGFAELAQPLYAATRPGNDPLVWGEKEEEAFQSLKLALTQPPALALPSLDKPFQLFVEETSGAAKGVLTQALGPWKRPVAYLSKRLDPVAAGWPRCLRAIAAAALLTREASKLTFGQDIEITSSHNLESLLRSPPDKWLTNARITQYQVLLLDPPRVRFKQTAALNPATLLPETDDTLPIHHCLDTLDSLTSTRPDLTDQPLAQAEATLFTDGSSYIRDGKRYAGAAVVTLDSVIWAEPLPIGTSAQKAELIALTKALEWSKDKSVNIYTDSRYAFATLHVHGMIYRERGWLTAGGKAIKNAPEILALLTAVWLPKRVAVMHCKGHQKDDAPTSTGNRRADEVAREVAIRPLSTQATISAGKRTADGSEFEKRTADGSEFESPKKKAKVE

SEQ ID NO: 6385 - protein, 2102 aa, synthetic construct
MPAAKRVKLDGGDKKYSIGLDIGTNSVGWAVITDEYKVPSKKFKVLGNTDRHSIKKNLIGALLFDSGETAEATRLKRTARRRYTRRKNRICYLQEIFSNEMAKVDDSFFHRLEESFLVEEDKKHERHPIFGNIVDEVAYHEKYPTIYHLRKKLVDSTDKADLRLIYLALAHMIKFRGHFLIEGDLNPDNSDVDKLFIQLVQTYNQLFEENPINASGVDAKAILSARLSKSRRLENLIAQLPGEKKNGLFGNLIALSLGLTPNFKSNFDLAEDAKLQLSKDTYDDDLDNLLAQIGDQYADLFLAAKNLSDAILLSDILRVNTEITKAPLSASMIKRYDEHHQDLTLLKALVRQQLPEKYKEIFFDQSKNGYAGYIDGGASQEEFYKFIKPILEKMDGTEELLVKLNREDLLRKQRTFDNGSIPHQIHLGELHAILRRQEDFYPFLKDNREKIEKILTFRIPYYVGPLARGNSRFAWMTRKSEETITPWNFEEVVDKGASAQSFIERMTNFDKNLPNEKVLPKHSLLYEYFTVYNELTKVKYVTEGMRKPAFLSGEQKKAIVDLLFKTNRKVTVKQLKEDYFKKIECFDSVEISGVEDRFNASLGTYHDLLKIIKDKDFLDNEENEDILEDIVLTLTLFEDREMIEERLKTYAHLFDDKVMKQLKRRRYTGWGRLSRKLINGIRDKQSGKTILDFLKSDGFANRNFMQLIHDDSLTFKEDIQKAQVSGQGDSLHEHIANLAGSPAIKKGILQTVKVVDELVKVMGRHKPENIVIEMARENQTTQKGQKNSRERMKRIEEGIKELGSQILKEHPVENTQLQNEKLYLYYLQNGRDMYVDQELDINRLSDYDVDHIVPQSFLKDDSIDNKVLTRSDKARGKSDNVPSEEVVKKMKNYWRQLLNAKLITQRKFDNLTKAERGGLSELDKAGFIKRQLVETRQITKHVAQILDSRMNTKYDENDKLIREVKVITLKSKLVSDFRKDFQFYKVREINNYHHAHDAYLNAVVGTALIKKYPKLESEFVYGDYKVYDVRKMIAKSEQEIGKATAKYFFYSNIMNFFKTEITLANGEIRKRPLIETNGETGEIVWDKGRDFATVRKVLSMPQVNIVKKTEVQTGGFSKESILPKRNSDKLIARKKDWDPKKYGGFDSPTVAYSVLVVAKVEKGKSKKLKSVKELLGITIMERSSFEKNPIDFLEAKGYKEVKKDLIIKLPKYSLFELENGRKRMLASAGELQKGNELALPSKYVNFLYLASHYEKLKGSPEDNEQKQLFVEQHKHYLDEIIEQISEFSKRVILADANLDKVLSAYNKHRDKPIREQAENIIHLFTLTNLGAPAAFKYFDTTIDRKRYTSTKEVLDATLIHQSITGLYETRIDLSQLGGDGGEAAAKEAAAKEAAAKGGTAPLEEEYRLFLEAPIQNVTLLEQWKREIPKVWAEINPPGLASTQAPIHVQLLSTALPVRVRQYPITLEAKRSLRETIRKFRAAGILRPVHSPWNTPLLPVRKSGTSEYRMVQDLREVNKRVETIHPTVPNPYTLLSLLPPDRIWYSVLDLKDAFFCIPLAPESQLIFAFEWADAEEGESGQLTWTRLPQGFKNSPTLFNEALNRDLQGFRLDHPSVSLLQYVDDLLIAADTQAACLSATRDLLMTLAELGYRVSGKKAQLCQEEVTYLGFKIHKGSRSLSNSRTQAILQIPVPKTKRQVREFLGKIGYCRLFIPGFAELAQPLYAATRPGNDPLVWGEKEEEAFQSLKLALTQPPALALPSLDKPFQLFVEETSGAAKGVLTQALGPWKRPVAYLSKRLDPVAAGWPRCLRAIAAAALLTREASKLTFGQDIEITSSHNLESLLRSPPDKWLTNARITQYQVLLLDPPRVRFKQTAALNPATLLPETDDTLPIHHCLDTLDSLTSTRPDLTDQPLAQAEATLFTDGSSYIRDGKRYAGAAVVTLDSVIWAEPLPIGTSAQKAELIALTKALEWSKDKSVNIYTDSRYAFATLHVHGMIYRERGWLTAGGKAIKNAPEILALLTAVWLPKRVAVMHCKGHQKDDAPTSTGNRRADEVAREVAIRPLSTQATISAGKRTADGSEFEKRTADGSEFESPKKKAKVE

SEQ ID NO: 6386 - protein, 2106 aa, synthetic construct
MPAAKRVKLDGGDKKYSIGLDIGTNSVGWAVITDEYKVPSKKFKVLGNTDRHSIKKNLIGALLFDSGETAEATRLKRTARRRYTRRKNRICYLQEIFSNEMAKVDDSFFHRLEESFLVEEDKKHERHPIFGNIVDEVAYHEKYPTIYHLRKKLVDSTDKADLRLIYLALAHMIKFRGHFLIEGDLNPDNSDVDKLFIQLVQTYNQLFEENPINASGVDAKAILSARLSKSRRLENLIAQLPGEKKNGLFGNLIALSLGLTPNFKSNFDLAEDAKLQLSKDTYDDDLDNLLAQIGDQYADLFLAAKNLSDAILLSDILRVNTEITKAPLSASMIKRYDEHHQDLTLLKALVRQQLPEKYKEIFFDQSKNGYAGYIDGGASQEEFYKFIKPILEKMDGTEELLVKLNREDLLRKQRTFDNGSIPHQIHLGELHAILRRQEDFYPFLKDNREKIEKILTFRIPYYVGPLARGNSRFAWMTRKSEETITPWNFEEVVDKGASAQSFIERMTNFDKNLPNEKVLPKHSLLYEYFTVYNELTKVKYVTEGMRKPAFLSGEQKKAIVDLLFKTNRKVTVKQLKEDYFKKIECFDSVEISGVEDRFNASLGTYHDLLKIIKDKDFLDNEENEDILEDIVLTLTLFEDREMIEERLKTYAHLFDDKVMKQLKRRRYTGWGRLSRKLINGIRDKQSGKTILDFLKSDGFANRNFMQLIHDDSLTFKEDIQKAQVSGQGDSLHEHIANLAGSPAIKKGILQTVKVVDELVKVMGRHKPENIVIEMARENQTTQKGQKNSRERMKRIEEGIKELGSQILKEHPVENTQLQNEKLYLYYLQNGRDMYVDQELDINRLSDYDVDHIVPQSFLKDDSIDNKVLTRSDKARGKSDNVPSEEVVKKMKNYWRQLLNAKLITQRKFDNLTKAERGGLSELDKAGFIKRQLVETRQITKHVAQILDSRMNTKYDENDKLIREVKVITLKSKLVSDFRKDFQFYKVREINNYHHAHDAYLNAVVGTALIKKYPKLESEFVYGDYKVYDVRKMIAKSEQEIGKATAKYFFYSNIMNFFKTEITLANGEIRKRPLIETNGETGEIVWDKGRDFATVRKVLSMPQVNIVKKTEVQTGGFSKESILPKRNSDKLIARKKDWDPKKYGGFDSPTVAYSVLVVAKVEKGKSKKLKSVKELLGITIMERSSFEKNPIDFLEAKGYKEVKKDLIIKLPKYSLFELENGRKRMLASAGELQKGNELALPSKYVNFLYLASHYEKLKGSPEDNEQKQLFVEQHKHYLDEIIEQISEFSKRVILADANLDKVLSAYNKHRDKPIREQAENIIHLFTLTNLGAPAAFKYFDTTIDRKRYTSTKEVLDATLIHQSITGLYETRIDLSQLGGDGGEAAAKEAAAKEAAAKGGTVSLQDEHRLFDIPVTTSLPDVWLQDFPQAWAETGGLGRAKCQAPIIIDLKPTAVPVSIKQYPMSLEAHMGIRQHIIKFLELGVLRPCRSPWNTPLLPVKKPGTQDYRPVQDLREINKRTVDIHPTVPNPYNLLSTLKPDYSWYTVLDLKDAFFCLPLAPQSQELFAFEWKDPERGISGQLTWTRLPQGFKNSPTLFNEALHRDLTDFRTQHPEVTLLQYVDDLLLAAPTKKACTQGTRHLLQELGEKGYRASAKKAQICQTKVTYLGYILSEGKRWLTPGRIETVARIPPPRNPREVREFLGTAGFCRLWIPGFAELAAPLYALTKPSTPFTWQTEHQLAFEALKKALLSAPALGLPDTSKPFTLFLDERQGIAKGVLTQKLGPWKRPVAYLSKKLDPVAAGWPPCLRIMAATAMLVKDSAKLTLGQPLTVITPHTLEAIVRQPPDRWITNARLTHYQALLLDTDRVQFGPPVTLNPATLLPVPENQPSPHDCRQVLAETHGTREDLKDQELPDADHTWYTDGSSYLDSGTRRAGAAVVDGHNTIWAQSLPPGTSAQKAELIALTKALELSKGKKANIYTDSRYAFATAHTHGSIYERRGWLTSEGKEIKNKAEIIALLKALFLPQEVAIIHCPGHQKGQDPVAVGNRQADRVARQAAMAEVLTLATEPDNTSHITAGKRTADGSEFEKRTADGSEFESPKKKAKVE

SEQ ID NO: 6387 - protein, 2091 aa, synthetic construct
MPAAKRVKLDGGDKKYSIGLDIGTNSVGWAVITDEYKVPSKKFKVLGNTDRHSIKKNLIGALLFDSGETAEATRLKRTARRRYTRRKNRICYLQEIFSNEMAKVDDSFFHRLEESFLVEEDKKHERHPIFGNIVDEVAYHEKYPTIYHLRKKLVDSTDKADLRLIYLALAHMIKFRGHFLIEGDLNPDNSDVDKLFIQLVQTYNQLFEENPINASGVDAKAILSARLSKSRRLENLIAQLPGEKKNGLFGNLIALSLGLTPNFKSNFDLAEDAKLQLSKDTYDDDLDNLLAQIGDQYADLFLAAKNLSDAILLSDILRVNTEITKAPLSASMIKRYDEHHQDLTLLKALVRQQLPEKYKEIFFDQSKNGYAGYIDGGASQEEFYKFIKPILEKMDGTEELLVKLNREDLLRKQRTFDNGSIPHQIHLGELHAILRRQEDFYPFLKDNREKIEKILTFRIPYYVGPLARGNSRFAWMTRKSEETITPWNFEEVVDKGASAQSFIERMTNFDKNLPNEKVLPKHSLLYEYFTVYNELTKVKYVTEGMRKPAFLSGEQKKAIVDLLFKTNRKVTVKQLKEDYFKKIECFDSVEISGVEDRFNASLGTYHDLLKIIKDKDFLDNEENEDILEDIVLTLTLFEDREMIEERLKTYAHLFDDKVMKQLKRRRYTGWGRLSRKLINGIRDKQSGKTILDFLKSDGFANRNFMQLIHDDSLTFKEDIQKAQVSGQGDSLHEHIANLAGSPAIKKGILQTVKVVDELVKVMGRHKPENIVIEMARENQTTQKGQKNSRERMKRIEEGIKELGSQILKEHPVENTQLQNEKLYLYYLQNGRDMYVDQELDINRLSDYDVDHIVPQSFLKDDSIDNKVLTRSDKARGKSDNVPSEEVVKKMKNYWRQLLNAKLITQRKFDNLTKAERGGLSELDKAGFIKRQLVETRQITKHVAQILDSRMNTKYDENDKLIREVKVITLKSKLVSDFRKDFQFYKVREINNYHHAHDAYLNAVVGTALIKKYPKLESEFVYGDYKVYDVRKMIAKSEQEIGKATAKYFFYSNIMNFFKTEITLANGEIRKRPLIETNGETGEIVWDKGRDFATVRKVLSMPQVNIVKKTEVQTGGFSKESILPKRNSDKLIARKKDWDPKKYGGFDSPTVAYSVLVVAKVEKGKSKKLKSVKELLGITIMERSSFEKNPIDFLEAKGYKEVKKDLIIKLPKYSLFELENGRKRMLASAGELQKGNELALPSKYVNFLYLASHYEKLKGSPEDNEQKQLFVEQHKHYLDEIIEQISEFSKRVILADANLDKVLSAYNKHRDKPIREQAENIIHLFTLTNLGAPAAFKYFDTTIDRKRYTSTKEVLDATLIHQSITGLYETRIDLSQLGGDGGEAAAKEAAAKEAAAKGGVPWILKKPLELTIKLDLEEQQGTLLNNSILSKKGKEELKQLFEKYSALWQSWENQVGHRRIRPHKIATGTVKPTPQKQYHINPKAKPDIQIVINDLLKQGVLIQKESTMNTPVYPVPKPNGRWRMVLDYRAVNKVTPLIAVQNQHSYGILGSLFKGRYKTTIDLSNGFWAHPIVPEDYWITAFTWQGKQYCWTVLPQGFLNSPGLFTGDVVDLLQGIPNVEVYVDDVYISHDSEKEHLEYLDILFNRLKEAGYIISLKKSNIANSIVDFLGFQITNEGRGLTDTFKEKLENITAPTTLKQLQSILGLLNFARNFIPDFTELIAPLYALIPKSTKNYVPWQIEHSTTLETLITKLNGAEYLQGRKGDKTLIMKVNASYTTGYIRYYNEGEKKPISYVSIVFSKTELKFTELEKLLTTVHKGLLKALDLSMGQNIHVYSPIVSMQNIQKTPQTAKKALASRWLSWLSYLEDPRIRFFYDPQMPALKDLPAVDTGKDNKKHPSNFQHIFYTDGSAITSPTKEGHLNAGMGIVYFINKDGNLQKQQEWSISLGNHTAQFAEIAAFEFALKKCLPLGGNILVVTDSNYVAKAYNEELDVWASNGFVNNRKKPLKHISKWKSVADLKRLRPDVVVTHEPGHQKLDSSPHAYGNNLADQLATQASFKVHAGKRTADGSEFEKRTADGSEFESPKKKAKVE

SEQ ID NO: 6388 - protein, 2091 aa, synthetic construct
MPAAKRVKLDGGDKKYSIGLDIGTNSVGWAVITDEYKVPSKKFKVLGNTDRHSIKKNLIGALLFDSGETAEATRLKRTARRRYTRRKNRICYLQEIFSNEMAKVDDSFFHRLEESFLVEEDKKHERHPIFGNIVDEVAYHEKYPTIYHLRKKLVDSTDKADLRLIYLALAHMIKFRGHFLIEGDLNPDNSDVDKLFIQLVQTYNQLFEENPINASGVDAKAILSARLSKSRRLENLIAQLPGEKKNGLFGNLIALSLGLTPNFKSNFDLAEDAKLQLSKDTYDDDLDNLLAQIGDQYADLFLAAKNLSDAILLSDILRVNTEITKAPLSASMIKRYDEHHQDLTLLKALVRQQLPEKYKEIFFDQSKNGYAGYIDGGASQEEFYKFIKPILEKMDGTEELLVKLNREDLLRKQRTFDNGSIPHQIHLGELHAILRRQEDFYPFLKDNREKIEKILTFRIPYYVGPLARGNSRFAWMTRKSEETITPWNFEEVVDKGASAQSFIERMTNFDKNLPNEKVLPKHSLLYEYFTVYNELTKVKYVTEGMRKPAFLSGEQKKAIVDLLFKTNRKVTVKQLKEDYFKKIECFDSVEISGVEDRFNASLGTYHDLLKIIKDKDFLDNEENEDILEDIVLTLTLFEDREMIEERLKTYAHLFDDKVMKQLKRRRYTGWGRLSRKLINGIRDKQSGKTILDFLKSDGFANRNFMQLIHDDSLTFKEDIQKAQVSGQGDSLHEHIANLAGSPAIKKGILQTVKVVDELVKVMGRHKPENIVIEMARENQTTQKGQKNSRERMKRIEEGIKELGSQILKEHPVENTQLQNEKLYLYYLQNGRDMYVDQELDINRLSDYDVDHIVPQSFLKDDSIDNKVLTRSDKARGKSDNVPSEEVVKKMKNYWRQLLNAKLITQRKFDNLTKAERGGLSELDKAGFIKRQLVETRQITKHVAQILDSRMNTKYDENDKLIREVKVITLKSKLVSDFRKDFQFYKVREINNYHHAHDAYLNAVVGTALIKKYPKLESEFVYGDYKVYDVRKMIAKSEQEIGKATAKYFFYSNIMNFFKTEITLANGEIRKRPLIETNGETGEIVWDKGRDFATVRKVLSMPQVNIVKKTEVQTGGFSKESILPKRNSDKLIARKKDWDPKKYGGFDSPTVAYSVLVVAKVEKGKSKKLKSVKELLGITIMERSSFEKNPIDFLEAKGYKEVKKDLIIKLPKYSLFELENGRKRMLASAGELQKGNELALPSKYVNFLYLASHYEKLKGSPEDNEQKQLFVEQHKHYLDEIIEQISEFSKRVILADANLDKVLSAYNKHRDKPIREQAENIIHLFTLTNLGAPAAFKYFDTTIDRKRYTSTKEVLDATLIHQSITGLYETRIDLSQLGGDGGEAAAKEAAAKEAAAKGGVPWLTQQPLQLTILVPLQEYQEKILSKTALPEDQKQQLKTLFVKYDNLWQHWENQVGHRKIRPHNIATGDYPPRPQKQYPINPKAKPSIQIVIDDLLKQGVLTPQNSTMNTPVYPVPKPDGRWRMVLDYREVNKTIPLTAAQNQHSAGILATIVRQKYKTTLDLANGFWAHPITPESYWLTAFTWQGKQYCWTRLPQGFLNSPALFNADVVDLLKEIPNVQVYVDDIYLSHDDPKEHVQQLEKVFQILLQAGYVVSLKKSEIGQKTVEFLGFNITKEGRGLTDTFKTKLLNITPPKDLKQLQSILGLLNFARNFIPNFAELVQPLYNLIAPAKGKYIEWSEENTKQLNMVIEALNTASNLEERLPEQRLVIKVNTSPSAGYVRYYNETGKKPIMYLNYVFSKAELKFSMLEKLLTTMHKALIKAMDLAMGQEILVYSPIVSMTKIQKTPLPERKALPIRWITWMTYLEDPRIQFHYDKTLPELKHIPDVYTSSQSPVKHPSQYEGVFYTDGSAIKSPDPTKSNNAGMGIVHATYKPEYQVLNQWSIPLGNHTAQMAEIAAVEFACKKALKIPGPVLVITDSFYVAESANKELPYWKSNGFVNNKKKPLKHISKWKSIAECLSMKPDITIQHEKGISLQIPVFILKGNALADKLATQGSYVVNAGKRTADGSEFEKRTADGSEFESPKKKAKVE

SEQ ID NO: 6389 - protein, 2091 aa, synthetic construct
MPAAKRVKLDGGDKKYSIGLDIGTNSVGWAVITDEYKVPSKKFKVLGNTDRHSIKKNLIGALLFDSGETAEATRLKRTARRRYTRRKNRICYLQEIFSNEMAKVDDSFFHRLEESFLVEEDKKHERHPIFGNIVDEVAYHEKYPTIYHLRKKLVDSTDKADLRLIYLALAHMIKFRGHFLIEGDLNPDNSDVDKLFIQLVQTYNQLFEENPINASGVDAKAILSARLSKSRRLENLIAQLPGEKKNGLFGNLIALSLGLTPNFKSNFDLAEDAKLQLSKDTYDDDLDNLLAQIGDQYADLFLAAKNLSDAILLSDILRVNTEITKAPLSASMIKRYDEHHQDLTLLKALVRQQLPEKYKEIFFDQSKNGYAGYIDGGASQEEFYKFIKPILEKMDGTEELLVKLNREDLLRKQRTFDNGSIPHQIHLGELHAILRRQEDFYPFLKDNREKIEKILTFRIPYYVGPLARGNSRFAWMTRKSEETITPWNFEEVVDKGASAQSFIERMTNFDKNLPNEKVLPKHSLLYEYFTVYNELTKVKYVTEGMRKPAFLSGEQKKAIVDLLFKTNRKVTVKQLKEDYFKKIECFDSVEISGVEDRFNASLGTYHDLLKIIKDKDFLDNEENEDILEDIVLTLTLFEDREMIEERLKTYAHLFDDKVMKQLKRRRYTGWGRLSRKLINGIRDKQSGKTILDFLKSDGFANRNFMQLIHDDSLTFKEDIQKAQVSGQGDSLHEHIANLAGSPAIKKGILQTVKVVDELVKVMGRHKPENIVIEMARENQTTQKGQKNSRERMKRIEEGIKELGSQILKEHPVENTQLQNEKLYLYYLQNGRDMYVDQELDINRLSDYDVDHIVPQSFLKDDSIDNKVLTRSDKARGKSDNVPSEEVVKKMKNYWRQLLNAKLITQRKFDNLTKAERGGLSELDKAGFIKRQLVETRQITKHVAQILDSRMNTKYDENDKLIREVKVITLKSKLVSDFRKDFQFYKVREINNYHHAHDAYLNAVVGTALIKKYPKLESEFVYGDYKVYDVRKMIAKSEQEIGKATAKYFFYSNIMNFFKTEITLANGEIRKRPLIETNGETGEIVWDKGRDFATVRKVLSMPQVNIVKKTEVQTGGFSKESILPKRNSDKLIARKKDWDPKKYGGFDSPTVAYSVLVVAKVEKGKSKKLKSVKELLGITIMERSSFEKNPIDFLEAKGYKEVKKDLIIKLPKYSLFELENGRKRMLASAGELQKGNELALPSKYVNFLYLASHYEKLKGSPEDNEQKQLFVEQHKHYLDEIIEQISEFSKRVILADANLDKVLSAYNKHRDKPIREQAENIIHLFTLTNLGAPAAFKYFDTTIDRKRYTSTKEVLDATLIHQSITGLYETRIDLSQLGGDGGEAAAKEAAAKEAAAKGGVPWLTQQPLQLTILVPLQEYQEKILSKTALPEDQKQQLKTLFVKYDNLWQHWENQVGHRKIRPHNIATGDYPPRPQKQYPINPKAKPSIQIVIDDLLKQGVLTPQNSTMNTPVYPVPKPDGRWRMVLDYREVNKTIPLTAAQNQHSAGILATIVRQKYKTTLDLANGFWAHPITPESYWLTAFTWQGKQYCWTRLPQGFLNSPALFNADVVDLLKEIPNVQVYVDDIYLSHDDPKEHVQQLEKVFQILLQAGYVVSLKKSEIGQKTVEFLGFNITKEGRGLTDTFKTKLLNITPPKDLKQLQSILGKLNFARNFIPNFAELVQPLYNLIAPAKGKYIEWSEENTKQLNMVIEALNTASNLEERLPEQRLVIKVNTSPSAGYVRYYNETGKKPIMYLNYVFSKAELKFSMLEKLLTTMHKALIKAMDLAMGQEILVYSPIVSMTKIQKTPLPERKALPIRWITWMTYLEDPRIQFHYDKTLPELKHIPDVYTSSQSPVKHPSQYEGVFYTDGSAIKSPDPTKSNNAGMGIVHATYKPEYQVLNQWSIPLGNHTAQMAEIAAVEFACKKALKIPGPVLVITDSFYVAESANKELPYWKSNGFVNNKKKPLKHISKWKSIAECLSMKPDITIQHEKGISLQIPVFILKGNALADKLATQGSYVVNAGKRTADGSEFEKRTADGSEFESPKKKAKVE

SEQ ID NO: 6390 - protein, 2222 aa, synthetic construct
MPAAKRVKLDGGDKKYSIGLDIGTNSVGWAVITDEYKVPSKKFKVLGNTDRHSIKKNLIGALLFDSGETAEATRLKRTARRRYTRRKNRICYLQEIFSNEMAKVDDSFFHRLEESFLVEEDKKHERHPIFGNIVDEVAYHEKYPTIYHLRKKLVDSTDKADLRLIYLALAHMIKFRGHFLIEGDLNPDNSDVDKLFIQLVQTYNQLFEENPINASGVDAKAILSARLSKSRRLENLIAQLPGEKKNGLFGNLIALSLGLTPNFKSNFDLAEDAKLQLSKDTYDDDLDNLLAQIGDQYADLFLAAKNLSDAILLSDILRVNTEITKAPLSASMIKRYDEHHQDLTLLKALVRQQLPEKYKEIFFDQSKNGYAGYIDGGASQEEFYKFIKPILEKMDGTEELLVKLNREDLLRKQRTFDNGSIPHQIHLGELHAILRRQEDFYPFLKDNREKIEKILTFRIPYYVGPLARGNSRFAWMTRKSEETITPWNFEEVVDKGASAQSFIERMTNFDKNLPNEKVLPKHSLLYEYFTVYNELTKVKYVTEGMRKPAFLSGEQKKAIVDLLFKTNRKVTVKQLKEDYFKKIECFDSVEISGVEDRFNASLGTYHDLLKIIKDKDFLDNEENEDILEDIVLTLTLFEDREMIEERLKTYAHLFDDKVMKQLKRRRYTGWGRLSRKLINGIRDKQSGKTILDFLKSDGFANRNFMQLIHDDSLTFKEDIQKAQVSGQGDSLHEHIANLAGSPAIKKGILQTVKVVDELVKVMGRHKPENIVIEMARENQTTQKGQKNSRERMKRIEEGIKELGSQILKEHPVENTQLQNEKLYLYYLQNGRDMYVDQELDINRLSDYDVDHIVPQSFLKDDSIDNKVLTRSDKARGKSDNVPSEEVVKKMKNYWRQLLNAKLITQRKFDNLTKAERGGLSELDKAGFIKRQLVETRQITKHVAQILDSRMNTKYDENDKLIREVKVITLKSKLVSDFRKDFQFYKVREINNYHHAHDAYLNAVVGTALIKKYPKLESEFVYGDYKVYDVRKMIAKSEQEIGKATAKYFFYSNIMNFFKTEITLANGEIRKRPLIETNGETGEIVWDKGRDFATVRKVLSMPQVNIVKKTEVQTGGFSKESILPKRNSDKLIARKKDWDPKKYGGFDSPTVAYSVLVVAKVEKGKSKKLKSVKELLGITIMERSSFEKNPIDFLEAKGYKEVKKDLIIKLPKYSLFELENGRKRMLASAGELQKGNELALPSKYVNFLYLASHYEKLKGSPEDNEQKQLFVEQHKHYLDEIIEQISEFSKRVILADANLDKVLSAYNKHRDKPIREQAENIIHLFTLTNLGAPAAFKYFDTTIDRKRYTSTKEVLDATLIHQSITGLYETRIDLSQLGGDGGEAAAKEAAAKEAAAKGGTLGDQGSRGSDPLPEPRVTLTVEGIPTEFLVNTGAEHSVLTKPMGKMGSKRTVVAGATGSKVYPWTTKRLLKIGQKQVTHSFLVIPECPAPLLGRDLLTKLKAQIQFSTEGPQVTWEDRPAMCLVLNLEEEYRLHEKPVPPSIDPSWLQLFPMVWAEKAGMGLANQVPPVVVELKSDASPVAVRQYPMSKEAREGIRPHIQRFLDLGILVPCQSPWNTPLLPVKKPGTNDYRPVQDLREVNKRVQDIHPTVPNPYNLLSSLPPSHTWYSVLDLKDAFFCLKLHPNSQPLFAFEWRDPEKGNTGQLTWTRLPQGFKNSPTLFDEALHRDLASFRALNPQVVMLQYVDDLLVAAPTYRDCKEGTRRLLQELSKLGYRVSAKKAQLCREEVTYLGYLLKGGKRWLTPARKATVMKIPTPTTPRQVREFLGTAGFCRLWIPGFASLAAPLYPLTREKVPFTWTEAHQEAFGRIKEALLSAPALALPDLTKPFALYVDEKEGVARGVLTQTLGPWRRPVAYLSKKLDPVASGWPTCLKAIAAVALLLKDADKLTLGQNVLVIAPHNLESIVRQPPDRWMTNARMTHYQSLLLNERVSFAPPAILNPATLLPVESDDTPIHICSEILAEETGTRPDLRDQPLPGVPAWYTDGSSFIMDGRRQAGAAIVDNKRTVWASNLPEGTSAQKAELIALTQALRLAEGKSINIYTDSRYAFATAHVHGAIYKQRGLLTSAGKDIKNKEEILALLEAIHLPKRVAIIHCPGHQRGTDPVATGNRKADEAAKQAAQSTRILTETTKNAGKRTADGSEFEKRTADGSEFESPKKKAKVE

SEQ ID NO: 6391 - protein, 2131 aa, synthetic construct
MPAAKRVKLDGGDKKYSIGLDIGTNSVGWAVITDEYKVPSKKFKVLGNTDRHSIKKNLIGALLFDSGETAEATRLKRTARRRYTRRKNRICYLQEIFSNEMAKVDDSFFHRLEESFLVEEDKKHERHPIFGNIVDEVAYHEKYPTIYHLRKKLVDSTDKADLRLIYLALAHMIKFRGHFLIEGDLNPDNSDVDKLFIQLVQTYNQLFEENPINASGVDAKAILSARLSKSRRLENLIAQLPGEKKNGLFGNLIALSLGLTPNFKSNFDLAEDAKLQLSKDTYDDDLDNLLAQIGDQYADLFLAAKNLSDAILLSDILRVNTEITKAPLSASMIKRYDEHHQDLTLLKALVRQQLPEKYKEIFFDQSKNGYAGYIDGGASQEEFYKFIKPILEKMDGTEELLVKLNREDLLRKQRTFDNGSIPHQIHLGELHAILRRQEDFYPFLKDNREKIEKILTFRIPYYVGPLARGNSRFAWMTRKSEETITPWNFEEVVDKGASAQSFIERMTNFDKNLPNEKVLPKHSLLYEYFTVYNELTKVKYVTEGMRKPAFLSGEQKKAIVDLLFKTNRKVTVKQLKEDYFKKIECFDSVEISGVEDRFNASLGTYHDLLKIIKDKDFLDNEENEDILEDIVLTLTLFEDREMIEERLKTYAHLFDDKVMKQLKRRRYTGWGRLSRKLINGIRDKQSGKTILDFLKSDGFANRNFMQLIHDDSLTFKEDIQKAQVSGQGDSLHEHIANLAGSPAIKKGILQTVKVVDELVKVMGRHKPENIVIEMARENQTTQKGQKNSRERMKRIEEGIKELGSQILKEHPVENTQLQNEKLYLYYLQNGRDMYVDQELDINRLSDYDVDHIVPQSFLKDDSIDNKVLTRSDKARGKSDNVPSEEVVKKMKNYWRQLLNAKLITQRKFDNLTKAERGGLSELDKAGFIKRQLVETRQITKHVAQILDSRMNTKYDENDKLIREVKVITLKSKLVSDFRKDFQFYKVREINNYHHAHDAYLNAVVGTALIKKYPKLESEFVYGDYKVYDVRKMIAKSEQEIGKATAKYFFYSNIMNFFKTEITLANGEIRKRPLIETNGETGEIVWDKGRDFATVRKVLSMPQVNIVKKTEVQTGGFSKESILPKRNSDKLIARKKDWDPKKYGGFDSPTVAYSVLVVAKVEKGKSKKLKSVKELLGITIMERSSFEKNPIDFLEAKGYKEVKKDLIIKLPKYSLFELENGRKRMLASAGELQKGNELALPSKYVNFLYLASHYEKLKGSPEDNEQKQLFVEQHKHYLDEIIEQISEFSKRVILADANLDKVLSAYNKHRDKPIREQAENIIHLFTLTNLGAPAAFKYFDTTIDRKRYTSTKEVLDATLIHQSITGLYETRIDLSQLGGDGGEAAAKEAAAKEAAAKGGLLGRDLLTKLKAQIQFSTEGPQVTWEDRPAMCLVLNLEEEYRLHEKPVPPSIDPSWLQLFPMVWAEKAGMGLANQVPPVVVELKSDASPVAVRQYPMSKEAREGIRPHIQRFLDLGILVPCQSPWNTPLLPVKKPGTNDYRPVQDLREVNKRVQDIHPTVPNPYNLLSSLPPSHTWYSVLDLKDAFFCLKLHPNSQPLFAFEWRDPEKGNTGQLTWTRLPQGFKNSPTLFNEALHRDLASFRALNPQVVMLQYVDDLLVAAPTYRDCKEGTRRLLQELSKLGYRVSAKKAQLCREEVTYLGYLLKGGKRWLTPARKATVMKIPTPTTPRQVREFLGKAGFCRLFIPGFASLAAPLYPLTRPKVPFTWTEAHQEAFGRIKEALLSAPALALPDLTKPFALYVDEKEGVARGVLTQTLGPWRRPVAYLSKKLDPVASGWPTCLKAIAAVALLLKDADKLTLGQNVLVIAPHNLESIVRQPPDRWMTNARMTHYQSLLLNERVSFAPPAILNPATLLPVESDDTPIHICSEILAEETGTRPDLRDQPLPGVPAWYTDGSSFIMDGRRQAGAAIVDNKRTVWASNLPEGTSAQKAELIALTQALRLAEGKSINIYTDSRYAFATAHVHGAIYKQRGWLTSAGKDIKNKEEILALLEAIHLPKRVAIIHCPGHQRGTDPVATGNRKADEAAKQAAQSTRILTETTKNAGKRTADGSEFEKRTADGSEFESPKKKAKVE

SEQ ID NO: 6392 - protein, 2222 aa, synthetic construct
MPAAKRVKLDGGDKKYSIGLDIGTNSVGWAVITDEYKVPSKKFKVLGNTDRHSIKKNLIGALLFDSGETAEATRLKRTARRRYTRRKNRICYLQEIFSNEMAKVDDSFFHRLEESFLVEEDKKHERHPIFGNIVDEVAYHEKYPTIYHLRKKLVDSTDKADLRLIYLALAHMIKFRGHFLIEGDLNPDNSDVDKLFIQLVQTYNQLFEENPINASGVDAKAILSARLSKSRRLENLIAQLPGEKKNGLFGNLIALSLGLTPNFKSNFDLAEDAKLQLSKDTYDDDLDNLLAQIGDQYADLFLAAKNLSDAILLSDILRVNTEITKAPLSASMIKRYDEHHQDLTLLKALVRQQLPEKYKEIFFDQSKNGYAGYIDGGASQEEFYKFIKPILEKMDGTEELLVKLNREDLLRKQRTFDNGSIPHQIHLGELHAILRRQEDFYPFLKDNREKIEKILTFRIPYYVGPLARGNSRFAWMTRKSEETITPWNFEEVVDKGASAQSFIERMTNFDKNLPNEKVLPKHSLLYEYFTVYNELTKVKYVTEGMRKPAFLSGEQKKAIVDLLFKTNRKVTVKQLKEDYFKKIECFDSVEISGVEDRFNASLGTYHDLLKIIKDKDFLDNEENEDILEDIVLTLTLFEDREMIEERLKTYAHLFDDKVMKQLKRRRYTGWGRLSRKLINGIRDKQSGKTILDFLKSDGFANRNFMQLIHDDSLTFKEDIQKAQVSGQGDSLHEHIANLAGSPAIKKGILQTVKVVDELVKVMGRHKPENIVIEMARENQTTQKGQKNSRERMKRIEEGIKELGSQILKEHPVENTQLQNEKLYLYYLQNGRDMYVDQELDINRLSDYDVDHIVPQSFLKDDSIDNKVLTRSDKARGKSDNVPSEEVVKKMKNYWRQLLNAKLITQRKFDNLTKAERGGLSELDKAGFIKRQLVETRQITKHVAQILDSRMNTKYDENDKLIREVKVITLKSKLVSDFRKDFQFYKVREINNYHHAHDAYLNAVVGTALIKKYPKLESEFVYGDYKVYDVRKMIAKSEQEIGKATAKYFFYSNIMNFFKTEITLANGEIRKRPLIETNGETGEIVWDKGRDFATVRKVLSMPQVNIVKKTEVQTGGFSKESILPKRNSDKLIARKKDWDPKKYGGFDSPTVAYSVLVVAKVEKGKSKKLKSVKELLGITIMERSSFEKNPIDFLEAKGYKEVKKDLIIKLPKYSLFELENGRKRMLASAGELQKGNELALPSKYVNFLYLASHYEKLKGSPEDNEQKQLFVEQHKHYLDEIIEQISEFSKRVILADANLDKVLSAYNKHRDKPIREQAENIIHLFTLTNLGAPAAFKYFDTTIDRKRYTSTKEVLDATLIHQSITGLYETRIDLSQLGGDGGEAAAKEAAAKEAAAKGGTLGDQGSRGSDPLPEPRVTLTVEGIPTEFLVNTGAEHSVLTKPMGKMGSKRTVVAGATGSKVYPWTTKRLLKIGQKQVTHSFLVIPECPAPLLGRDLLTKLKAQIQFSTEGPQVTWEDRPAMCLVLNLEEEYRLHEKPVPPSIDPSWLQLFPMVWAEKAGMGLANQVPPVVVELKSDASPVAVRQYPMSKEAREGIRPHIQRFLDLGILVPCQSPWNTPLLPVKKPGTNDYRPVQDLREVNKRVQDIHPTVPNPYNLLSSLPPSHTWYSVLDLKDAFFCLKLHPNSQPLFAFEWRDPEKGNTGQLTWTRLPQGFKNSPTLFNEALHRDLASFRALNPQVVMLQYVDDLLVAAPTYRDCKEGTRRLLQELSKLGYRVSAKKAQLCREEVTYLGYLLKGGKRWLTPARKATVMKIPTPTTPRQVREFLGKAGFCRLFIPGFASLAAPLYPLTRPKVPFTWTEAHQEAFGRIKEALLSAPALALPDLTKPFALYVDEKEGVARGVLTQTLGPWRRPVAYLSKKLDPVASGWPTCLKAIAAVALLLKDADKLTLGQNVLVIAPHNLESIVRQPPDRWMTNARMTHYQSLLLNERVSFAPPAILNPATLLPVESDDTPIHICSEILAEETGTRPDLRDQPLPGVPAWYTDGSSFIMDGRRQAGAAIVDNKRTVWASNLPEGTSAQKAELIALTQALRLAEGKSINIYTDSRYAFATAHVHGAIYKQRGWLTSAGKDIKNKEEILALLEAIHLPKRVAIIHCPGHQRGTDPVATGNRKADEAAKQAAQSTRILTETTKNAGKRTADGSEFEKRTADGSEFESPKKKAKVE

SEQ ID NO: 6393 - protein, 2100 aa, synthetic construct
MPAAKRVKLDGGDKKYSIGLDIGTNSVGWAVITDEYKVPSKKFKVLGNTDRHSIKKNLIGALLFDSGETAEATRLKRTARRRYTRRKNRICYLQEIFSNEMAKVDDSFFHRLEESFLVEEDKKHERHPIFGNIVDEVAYHEKYPTIYHLRKKLVDSTDKADLRLIYLALAHMIKFRGHFLIEGDLNPDNSDVDKLFIQLVQTYNQLFEENPINASGVDAKAILSARLSKSRRLENLIAQLPGEKKNGLFGNLIALSLGLTPNFKSNFDLAEDAKLQLSKDTYDDDLDNLLAQIGDQYADLFLAAKNLSDAILLSDILRVNTEITKAPLSASMIKRYDEHHQDLTLLKALVRQQLPEKYKEIFFDQSKNGYAGYIDGGASQEEFYKFIKPILEKMDGTEELLVKLNREDLLRKQRTFDNGSIPHQIHLGELHAILRRQEDFYPFLKDNREKIEKILTFRIPYYVGPLARGNSRFAWMTRKSEETITPWNFEEVVDKGASAQSFIERMTNFDKNLPNEKVLPKHSLLYEYFTVYNELTKVKYVTEGMRKPAFLSGEQKKAIVDLLFKTNRKVTVKQLKEDYFKKIECFDSVEISGVEDRFNASLGTYHDLLKIIKDKDFLDNEENEDILEDIVLTLTLFEDREMIEERLKTYAHLFDDKVMKQLKRRRYTGWGRLSRKLINGIRDKQSGKTILDFLKSDGFANRNFMQLIHDDSLTFKEDIQKAQVSGQGDSLHEHIANLAGSPAIKKGILQTVKVVDELVKVMGRHKPENIVIEMARENQTTQKGQKNSRERMKRIEEGIKELGSQILKEHPVENTQLQNEKLYLYYLQNGRDMYVDQELDINRLSDYDVDHIVPQSFLKDDSIDNKVLTRSDKARGKSDNVPSEEVVKKMKNYWRQLLNAKLITQRKFDNLTKAERGGLSELDKAGFIKRQLVETRQITKHVAQILDSRMNTKYDENDKLIREVKVITLKSKLVSDFRKDFQFYKVREINNYHHAHDAYLNAVVGTALIKKYPKLESEFVYGDYKVYDVRKMIAKSEQEIGKATAKYFFYSNIMNFFKTEITLANGEIRKRPLIETNGETGEIVWDKGRDFATVRKVLSMPQVNIVKKTEVQTGGFSKESILPKRNSDKLIARKKDWDPKKYGGFDSPTVAYSVLVVAKVEKGKSKKLKSVKELLGITIMERSSFEKNPIDFLEAKGYKEVKKDLIIKLPKYSLFELENGRKRMLASAGELQKGNELALPSKYVNFLYLASHYEKLKGSPEDNEQKQLFVEQHKHYLDEIIEQISEFSKRVILADANLDKVLSAYNKHRDKPIREQAENIIHLFTLTNLGAPAAFKYFDTTIDRKRYTSTKEVLDATLIHQSITGLYETRIDLSQLGGDGGEAAAKEAAAKEAAAKGGLGIEDEYRLHETSTEPDVSLGSTWLSDFPQAWAETGGMGLAVRQAPLIIPLKATSTPVSIQQYPMSHEARLGIKPHIQRLLDQGILVPCQSPWNTPLLPVKKPGTNDYRPVQDLREVNKRVEDIHPTVPNPYNLLSGLPPSHQWYTVLDLKDAFFCLRLHPTSQPLFAFEWRDPGMGISGQLTWTRLPQGFKNSPTLFNEALHRDLADFRIQHPDLILLQYVDDILLAATSELDCQQGTRALLQTLGDLGYRASAKKAQICQKQVKYLGYLLREGQRWLTEARKETVMGQPVPKTPRQLREFLGKAGFCRLFIPGFAEMAAPLYPLTKPGTLFSWGPDQQKAYQEIKQALLTAPALGLPDLTKPFELFVDEKQGYAKGVLTQKLGPWRRPVAYLSKKLDPVAAGWPPCLRMVAAIAVLTKDAGKLTMGQPLVILAPHAVEALVKQPPDRWLSNARMTHYQAMLLDTDRVQFGPVVALNPATLLPLPEEGAPHDCLEILAETHGTRPDLTDQPIPDADHTWYTDGSSFLQEGQRKAGAAVTTETEVIWAGALPAGTSAQRAELIALTQALKMAEGKRLNVYTDSRYAFATAHIHGEIYRRRGWLTSEGREIKNKSEILALLKALFLPKRLSIIHCLGHQKGDSAEARGNRLADQAAREAAIKTPPDTSTLLIAGKRTADGSEFEKRTADGSEFESPKKKAKVE

SEQ ID NO: 6394 - protein, 2100 aa, synthetic construct; identical to SEQ ID NO: 6393

SEQ ID NO: 6395 - protein, 2100 aa, synthetic construct
MPAAKRVKLDGGDKKYSIGLDIGTNSVGWAVITDEYKVPSKKFKVLGNTDRHSIKKNLIGALLFDSGETAEATRLKRTARRRYTRRKNRICYLQEIFSNEMAKVDDSFFHRLEESFLVEEDKKHERHPIFGNIVDEVAYHEKYPTIYHLRKKLVDSTDKADLRLIYLALAHMIKFRGHFLIEGDLNPDNSDVDKLFIQLVQTYNQLFEENPINASGVDAKAILSARLSKSRRLENLIAQLPGEKKNGLFGNLIALSLGLTPNFKSNFDLAEDAKLQLSKDTYDDDLDNLLAQIGDQYADLFLAAKNLSDAILLSDILRVNTEITKAPLSASMIKRYDEHHQDLTLLKALVRQQLPEKYKEIFFDQSKNGYAGYIDGGASQEEFYKFIKPILEKMDGTEELLVKLNREDLLRKQRTFDNGSIPHQIHLGELHAILRRQEDFYPFLKDNREKIEKILTFRIPYYVGPLARGNSRFAWMTRKSEETITPWNFEEVVDKGASAQSFIERMTNFDKNLPNEKVLPKHSLLYEYFTVYNELTKVKYVTEGMRKPAFLSGEQKKAIVDLLFKTNRKVTVKQLKEDYFKKIECFDSVEISGVEDRFNASLGTYHDLLKIIKDKDFLDNEENEDILEDIVLTLTLFEDREMIEERLKTYAHLFDDKVMKQLKRRRYTGWGRLSRKLINGIRDKQSGKTILDFLKSDGFANRNFMQLIHDDSLTFKEDIQKAQVSGQGDSLHEHIANLAGSPAIKKGILQTVKVVDELVKVMGRHKPENIVIEMARENQTTQKGQKNSRERMKRIEEGIKELGSQILKEHPVENTQLQNEKLYLYYLQNGRDMYVDQELDINRLSDYDVDHIVPQSFLKDDSIDNKVLTRSDKARGKSDNVPSEEVVKKMKNYWRQLLNAKLITQRKFDNLTKAERGGLSELDKAGFIKRQLVETRQITKHVAQILDSRMNTKYDENDKLIREVKVITLKSKLVSDFRKDFQFYKVREINNYHHAHDAYLNAVVGTALIKKYPKLESEFVYGDYKVYDVRKMIAKSEQEIGKATAKYFFYSNIMNFFKTEITLANGEIRKRPLIETNGETGEIVWDKGRDFATVRKVLSMPQVNIVKKTEVQTGGFSKESILPKRNSDKLIARKKDWDPKKYGGFDSPTVAYSVLVVAKVEKGKSKKLKSVKELLGITIMERSSFEKNPIDFLEAKGYKEVKKDLIIKLPKYSLFELENGRKRMLASAGELQKGNELALPSKYVNFLYLASHYEKLKGSPEDNEQKQLFVEQHKHYLDEIIEQISEFSKRVILADANLDKVLSAYNKHRDKPIREQAENIIHLFTLTNLGAPAAFKYFDTTIDRKRYTSTKEVLDATLIHQSITGLYETRIDLSQLGGDGGEAAAKEAAAKEAAAKGGTLNIEDEYRLHETSKGPDVPLGSTWLSDFPQAWAETGGMGLAVRQAPLIIPLKATSTPVSIKQYPMSQEARLGIKPHIQRLLDQGILVPCQSPWNTPLLPVKKPGTNDYRPVQDLREVNKRVEDIHPTVPNPYNLLSGLPPSHQWYTVLDLKDAFFCLRLHPTSQSLFAFEWRDPEMGISGQLTWTRLPQGFKNSPTLFNEALHRDLADFRIQHPDLILLQYVDDLLLAATSELDCQQGTRALLQTLGDLGYRASAKKAQICQKQVKYLGYLLKEGQRWLTEARKETVMGQPTPKTPRQLREFLGTAGFCRLWIPGFAEMAAPLYPLTKPGTLFEWGPDQQKAYQEIKQALLTAPALGLPDLTKPFELFVDEKQGYAKGVLTQKLGPWRRPVAYLSKKLDPVAAGWPPCLRMVAAIAVLTKDAGKLTMGQPLVILAPHAVEALVKQPPDRWLSNARMTHYQALLLDTDRVQFGPIVALNPATLLPLPEEGLQHDCLDILAEAHGTRPDLTDQPLPDADHTWYTDGSSFLQEGQRKAGAAVTTETEVVWAKALPAGTSAQRAELIALTQALKMAEGKKLNVYTDSRYAFATAHIHGEIYRRRGWLTSEGKEIKNKDEILALLKALFLPKRLSIIHCPGHQKGNRAEARGNRMADQAAREVATRETPETSTLLAGKRTADGSEFEKRTADGSEFESPKKKAKVE

SEQ ID NO: 6396 - protein, 2100 aa, synthetic construct
MPAAKRVKLDGGDKKYSIGLDIGTNSVGWAVITDEYKVPSKKFKVLGNTDRHSIKKNLIGALLFDSGETAEATRLKRTARRRYTRRKNRICYLQEIFSNEMAKVDDSFFHRLEESFLVEEDKKHERHPIFGNIVDEVAYHEKYPTIYHLRKKLVDSTDKADLRLIYLALAHMIKFRGHFLIEGDLNPDNSDVDKLFIQLVQTYNQLFEENPINASGVDAKAILSARLSKSRRLENLIAQLPGEKKNGLFGNLIALSLGLTPNFKSNFDLAEDAKLQLSKDTYDDDLDNLLAQIGDQYADLFLAAKNLSDAILLSDILRVNTEITKAPLSASMIKRYDEHHQDLTLLKALVRQQLPEKYKEIFFDQSKNGYAGYIDGGASQEEFYKFIKPILEKMDGTEELLVKLNREDLLRKQRTFDNGSIPHQIHLGELHAILRRQEDFYPFLKDNREKIEKILTFRIPYYVGPLARGNSRFAWMTRKSEETITPWNFEEVVDKGASAQSFIERMTNFDKNLPNEKVLPKHSLLYEYFTVYNELTKVKYVTEGMRKPAFLSGEQKKAIVDLLFKTNRKVTVKQLKEDYFKKIECFDSVEISGVEDRFNASLGTYHDLLKIIKDKDFLDNEENEDILEDIVLTLTLFEDREMIEERLKTYAHLFDDKVMKQLKRRRYTGWGRLSRKLINGIRDKQSGKTILDFLKSDGFANRNFMQLIHDDSLTFKEDIQKAQVSGQGDSLHEHIANLAGSPAIKKGILQTVKVVDELVKVMGRHKPENIVIEMARENQTTQKGQKNSRERMKRIEEGIKELGSQILKEHPVENTQLQNEKLYLYYLQNGRDMYVDQELDINRLSDYDVDHIVPQSFLKDDSIDNKVLTRSDKARGKSDNVPSEEVVKKMKNYWRQLLNAKLITQRKFDNLTKAERGGLSELDKAGFIKRQLVETRQITKHVAQILDSRMNTKYDENDKLIREVKVITLKSKLVSDFRKDFQFYKVREINNYHHAHDAYLNAVVGTALIKKYPKLESEFVYGDYKVYDVRKMIAKSEQEIGKATAKYFFYSNIMNFFKTEITLANGEIRKRPLIETNGETGEIVWDKGRDFATVRKVLSMPQVNIVKKTEVQTGGFSKESILPKRNSDKLIARKKDWDPKKYGGFDSPTVAYSVLVVAKVEKGKSKKLKSVKELLGITIMERSSFEKNPIDFLEAKGYKEVKKDLIIKLPKYSLFELENGRKRMLASAGELQKGNELALPSKYVNFLYLASHYEKLKGSPEDNEQKQLFVEQHKHYLDEIIEQISEFSKRVILADANLDKVLSAYNKHRDKPIREQAENIIHLFTLTNLGAPAAFKYFDTTIDRKRYTSTKEVLDATLIHQSITGLYETRIDLSQLGGDGGEAAAKEAAAKEAAAKGGTLNIEDEYRLHEISTEPDVSPGSTWLSDFPQAWAETGGMGLAVRQAPLIIPLKATSTPVSIKQYPMSQEAKLGIKPHIQRLLDQGILVPCQSPWNTPLLPVKKPGTNDYRPVQGLREVNKRVEDIHPTVPNPYNLLSGLPTSHRWYTVLDLKDAFFCLRLHPTSQPLFASEWRDPGMGISGQLTWTRLPQGFKNSPTLFDEALHRGLADFRIQHPDLILLQYVDDLLLAATSELDCQQGTRALLKTLGNLGYRASAKKAQICQKQVKYLGYLLREGQRWLTEARKETVMGQPTPKTPRQLREFLGTAGFCRLWIPRFAEMAAPLYPLTKTGTLFNWGPDQQKAYHEIKQALLTAPALGLPDLTKPFELFVDEKQGYAKGVLTQKLGPWRRPVAYLSKKLDPVAAGWPPCLRMVAAIAVLTKDAGKLTMGQPLVILAPHAVEALVKQPPDRWLSNARMTHYQAMLLDTDRVQFGPVVALNPATLLPLPEEGAPHDCLEILAETHGTEPDLTDQPIPDADHTWYTDGSSFLQEGQRKAGAAVTTETEVIWARALPAGTSAQRAELIALTQALKMAEGKRLNVYTDSRYAFATAHIHGEIYKRRGLLTSEGREIKNKSEILALLKALFLPKRLSIIHCLGHQKGDSAEARGNRLADQAAREAAIKTPPDTSTLLAGKRTADGSEFEKRTADGSEFESPKKKAKVE

SEQ ID NO: 6397 - protein, 2120 aa, synthetic construct
MPAAKRVKLDGGDKKYSIGLDIGTNSVGWAVITDEYKVPSKKFKVLGNTDRHSIKKNLIGALLFDSGETAEATRLKRTARRRYTRRKNRICYLQEIFSNEMAKVDDSFFHRLEESFLVEEDKKHERHPIFGNIVDEVAYHEKYPTIYHLRKKLVDSTDKADLRLIYLALAHMIKFRGHFLIEGDLNPDNSDVDKLFIQLVQTYNQLFEENPINASGVDAKAILSARLSKSRRLENLIAQLPGEKKNGLFGNLIALSLGLTPNFKSNFDLAEDAKLQLSKDTYDDDLDNLLAQIGDQYADLFLAAKNLSDAILLSDILRVNTEITKAPLSASMIKRYDEHHQDLTLLKALVRQQLPEKYKEIFFDQSKNGYAGYIDGGASQEEFYKFIKPILEKMDGTEELLVKLNREDLLRKQRTFDNGSIPHQIHLGELHAILRRQEDFYPFLKDNREKIEKILTFRIPYYVGPLARGNSRFAWMTRKSEETITPWNFEEVVDKGASAQSFIERMTNFDKNLPNEKVLPKHSLLYEYFTVYNELTKVKYVTEGMRKPAFLSGEQKKAIVDLLFKTNRKVTVKQLKEDYFKKIECFDSVEISGVEDRFNASLGTYHDLLKIIKDKDFLDNEENEDILEDIVLTLTLFEDREMIEERLKTYAHLFDDKVMKQLKRRRYTGWGRLSRKLINGIRDKQSGKTILDFLKSDGFANRNFMQLIHDDSLTFKEDIQKAQVSGQGDSLHEHIANLAGSPAIKKGILQTVKVVDELVKVMGRHKPENIVIEMARENQTTQKGQKNSRERMKRIEEGIKELGSQILKEHPVENTQLQNEKLYLYYLQNGRDMYVDQELDINRLSDYDVDHIVPQSFLKDDSIDNKVLTRSDKARGKSDNVPSEEVVKKMKNYWRQLLNAKLITQRKFDNLTKAERGGLSELDKAGFIKRQLVETRQITKHVAQILDSRMNTKYDENDKLIREVKVITLKSKLVSDFRKDFQFYKVREINNYHHAHDAYLNAVVGTALIKKYPKLESEFVYGDYKVYDVRKMIAKSEQEIGKATAKYFFYSNIMNFFKTEITLANGEIRKRPLIETNGETGEIVWDKGRDFATVRKVLSMPQVNIVKKTEVQTGGFSKESILPKRNSDKLIARKKDWDPKKYGGFDSPTVAYSVLVVAKVEKGKSKKLKSVKELLGITIMERSSFEKNPIDFLEAKGYKEVKKDLIIKLPKYSLFELENGRKRMLASAGELQKGNELALPSKYVNFLYLASHYEKLKGSPEDNEQKQLFVEQHKHYLDEIIEQISEFSKRVILADANLDKVLSAYNKHRDKPIREQAENIIHLFTLTNLGAPAAFKYFDTTIDRKRYTSTKEVLDATLIHQSITGLYETRIDLSQLGGDGGEAAAKEAAAKEAAAKGGVQEISDSRPMLHIYLNGRRFLGLLDTGADKTCIAGRDWPANWPIHQTESSLQGLGMACGVARSSQPLRWQHEDKSGIIHPFVIPTLPFTLWGRDIMKDIKVRLMTDSPDDSQDLMIGAIESNLFADQISWKSDQPVWLNQWPLKQEKLQALQQLVTEQLQLGHLEESNSPWNTPVFVIKKKSGKWRLLQDLRAVNATMHDMGALQPGLPSPVAVPKGWEIIIIDLQDCFFNIKLHPEDCKRFAFSVPSPNFKRPYQRFQWKVLPQGMKNSPTLCQKFVDKAILTVRDKYQDSYIVHYMDDILLAHPSRSIVDEILTSMIQALNKHGLVVSTEKIQKYDNLKYLGTHIQGDSVSYQKLQIRTDKLRTLNDFQKLLGNINWIRPFLKLTTGELKPLFEILNGDSNPISTRKLTPEACKALQLMNERLSTARVKRLDLSQPWSLCILKTEYTPTACLWQDGVVEWIHLPHISPKVITPYDIFCTQLIIKGRHRSKELFSKDPDYIVVPYTKVQFDLLLQEKEDWPISLLGFLGEVHFHLPKDPLLTFTLQTAIIFPHMTSTTPLEKGIVIFTDGSANGRSVTYIQGREPIIKENTQNTAQQAEIVAVITAFEEVSQPFNLYTDSKYVTGLFPEIETATLSPRTKIYTELKHLQRLIHKRQEKFYIGHIRGHTGLPGPLAQGNAYADSLTRILTAAGKRTADGSEFEKRTADGSEFESPKKKAKVE

SEQ ID NO: 6398 - protein, 2091 aa, synthetic construct
MPAAKRVKLDGGDKKYSIGLDIGTNSVGWAVITDEYKVPSKKFKVLGNTDRHSIKKNLIGALLFDSGETAEATRLKRTARRRYTRRKNRICYLQEIFSNEMAKVDDSFFHRLEESFLVEEDKKHERHPIFGNIVDEVAYHEKYPTIYHLRKKLVDSTDKADLRLIYLALAHMIKFRGHFLIEGDLNPDNSDVDKLFIQLVQTYNQLFEENPINASGVDAKAILSARLSKSRRLENLIAQLPGEKKNGLFGNLIALSLGLTPNFKSNFDLAEDAKLQLSKDTYDDDLDNLLAQIGDQYADLFLAAKNLSDAILLSDILRVNTEITKAPLSASMIKRYDEHHQDLTLLKALVRQQLPEKYKEIFFDQSKNGYAGYIDGGASQEEFYKFIKPILEKMDGTEELLVKLNREDLLRKQRTFDNGSIPHQIHLGELHAILRRQEDFYPFLKDNREKIEKILTFRIPYYVGPLARGNSRFAWMTRKSEETITPWNFEEVVDKGASAQSFIERMTNFDKNLPNEKVLPKHSLLYEYFTVYNELTKVKYVTEGMRKPAFLSGEQKKAIVDLLFKTNRKVTVKQLKEDYFKKIECFDSVEISGVEDRFNASLGTYHDLLKIIKDKDFLDNEENEDILEDIVLTLTLFEDREMIEERLKTYAHLFDDKVMKQLKRRRYTGWGRLSRKLINGIRDKQSGKTILDFLKSDGFANRNFMQLIHDDSLTFKEDIQKAQVSGQGDSLHEHIANLAGSPAIKKGILQTVKVVDELVKVMGRHKPENIVIEMARENQTTQKGQKNSRERMKRIEEGIKELGSQILKEHPVENTQLQNEKLYLYYLQNGRDMYVDQELDINRLSDYDVDHIVPQSFLKDDSIDNKVLTRSDKARGKSDNVPSEEVVKKMKNYWRQLLNAKLITQRKFDNLTKAERGGLSELDKAGFIKRQLVETRQITKHVAQILDSRMNTKYDENDKLIREVKVITLKSKLVSDFRKDFQFYKVREINNYHHAHDAYLNAVVGTALIKKYPKLESEFVYGDYKVYDVRKMIAKSEQEIGKATAKYFFYSNIMNFFKTEITLANGEIRKRPLIETNGETGEIVWDKGRDFATVRKVLSMPQVNIVKKTEVQTGGFSKESILPKRNSDKLIARKKDWDPKKYGGFDSPTVAYSVLVVAKVEKGKSKKLKSVKELLGITIMERSSFEKNPIDFLEAKGYKEVKKDLIIKLPKYSLFELENGRKRMLASAGELQKGNELALPSKYVNFLYLASHYEKLKGSPEDNEQKQLFVEQHKHYLDEIIEQISEFSKRVILADANLDKVLSAYNKHRDKPIREQAENIIHLFTLTNLGAPAAFKYFDTTIDRKRYTSTKEVLDATLIHQSITGLYETRIDLSQLGGDGGEAAAKEAAAKEAAAKGGIPWLMKKPLQLTTLVPLQEYEERLLKQTMLTGSYKEKLQSLFLKYDALWQHWENQVGHRRIKPHHIATGTVNPRPQKQYPINPKAKASIQTVINDLLKQGVLIQQNSIMNTPVYPVPKPDGKWRMVLDYREVNKTIPLIAAQNQHSAGILSSIFRGKYKTTLDLSNGFWAHSITPESYWLTAFTWLGQQYCWTRLPQGFLNSPALFNADVVDLLKEVPNVQVYVDDIYISHDDPREHLEQLEKVFSLLLNAGYVVSLKKSEIAQHEVEFLGFNITKEGRGLTETFKQKLLNITPPRDLKQLQSILGKLNFARNFIPNFSELVKPLYNIIATAPGKYITWTTDNSQQLQNIISMLNSAENLEERNPEVRLIMKVNTSPSAGYIRFYNEFAKRPIMYLNYVYTKAEVKFTNTEKLLTTIHKGLIKALDLGMGQEILVYSPIVSMTKIQKTPLPERKALPIRWITWMSYLEDPRIQFHYDKTLPELQQVPTVTDDIIAKIKHPSEFSMVFYTDGSAIKHPNVNKSHNAGMGIAQVQFKPEFTVINTWSIPLGDHTAQLAEVAAVEFACKKALKIDGPVLIVTDSFYVAESVNKELPYWQSNGFFNNKKKPLKHVSKWKSIADCIQLKPDIIIIHEKGHQPTASTFHTEGNNLADKLATQGSYVVNAGKRTADGSEFEKRTADGSEFESPKKKAKVE

SEQ ID NO: 6399 - protein, 2180 aa, synthetic construct
MPAAKRVKLDGGDKKYSIGLDIGTNSVGWAVITDEYKVPSKKFKVLGNTDRHSIKKNLIGALLFDSGETAEATRLKRTARRRYTRRKNRICYLQEIFSNEMAKVDDSFFHRLEESFLVEEDKKHERHPIFGNIVDEVAYHEKYPTIYHLRKKLVDSTDKADLRLIYLALAHMIKFRGHFLIEGDLNPDNSDVDKLFIQLVQTYNQLFEENPINASGVDAKAILSARLSKSRRLENLIAQLPGEKKNGLFGNLIALSLGLTPNFKSNFDLAEDAKLQLSKDTYDDDLDNLLAQIGDQYADLFLAAKNLSDAILLSDILRVNTEITKAPLSASMIKRYDEHHQDLTLLKALVRQQLPEKYKEIFFDQSKNGYAGYIDGGASQEEFYKFIKPILEKMDGTEELLVKLNREDLLRKQRTFDNGSIPHQIHLGELHAILRRQEDFYPFLKDNREKIEKILTFRIPYYVGPLARGNSRFAWMTRKSEETITPWNFEEVVDKGASAQSFIERMTNFDKNLPNEKVLPKHSLLYEYFTVYNELTKVKYVTEGMRKPAFLSGEQKKAIVDLLFKTNRKVTVKQLKEDYFKKIECFDSVEISGVEDRFNASLGTYHDLLKIIKDKDFLDNEENEDILEDIVLTLTLFEDREMIEERLKTYAHLFDDKVMKQLKRRRYTGWGRLSRKLINGIRDKQSGKTILDFLKSDGFANRNFMQLIHDDSLTFKEDIQKAQVSGQGDSLHEHIANLAGSPAIKKGILQTVKVVDELVKVMGRHKPENIVIEMARENQTTQKGQKNSRERMKRIEEGIKELGSQILKEHPVENTQLQNEKLYLYYLQNGRDMYVDQELDINRLSDYDVDHIVPQSFLKDDSIDNKVLTRSDKARGKSDNVPSEEVVKKMKNYWRQLLNAKLITQRKFDNLTKAERGGLSELDKAGFIKRQLVETRQITKHVAQILDSRMNTKYDENDKLIREVKVITLKSKLVSDFRKDFQFYKVREINNYHHAHDAYLNAVVGTALIKKYPKLESEFVYGDYKVYDVRKMIAKSEQEIGKATAKYFFYSNIMNFFKTEITLANGEIRKRPLIETNGETGEIVWDKGRDFATVRKVLSMPQVNIVKKTEVQTGGFSKESILPKRNSDKLIARKKDWDPKKYGGFDSPTVAYSVLVVAKVEKGKSKKLKSVKELLGITIMERSSFEKNPIDFLEAKGYKEVKKDLIIKLPKYSLFELENGRKRMLASAGELQKGNELALPSKYVNFLYLASHYEKLKGSPEDNEQKQLFVEQHKHYLDEIIEQISEFSKRVILADANLDKVLSAYNKHRDKPIREQAENIIHLFTLTNLGAPAAFKYFDTTIDRKRYTSTKEVLDATLIHQSITGLYETRIDLSQLGGDGGEAAAKEAAAKEAAAKGGMDPLQLLQPLEAEIKGTKLKAHWNSGATITCVPQAFLEEEVPIKNIWIKTIHGEKEQPVYYLTFKIQGRKVEAEVISSPYDYILVSPSDIPWLMKKPLQLTTLVPLQEYEERLLKQTMLTGSYKEKLQSLFLKYDALWQHWENQVGHRRIKPHHIATGTVNPRPQKQYPINPKAKASIQTVINDLLKQGVLIQQNSIMNTPVYPVPKPDGKWRMVLDYREVNKTIPLIAAQNQHSAGILSSIFRGKYKTTLDLSNGFWAHSITPESYWLTAFTWLGQQYCWTRLPQGFLNSPALFNADVVDLLKEVPNVQVYVDDIYISHDDPREHLEQLEKVFSLLLNAGYVVSLKKSEIAQHEVEFLGFNITKEGRGLTETFKQKLLNITPPRDLKQLQSILGKLNFARNFIPNFSELVKPLYNIIATAPGKYITWTTDNSQQLQNIISMLNSAENLEERNPEVRLIMKVNTSPSAGYIRFYNEFAKRPIMYLNYVYTKAEVKFTNTEKLLTTIHKGLIKALDLGMGQEILVYSPIVSMTKIQKTPLPERKALPIRWITWMSYLEDPRIQFHYDKTLPELQQVPTVTDDIIAKIKHPSEFSMVFYTDGSAIKHPNVNKSHNAGMGIAQVQFKPEFTVINTWSIPLGDHTAQLAEVAAVEFACKKALKIDGPVLIVTDSFYVAESVNKELPYWQSNGFFNNKKKPLKHVSKWKSIADCIQLKPDIIIIHEKGHQPTASTFHTEGNNLADKLATQGSYVVNAGKRTADGSEFEKRTADGSEFESPKKKAKVE

SEQ ID NO: 6400 - protein, 2180 aa, synthetic construct
MPAAKRVKLDGGDKKYSIGLDIGTNSVGWAVITDEYKVPSKKFKVLGNTDRHSIKKNLIGALLFDSGETAEATRLKRTARRRYTRRKNRICYLQEIFSNEMAKVDDSFFHRLEESFLVEEDKKHERHPIFGNIVDEVAYHEKYPTIYHLRKKLVDSTDKADLRLIYLALAHMIKFRGHFLIEGDLNPDNSDVDKLFIQLVQTYNQLFEENPINASGVDAKAILSARLSKSRRLENLIAQLPGEKKNGLFGNLIALSLGLTPNFKSNFDLAEDAKLQLSKDTYDDDLDNLLAQIGDQYADLFLAAKNLSDAILLSDILRVNTEITKAPLSASMIKRYDEHHQDLTLLKALVRQQLPEKYKEIFFDQSKNGYAGYIDGGASQEEFYKFIKPILEKMDGTEELLVKLNREDLLRKQRTFDNGSIPHQIHLGELHAILRRQEDFYPFLKDNREKIEKILTFRIPYYVGPLARGNSRFAWMTRKSEETITPWNFEEVVDKGASAQSFIERMTNFDKNLPNEKVLPKHSLLYEYFTVYNELTKVKYVTEGMRKPAFLSGEQKKAIVDLLFKTNRKVTVKQLKEDYFKKIECFDSVEISGVEDRFNASLGTYHDLLKIIKDKDFLDNEENEDILEDIVLTLTLFEDREMIEERLKTYAHLFDDKVMKQLKRRRYTGWGRLSRKLINGIRDKQSGKTILDFLKSDGFANRNFMQLIHDDSLTFKEDIQKAQVSGQGDSLHEHIANLAGSPAIKKGILQTVKVVDELVKVMGRHKPENIVIEMARENQTTQKGQKNSRERMKRIEEGIKELGSQILKEHPVENTQLQNEKLYLYYLQNGRDMYVDQELDINRLSDYDVDHIVPQSFLKDDSIDNKVLTRSDKARGKSDNVPSEEVVKKMKNYWRQLLNAKLITQRKFDNLTKAERGGLSELDKAGFIKRQLVETRQITKHVAQILDSRMNTKYDENDKLIREVKVITLKSKLVSDFRKDFQFYKVREINNYHHAHDAYLNAVVGTALIKKYPKLESEFVYGDYKVYDVRKMIAKSEQEIGKATAKYFFYSNIMNFFKTEITLANGEIRKRPLIETNGETGEIVWDKGRDFATVRKVLSMPQVNIVKKTEVQTGGFSKESILPKRNSDKLIARKKDWDPKKYGGFDSPTVAYSVLVVAKVEKGKSKKLKSVKELLGITIMERSSFEKNPIDFLEAKGYKEVKKDLIIKLPKYSLFELENGRKRMLASAGELQKGNELALPSKYVNFLYLASHYEKLKGSPEDNEQKQLFVEQHKHYLDEIIEQISEFSKRVILADANLDKVLSAYNKHRDKPIREQAENIIHLFTLTNLGAPAAFKYFDTTIDRKRYTSTKEVLDATLIHQSITGLYETRIDLSQLGGDGGEAAAKEAAAKEAAAKGGMNPLQLLQPLPAEVKGTKLLAHWNSGATITCIPESFLEDEQPIKQTLIKTIHGEKQQNVYYLTFKVKGRKVEAEVIASPYEYILLSPTDVPWLTQQPLQLTILVPLQEYQDRILNKTALPEEQKQQLKALFTKYDNLWQHWENQVGHRKIRPHNIATGDYPPRPQKQYPINPKAKPSIQIVIDDLLKQGVLTPQNSTMNTPVYPVPKPDGRWRMVLDYREVNKTIPLTAAQNQHSAGILATIVRQKYKTTLDLANGFWAHPITPDSYWLTAFTWQGKQYCWTRLPQGFLNSPALFTADAVDLLKEVPNVQVYVDDIYLSHDNPHEHIQQLEKVFQILLQAGYVVSLKKSEIGQRTVEFLGFNITKEGRGLTDTFKTKLLNVTPPKDLKQLQSILGLLNFARNFIPNFAELVQTLYNLIASSKGKYIEWTEDNTKQLNKVIEALNTASNLEERLPDQRLVIKVNTSPSAGYVRYYNESGKKPIMYLNYVFSKAELKFSMLEKLLTTMHKALIKAMDLAMGQEILVYSPIVSMTKIQKTPLPERKALPIRWITWMTYLEDPRIQFHYDKTLPELKHIPDVYTSSIPPLKHPSQYEGVFCTDGSAIKSPDPTKSNNAGMGIVHAIYNPEYKILNQWSIPLGHHTAQMAEIAAVEFACKKALKVPGPVLVITDSFYVAESANKELPYWKSNGFVNNKKEPLKHISKWKSIAECLSIKPDITIQHEKGHQPINTSIHTEGNALADKLATQGSYVVNAGKRTADGSEFEKRTADGSEFESPKKKAKVE

SEQ ID NO: 6401 - protein, 2098 aa, synthetic construct
MPAAKRVKLDGGDKKYSIGLDIGTNSVGWAVITDEYKVPSKKFKVLGNTDRHSIKKNLIGALLFDSGETAEATRLKRTARRRYTRRKNRICYLQEIFSNEMAKVDDSFFHRLEESFLVEEDKKHERHPIFGNIVDEVAYHEKYPTIYHLRKKLVDSTDKADLRLIYLALAHMIKFRGHFLIEGDLNPDNSDVDKLFIQLVQTYNQLFEENPINASGVDAKAILSARLSKSRRLENLIAQLPGEKKNGLFGNLIALSLGLTPNFKSNFDLAEDAKLQLSKDTYDDDLDNLLAQIGDQYADLFLAAKNLSDAILLSDILRVNTEITKAPLSASMIKRYDEHHQDLTLLKALVRQQLPEKYKEIFFDQSKNGYAGYIDGGASQEEFYKFIKPILEKMDGTEELLVKLNREDLLRKQRTFDNGSIPHQIHLGELHAILRRQEDFYPFLKDNREKIEKILTFRIPYYVGPLARGNSRFAWMTRKSEETITPWNFEEVVDKGASAQSFIERMTNFDKNLPNEKVLPKHSLLYEYFTVYNELTKVKYVTEGMRKPAFLSGEQKKAIVDLLFKTNRKVTVKQLKEDYFKKIECFDSVEISGVEDRFNASLGTYHDLLKIIKDKDFLDNEENEDILEDIVLTLTLFEDREMIEERLKTYAHLFDDKVMKQLKRRRYTGWGRLSRKLINGIRDKQSGKTILDFLKSDGFANRNFMQLIHDDSLTFKEDIQKAQVSGQGDSLHEHIANLAGSPAIKKGILQTVKVVDELVKVMGRHKPENIVIEMARENQTTQKGQKNSRERMKRIEEGIKELGSQILKEHPVENTQLQNEKLYLYYLQNGRDMYVDQELDINRLSDYDVDHIVPQSFLKDDSIDNKVLTRSDKARGKSDNVPSEEVVKKMKNYWRQLLNAKLITQRKFDNLTKAERGGLSELDKAGFIKRQLVETRQITKHVAQILDSRMNTKYDENDKLIREVKVITLKSKLVSDFRKDFQFYKVREINNYHHAHDAYLNAVVGTALIKKYPKLESEFVYGDYKVYDVRKMIAKSEQEIGKATAKYFFYSNIMNFFKTEITLANGEIRKRPLIETNGETGEIVWDKGRDFATVRKVLSMPQVNIVKKTEVQTGGFSKESILPKRNSDKLIARKKDWDPKKYGGFDSPTVAYSVLVVAKVEKGKSKKLKSVKELLGITIMERSSFEKNPIDFLEAKGYKEVKKDLIIKLPKYSLFELENGRKRMLASAGELQKGNELALPSKYVNFLYLASHYEKLKGSPEDNEQKQLFVEQHKHYLDEIIEQISEFSKRVILADANLDKVLSAYNKHRDKPIREQAENIIHLFTLTNLGAPAAFKYFDTTIDRKRYTSTKEVLDATLIHQSITGLYETRIDLSQLGGDGGEAAAKEAAAKEAAAKGGVLNLEEEYRLHEKPVPSSIDPSWLQLFPTVWAERAGMGLANQVPPVVVELRSGASPVAVRQYPMSKEAREGIRPHIQRFLDLGVLVPCQSPWNTPLLPVKKPGTNDYRPVQDLREINKRVQDIHPTVPNPYNLLSSLPPSHTWYSVLDLKDAFFCLKLHPNSQPLFAFEWRDPEKGNTGQLTWTRLPQGFKNSPTLFNEALHRDLAPFRALNPQVVLLQYVDDLLVAAPTYRDCKEGTQKLLQELSKLGYRVSAKKAQLCQKEVTYLGYLLKEGKRWLTPARKATVMKIPPPTTPRQVREFLGTAGFCRLWIPGFASLAAPLYPLTKPSIPFIWTEEHQKAFDRIKEALLSAPALALPDLTKPFTLYVDERAGVARGVLTQTLGPWRRPVAYLSKKLDPVASGWPTCLKAVAAVALLLKDADKLTLGQNVTVIASHSLESIVRQPPDRWMTNARMTHYQSLLLNERVSFAPPAVLNPATLLPVESEATPVHRCSEILAEETGTRRDLKDQPLPGVPAWYTDGSSFIAEGKRRAGAAIVDGKRTVWASSLPEGTSAQKAELVALTQALRLAEGKDINIYTDSRYAFATAHIHGAIYKQRGWLTSAGKDIKNKEEILALLEAIHLPKRVAIIHCPGHQKGNDPVATGNRRADEAAKQAALSTRVLAETTKPAGKRTADGSEFEKRTADGSEFESPKKKAKVE

SEQ ID NO: 6402 - protein, 2100 aa, synthetic construct; identical to SEQ ID NO: 4506

SEQ ID NO: 6403 - protein, 2107 aa, synthetic construct
MPAAKRVKLDGGDKKYSIGLDIGTNSVGWAVITDEYKVPSKKFKVLGNTDRHSIKKNLIGALLFDSGETAEATRLKRTARRRYTRRKNRICYLQEIFSNEMAKVDDSFFHRLEESFLVEEDKKHERHPIFGNIVDEVAYHEKYPTIYHLRKKLVDSTDKADLRLIYLALAHMIKFRGHFLIEGDLNPDNSDVDKLFIQLVQTYNQLFEENPINASGVDAKAILSARLSKSRRLENLIAQLPGEKKNGLFGNLIALSLGLTPNFKSNFDLAEDAKLQLSKDTYDDDLDNLLAQIGDQYADLFLAAKNLSDAILLSDILRVNTEITKAPLSASMIKRYDEHHQDLTLLKALVRQQLPEKYKEIFFDQSKNGYAGYIDGGASQEEFYKFIKPILEKMDGTEELLVKLNREDLLRKQRTFDNGSIPHQIHLGELHAILRRQEDFYPFLKDNREKIEKILTFRIPYYVGPLARGNSRFAWMTRKSEETITPWNFEEVVDKGASAQSFIERMTNFDKNLPNEKVLPKHSLLYEYFTVYNELTKVKYVTEGMRKPAFLSGEQKKAIVDLLFKTNRKVTVKQLKEDYFKKIECFDSVEISGVEDRFNASLGTYHDLLKIIKDKDFLDNEENEDILEDIVLTLTLFEDREMIEERLKTYAHLFDDKVMKQLKRRRYTGWGRLSRKLINGIRDKQSGKTILDFLKSDGFANRNFMQLIHDDSLTFKEDIQKAQVSGQGDSLHEHIANLAGSPAIKKGILQTVKVVDELVKVMGRHKPENIVIEMARENQTTQKGQKNSRERMKRIEEGIKELGSQILKEHPVENTQLQNEKLYLYYLQNGRDMYVDQELDINRLSDYDVDHIVPQSFLKDDSIDNKVLTRSDKARGKSDNVPSEEVVKKMKNYWRQLLNAKLITQRKFDNLTKAERGGLSELDKAGFIKRQLVETRQITKHVAQILDSRMNTKYDENDKLIREVKVITLKSKLVSDFRKDFQFYKVREINNYHHAHDAYLNAVVGTALIKKYPKLESEFVYGDYKVYDVRKMIAKSEQEIGKATAKYFFYSNIMNFFKTEITLANGEIRKRPLIETNGETGEIVWDKGRDFATVRKVLSMPQVNIVKKTEVQTGGFSKESILPKRNSDKLIARKKDWDPKKYGGFDSPTVAYSVLVVAKVEKGKSKKLKSVKELLGITIMERSSFEKNPIDFLEAKGYKEVKKDLIIKLPKYSLFELENGRKRMLASAGELQKGNELALPSKYVNFLYLASHYEKLKGSPEDNEQKQLFVEQHKHYLDEIIEQISEFSKRVILADANLDKVLSAYNKHRDKPIREQAENIIHLFTLTNLGAPAAFKYFDTTIDRKRYTSTKEVLDATLIHQSITGLYETRIDLSQLGGDGGEAAAKEAAAKEAAAKEAAAKGGTAPLEEEYRLFLEAPIQNVTLLEQWKREIPKVWAEINPPGLASTQAPIHVQLLSTALPVRVRQYPITLEAKRSLRETIRKFRAAGILRPVHSPWNTPLLPVRKSGTSEYRMVQDLREVNKRVETIHPTVPNPYTLLSLLPPDRIWYSVLDLKDAFFCIPLAPESQLIFAFEWADAEEGESGQLTWTRLPQGFKNSPTLFDEALNRDLQGFRLDHPSVSLLQYVDDLLIAADTQAACLSATRDLLMTLAELGYRVSGKKAQLCQEEVTYLGFKIHKGSRSLSNSRTQAILQIPVPKTKRQVREFLGTIGYCRLWIPGFAELAQPLYAATRGGNDPLVWGEKEEEAFQSLKLALTQPPALALPSLDKPFQLFVEETSGAAKGVLTQALGPWKRPVAYLSKRLDPVAAGWPRCLRAIAAAALLTREASKLTFGQDIEITSSHNLESLLRSPPDKWLTNARITQYQVLLLDPPRVRFKQTAALNPATLLPETDDTLPIHHCLDTLDSLTSTRPDLTDQPLAQAEATLFTDGSSYIRDGKRYAGAAVVTLDSVIWAEPLPIGTSAQKAELIALTKALEWSKDKSVNIYTDSRYAFATLHVHGMIYRERGLLTAGGKAIKNAPEILALLTAVWLPKRVAVMHCKGHQKDDAPTSTGNRRADEVAREVAIRPLSTQATISAGKRTADGSEFEKRTADGSEFESPKKKAKVE

SEQ ID NO: 6404 - protein, 2107 aa, synthetic construct
MPAAKRVKLDGGDKKYSIGLDIGTNSVGWAVITDEYKVPSKKFKVLGNTDRHSIKKNLIGALLFDSGETAEATRLKRTARRRYTRRKNRICYLQEIFSNEMAKVDDSFFHRLEESFLVEEDKKHERHPIFGNIVDEVAYHEKYPTIYHLRKKLVDSTDKADLRLIYLALAHMIKFRGHFLIEGDLNPDNSDVDKLFIQLVQTYNQLFEENPINASGVDAKAILSARLSKSRRLENLIAQLPGEKKNGLFGNLIALSLGLTPNFKSNFDLAEDAKLQLSKDTYDDDLDNLLAQIGDQYADLFLAAKNLSDAILLSDILRVNTEITKAPLSASMIKRYDEHHQDLTLLKALVRQQLPEKYKEIFFDQSKNGYAGYIDGGASQEEFYKFIKPILEKMDGTEELLVKLNREDLLRKQRTFDNGSIPHQIHLGELHAILRRQEDFYPFLKDNREKIEKILTFRIPYYVGPLARGNSRFAWMTRKSEETITPWNFEEVVDKGASAQSFIERMTNFDKNLPNEKVLPKHSLLYEYFTVYNELTKVKYVTEGMRKPAFLSGEQKKAIVDLLFKTNRKVTVKQLKEDYFKKIECFDSVEISGVEDRFNASLGTYHDLLKIIKDKDFLDNEENEDILEDIVLTLTLFEDREMIEERLKTYAHLFDDKVMKQLKRRRYTGWGRLSRKLINGIRDKQSGKTILDFLKSDGFANRNFMQLIHDDSLTFKEDIQKAQVSGQGDSLHEHIANLAGSPAIKKGILQTVKVVDELVKVMGRHKPENIVIEMARENQTTQKGQKNSRERMKRIEEGIKELGSQILKEHPVENTQLQNEKLYLYYLQNGRDMYVDQELDINRLSDYDVDHIVPQSFLKDDSIDNKVLTRSDKARGKSDNVPSEEVVKKMKNYWRQLLNAKLITQRKFDNLTKAERGGLSELDKAGFIKRQLVETRQITKHVAQILDSRMNTKYDENDKLIREVKVITLKSKLVSDFRKDFQFYKVREINNYHHAHDAYLNAVVGTALIKKYPKLESEFVYGDYKVYDVRKMIAKSEQEIGKATAKYFFYSNIMNFFKTEITLANGEIRKRPLIETNGETGEIVWDKGRDFATVRKVLSMPQVNIVKKTEVQTGGFSKESILPKRNSDKLIARKKDWDPKKYGGFDSPTVAYSVLVVAKVEKGKSKKLKSVKELLGITIMERSSFEKNPIDFLEAKGYKEVKKDLIIKLPKYSLFELENGRKRMLASAGELQKGNELALPSKYVNFLYLASHYEKLKGSPEDNEQKQLFVEQHKHYLDEIIEQISEFSKRVILADANLDKVLSAYNKHRDKPIREQAENIIHLFTLTNLGAPAAFKYFDTTIDRKRYTSTKEVLDATLIHQSITGLYETRIDLSQLGGDGGEAAAKEAAAKEAAAKEAAAKGGTAPLEEEYRLFLEAPIQNVTLLEQWKREIPKVWAEINPPGLASTQAPIHVQLLSTALPVRVRQYPITLEAKRSLRETIRKFRAAGILRPVHSPWNTPLLPVRKSGTSEYRMVQDLREVNKRVETIHPTVPNPYTLLSLLPPDRIWYSVLDLKDAFFCIPLAPESQLIFAFEWADAEEGESGQLTWTRLPQGFKNSPTLFNEALNRDLQGFRLDHPSVSLLQYVDDLLIAADTQAACLSATRDLLMTLAELGYRVSGKKAQLCQEEVTYLGFKIHKGSRSLSNSRTQAILQIPVPKTKRQVREFLGKIGYCRLFIPGFAELAQPLYAATRPGNDPLVWGEKEEEAFQSLKLALTQPPALALPSLDKPFQLFVEETSGAAKGVLTQALGPWKRPVAYLSKRLDPVAAGWPRCLRAIAAAALLTREASKLTFGQDIEITSSHNLESLLRSPPDKWLTNARITQYQVLLLDPPRVRFKQTAALNPATLLPETDDTLPIHHCLDTLDSLTSTRPDLTDQPLAQAEATLFTDGSSYIRDGKRYAGAAVVTLDSVIWAEPLPIGTSAQKAELIALTKALEWSKDKSVNIYTDSRYAFATLHVHGMIYRERGWLTAGGKAIKNAPEILALLTAVWLPKRVAVMHCKGHQKDDAPTSTGNRRADEVAREVAIRPLSTQATISAGKRTADGSEFEKRTADGSEFESPKKKAKVE

SEQ ID NO: 6405 - protein, 2096 aa, synthetic construct
MPAAKRVKLDGGDKKYSIGLDIGTNSVGWAVITDEYKVPSKKFKVLGNTDRHSIKKNLIGALLFDSGETAEATRLKRTARRRYTRRKNRICYLQEIFSNEMAKVDDSFFHRLEESFLVEEDKKHERHPIFGNIVDEVAYHEKYPTIYHLRKKLVDSTDKADLRLIYLALAHMIKFRGHFLIEGDLNPDNSDVDKLFIQLVQTYNQLFEENPINASGVDAKAILSARLSKSRRLENLIAQLPGEKKNGLFGNLIALSLGLTPNFKSNFDLAEDAKLQLSKDTYDDDLDNLLAQIGDQYADLFLAAKNLSDAILLSDILRVNTEITKAPLSASMIKRYDEHHQDLTLLKALVRQQLPEKYKEIFFDQSKNGYAGYIDGGASQEEFYKFIKPILEKMDGTEELLVKLNREDLLRKQRTFDNGSIPHQIHLGELHAILRRQEDFYPFLKDNREKIEKILTFRIPYYVGPLARGNSRFAWMTRKSEETITPWNFEEVVDKGASAQSFIERMTNFDKNLPNEKVLPKHSLLYEYFTVYNELTKVKYVTEGMRKPAFLSGEQKKAIVDLLFKTNRKVTVKQLKEDYFKKIECFDSVEISGVEDRFNASLGTYHDLLKIIKDKDFLDNEENEDILEDIVLTLTLFEDREMIEERLKTYAHLFDDKVMKQLKRRRYTGWGRLSRKLINGIRDKQSGKTILDFLKSDGFANRNFMQLIHDDSLTFKEDIQKAQVSGQGDSLHEHIANLAGSPAIKKGILQTVKVVDELVKVMGRHKPENIVIEMARENQTTQKGQKNSRERMKRIEEGIKELGSQILKEHPVENTQLQNEKLYLYYLQNGRDMYVDQELDINRLSDYDVDHIVPQSFLKDDSIDNKVLTRSDKARGKSDNVPSEEVVKKMKNYWRQLLNAKLITQRKFDNLTKAERGGLSELDKAGFIKRQLVETRQITKHVAQILDSRMNTKYDENDKLIREVKVITLKSKLVSDFRKDFQFYKVREINNYHHAHDAYLNAVVGTALIKKYPKLESEFVYGDYKVYDVRKMIAKSEQEIGKATAKYFFYSNIMNFFKTEITLANGEIRKRPLIETNGETGEIVWDKGRDFATVRKVLSMPQVNIVKKTEVQTGGFSKESILPKRNSDKLIARKKDWDPKKYGGFDSPTVAYSVLVVAKVEKGKSKKLKSVKELLGITIMERSSFEKNPIDFLEAKGYKEVKKDLIIKLPKYSLFELENGRKRMLASAGELQKGNELALPSKYVNFLYLASHYEKLKGSPEDNEQKQLFVEQHKHYLDEIIEQISEFSKRVILADANLDKVLSAYNKHRDKPIREQAENIIHLFTLTNLGAPAAFKYFDTTIDRKRYTSTKEVLDATLIHQSITGLYETRIDLSQLGGDGGEAAAKEAAAKEAAAKEAAAKGGVPWILKKPLELTIKLDLEEQQGTLLNNSILSKKGKEELKQLFEKYSALWQSWENQVGHRRIRPHKIATGTVKPTPQKQYHINPKAKPDIQIVINDLLKQGVLIQKESTMNTPVYPVPKPNGRWRMVLDYRAVNKVTPLIAVQNQHSYGILGSLFKGRYKTTIDLSNGFWAHPIVPEDYWITAFTWQGKQYCWTVLPQGFLNSPGLFNGDVVDLLQGIPNVEVYVDDVYISHDSEKEHLEYLDILFNRLKEAGYIISLKKSNIANSIVDFLGFQITNEGRGLTDTFKEKLENITAPTTLKQLQSILGLLNFARNFIPDFTELIAPLYALIPKSPKNYVPWQIEHSTTLETLITKLNGAEYLQGRKGDKTLIMKVNASYTTGYIRYYNEGEKKPISYVSIVFSKTELKFTELEKLLTTVHKGLLKALDLSMGQNIHVYSPIVSMQNIQKTPQTAKKALASRWLSWLSYLEDPRIRFFYDPQMPALKDLPAVDTGKDNKKHPSNFQHIFYTDGSAITSPTKEGHLNAGMGIVYFINKDGNLQKQQEWSISLGNHTAQFAEIAAFEFALKKCLPLGGNILVVTDSNYVAKAYNEELDVWASNGFVNNRKKPLKHISKWKSVADLKRLRPDVVVTHEPGHQKLDSSPHAYGNNLADQLATQASFKVHAGKRTADGSEFEKRTADGSEFESPKKKAKVE

SEQ ID NO: 6406 - protein, 2185 aa, synthetic construct
MPAAKRVKLDGGDKKYSIGLDIGTNSVGWAVITDEYKVPSKKFKVLGNTDRHSIKKNLIGALLFDSGETAEATRLKRTARRRYTRRKNRICYLQEIFSNEMAKVDDSFFHRLEESFLVEEDKKHERHPIFGNIVDEVAYHEKYPTIYHLRKKLVDSTDKADLRLIYLALAHMIKFRGHFLIEGDLNPDNSDVDKLFIQLVQTYNQLFEENPINASGVDAKAILSARLSKSRRLENLIAQLPGEKKNGLFGNLIALSLGLTPNFKSNFDLAEDAKLQLSKDTYDDDLDNLLAQIGDQYADLFLAAKNLSDAILLSDILRVNTEITKAPLSASMIKRYDEHHQDLTLLKALVRQQLPEKYKEIFFDQSKNGYAGYIDGGASQEEFYKFIKPILEKMDGTEELLVKLNREDLLRKQRTFDNGSIPHQIHLGELHAILRRQEDFYPFLKDNREKIEKILTFRIPYYVGPLARGNSRFAWMTRKSEETITPWNFEEVVDKGASAQSFIERMTNFDKNLPNEKVLPKHSLLYEYFTVYNELTKVKYVTEGMRKPAFLSGEQKKAIVDLLFKTNRKVTVKQLKEDYFKKIECFDSVEISGVEDRFNASLGTYHDLLKIIKDKDFLDNEENEDILEDIVLTLTLFEDREMIEERLKTYAHLFDDKVMKQLKRRRYTGWGRLSRKLINGIRDKQSGKTILDFLKSDGFANRNFMQLIHDDSLTFKEDIQKAQVSGQGDSLHEHIANLAGSPAIKKGILQTVKVVDELVKVMGRHKPENIVIEMARENQTTQKGQKNSRERMKRIEEGIKELGSQILKEHPVENTQLQNEKLYLYYLQNGRDMYVDQELDINRLSDYDVDHIVPQSFLKDDSIDNKVLTRSDKARGKSDNVPSEEVVKKMKNYWRQLLNAKLITQRKFDNLTKAERGGLSELDKAGFIKRQLVETRQITKHVAQILDSRMNTKYDENDKLIREVKVITLKSKLVSDFRKDFQFYKVREINNYHHAHDAYLNAVVGTALIKKYPKLESEFVYGDYKVYDVRKMIAKSEQEIGKATAKYFFYSNIMNFFKTEITLANGEIRKRPLIETNGETGEIVWDKGRDFATVRKVLSMPQVNIVKKTEVQTGGFSKESILPKRNSDKLIARKKDWDPKKYGGFDSPTVAYSVLVVAKVEKGKSKKLKSVKELLGITIMERSSFEKNPIDFLEAKGYKEVKKDLIIKLPKYSLFELENGRKRMLASAGELQKGNELALPSKYVNFLYLASHYEKLKGSPEDNEQKQLFVEQHKHYLDEIIEQISEFSKRVILADANLDKVLSAYNKHRDKPIREQAENIIHLFTLTNLGAPAAFKYFDTTIDRKRYTSTKEVLDATLIHQSITGLYETRIDLSQLGGDGGEAAAKEAAAKEAAAKEAAAKGGMNPLQLLQPLPAEIKGTKLLAHWNSGATITCIPESFLEDEQPIKKTLIKTIHGEKQQNVYYVTFKVKGRKVEAEVIASPYEYILLSPTDVPWLTQQPLQLTILVPLQEYQEKILSKTALPEDQKQQLKTLFVKYDNLWQHWENQVGHRKIRPHNIATGDYPPRPQKQYPINPKAKPSIQIVIDDLLKQGVLTPQNSTMNTPVYPVPKPDGRWRMVLDYREVNKTIPLTAAQNQHSAGILATIVRQKYKTTLDLANGFWAHPITPESYWLTAFTWQGKQYCWTRLPQGFLNSPALFTADVVDLLKEIPNVQVYVDDIYLSHDDPKEHVQQLEKVFQILLQAGYVVSLKKSEIGQKTVEFLGFNITKEGRGLTDTFKTKLLNITPPKDLKQLQSILGLLNFARNFIPNFAELVQPLYNLIASAKGKYIEWSEENTKQLNMVIEALNTASNLEERLPEQRLVIKVNTSPSAGYVRYYNETGKKPIMYLNYVFSKAELKFSMLEKLLTTMHKALIKAMDLAMGQEILVYSPIVSMTKIQKTPLPERKALPIRWITWMTYLEDPRIQFHYDKTLPELKHIPDVYTSSQSPVKHPSQYEGVFYTDGSAIKSPDPTKSNNAGMGIVHATYKPEYQVLNQWSIPLGNHTAQMAEIAAVEFACKKALKIPGPVLVITDSFYVAESANKELPYWKSNGFVNNKKKPLKHISKWKSIAECLSMKPDITIQHEKGISLQIPVFILKGNALADKLATQGSYVVNAGKRTADGSEFEKRTADGSEFESPKKKAKVE

SEQ ID NO: 6407 - protein, 2103 aa, synthetic construct
MPAAKRVKLDGGDKKYSIGLDIGTNSVGWAVITDEYKVPSKKFKVLGNTDRHSIKKNLIGALLFDSGETAEATRLKRTARRRYTRRKNRICYLQEIFSNEMAKVDDSFFHRLEESFLVEEDKKHERHPIFGNIVDEVAYHEKYPTIYHLRKKLVDSTDKADLRLIYLALAHMIKFRGHFLIEGDLNPDNSDVDKLFIQLVQTYNQLFEENPINASGVDAKAILSARLSKSRRLENLIAQLPGEKKNGLFGNLIALSLGLTPNFKSNFDLAEDAKLQLSKDTYDDDLDNLLAQIGDQYADLFLAAKNLSDAILLSDILRVNTEITKAPLSASMIKRYDEHHQDLTLLKALVRQQLPEKYKEIFFDQSKNGYAGYIDGGASQEEFYKFIKPILEKMDGTEELLVKLNREDLLRKQRTFDNGSIPHQIHLGELHAILRRQEDFYPFLKDNREKIEKILTFRIPYYVGPLARGNSRFAWMTRKSEETITPWNFEEVVDKGASAQSFIERMTNFDKNLPNEKVLPKHSLLYEYFTVYNELTKVKYVTEGMRKPAFLSGEQKKAIVDLLFKTNRKVTVKQLKEDYFKKIECFDSVEISGVEDRFNASLGTYHDLLKIIKDKDFLDNEENEDILEDIVLTLTLFEDREMIEERLKTYAHLFDDKVMKQLKRRRYTGWGRLSRKLINGIRDKQSGKTILDFLKSDGFANRNFMQLIHDDSLTFKEDIQKAQVSGQGDSLHEHIANLAGSPAIKKGILQTVKVVDELVKVMGRHKPENIVIEMARENQTTQKGQKNSRERMKRIEEGIKELGSQILKEHPVENTQLQNEKLYLYYLQNGRDMYVDQELDINRLSDYDVDHIVPQSFLKDDSIDNKVLTRSDKARGKSDNVPSEEVVKKMKNYWRQLLNAKLITQRKFDNLTKAERGGLSELDKAGFIKRQLVETRQITKHVAQILDSRMNTKYDENDKLIREVKVITLKSKLVSDFRKDFQFYKVREINNYHHAHDAYLNAVVGTALIKKYPKLESEFVYGDYKVYDVRKMIAKSEQEIGKATAKYFFYSNIMNFFKTEITLANGEIRKRPLIETNGETGEIVWDKGRDFATVRKVLSMPQVNIVKKTEVQTGGFSKESILPKRNSDKLIARKKDWDPKKYGGFDSPTVAYSVLVVAKVEKGKSKKLKSVKELLGITIMERSSFEKNPIDFLEAKGYKEVKKDLIIKLPKYSLFELENGRKRMLASAGELQKGNELALPSKYVNFLYLASHYEKLKGSPEDNEQKQLFVEQHKHYLDEIIEQISEFSKRVILADANLDKVLSAYNKHRDKPIREQAENIIHLFTLTNLGAPAAFKYFDTTIDRKRYTSTKEVLDATLIHQSITGLYETRIDLSQLGGDGGEAAAKEAAAKEAAAKEAAAKGGVLNLEEEYRLHEKPVPSSIDPSWLQLFPTVWAERAGMGLANQVPPVVVELRSGASPVAVRQYPMSKEAREGIRPHIQKFLDLGVLVPCRSPWNTPLLPVKKPGTNDYRPVQDLREINKRVQDIHPTVPNPYNLLSSLPPSYTWYSVLDLKDAFFCLRLHPNSQPLFAFEWKDPEKGNTGQLTWTRLPQGFKNSPTLFNEALHRDLAPFRALNPQVVLLQYVDDLLVAAPTYEDCKKGTQKLLQELSKLGYRVSAKKAQLCQREVTYLGYLLKEGKRWLTPARKATVMKIPVPTTPRQVREFLGKAGFCRLFIPGFASLAAPLYPLTKPSIPFIWTEEHQQAFDHIKKALLSAPALALPDLTKPFTLYIDERAGVARGVLTQTLGPWRRPVAYLSKKLDPVASGWPTCLKAVAAVALLLKDADKLTLGQNVTVIASHSLESIVRQPPDRWMTNARMTHYQSLLLNERVSFAPPAVLNPATLLPVESEATPVHRCSEILAEETGTRRDLEDQPLPGVPTWYTDGSSFITEGKRRAGAPIVDGKRTVWASSLPEGTSAQKAELVALTQALRLAEGKNINIYTDSRYAFATAHIHGAIYKQRGWLTSAGKDIKNKEEILALLEAIHLPRRVAIIHCPGHQRGSNPVATGNRRADEAAKQAALSTRVLAGTTKPAGKRTADGSEFEKRTADGSEFESPKKKAKVE

SEQ ID NO: 6408 - protein, 2136 aa, synthetic construct
MPAAKRVKLDGGDKKYSIGLDIGTNSVGWAVITDEYKVPSKKFKVLGNTDRHSIKKNLIGALLFDSGETAEATRLKRTARRRYTRRKNRICYLQEIFSNEMAKVDDSFFHRLEESFLVEEDKKHERHPIFGNIVDEVAYHEKYPTIYHLRKKLVDSTDKADLRLIYLALAHMIKFRGHFLIEGDLNPDNSDVDKLFIQLVQTYNQLFEENPINASGVDAKAILSARLSKSRRLENLIAQLPGEKKNGLFGNLIALSLGLTPNFKSNFDLAEDAKLQLSKDTYDDDLDNLLAQIGDQYADLFLAAKNLSDAILLSDILRVNTEITKAPLSASMIKRYDEHHQDLTLLKALVRQQLPEKYKEIFFDQSKNGYAGYIDGGASQEEFYKFIKPILEKMDGTEELLVKLNREDLLRKQRTFDNGSIPHQIHLGELHAILRRQEDFYPFLKDNREKIEKILTFRIPYYVGPLARGNSRFAWMTRKSEETITPWNFEEVVDKGASAQSFIERMTNFDKNLPNEKVLPKHSLLYEYFTVYNELTKVKYVTEGMRKPAFLSGEQKKAIVDLLFKTNRKVTVKQLKEDYFKKIECFDSVEISGVEDRFNASLGTYHDLLKIIKDKDFLDNEENEDILEDIVLTLTLFEDREMIEERLKTYAHLFDDKVMKQLKRRRYTGWGRLSRKLINGIRDKQSGKTILDFLKSDGFANRNFMQLIHDDSLTFKEDIQKAQVSGQGDSLHEHIANLAGSPAIKKGILQTVKVVDELVKVMGRHKPENIVIEMARENQTTQKGQKNSRERMKRIEEGIKELGSQILKEHPVENTQLQNEKLYLYYLQNGRDMYVDQELDINRLSDYDVDHIVPQSFLKDDSIDNKVLTRSDKARGKSDNVPSEEVVKKMKNYWRQLLNAKLITQRKFDNLTKAERGGLSELDKAGFIKRQLVETRQITKHVAQILDSRMNTKYDENDKLIREVKVITLKSKLVSDFRKDFQFYKVREINNYHHAHDAYLNAVVGTALIKKYPKLESEFVYGDYKVYDVRKMIAKSEQEIGKATAKYFFYSNIMNFFKTEITLANGEIRKRPLIETNGETGEIVWDKGRDFATVRKVLSMPQVNIVKKTEVQTGGFSKESILPKRNSDKLIARKKDWDPKKYGGFDSPTVAYSVLVVAKVEKGKSKKLKSVKELLGITIMERSSFEKNPIDFLEAKGYKEVKKDLIIKLPKYSLFELENGRKRMLASAGELQKGNELALPSKYVNFLYLASHYEKLKGSPEDNEQKQLFVEQHKHYLDEIIEQISEFSKRVILADANLDKVLSAYNKHRDKPIREQAENIIHLFTLTNLGAPAAFKYFDTTIDRKRYTSTKEVLDATLIHQSITGLYETRIDLSQLGGDGGEAAAKEAAAKEAAAKEAAAKGGLLGRDLLTKLKAQIQFSTEGPQVTWEDRPAMCLVLNLEEEYRLHEKPVPPSIDPSWLQLFPMVWAEKAGMGLANQVPPVVVELKSDASPVAVRQYPMSKEAREGIRPHIQRFLDLGILVPCQSPWNTPLLPVKKPGTNDYRPVQDLREVNKRVQDIHPTVPNPYNLLSSLPPSHTWYSVLDLKDAFFCLKLHPNSQPLFAFEWRDPEKGNTGQLTWTRLPQGFKNSPTLFDEALHRDLASFRALNPQVVMLQYVDDLLVAAPTYRDCKEGTRRLLQELSKLGYRVSAKKAQLCREEVTYLGYLLKGGKRWLTPARKATVMKIPTPTTPRQVREFLGTAGFCRLWIPGFASLAAPLYPLTREKVPFTWTEAHQEAFGRIKEALLSAPALALPDLTKPFALYVDEKEGVARGVLTQTLGPWRRPVAYLSKKLDPVASGWPTCLKAIAAVALLLKDADKLTLGQNVLVIAPHNLESIVRQPPDRWMTNARMTHYQSLLLNERVSFAPPAILNPATLLPVESDDTPIHICSEILAEETGTRPDLRDQPLPGVPAWYTDGSSFIMDGRRQAGAAIVDNKRTVWASNLPEGTSAQKAELIALTQALRLAEGKSINIYTDSRYAFATAHVHGAIYKQRGLLTSAGKDIKNKEEILALLEAIHLPKRVAIIHCPGHQRGTDPVATGNRKADEAAKQAAQSTRILTETTKNAGKRTADGSEFEKRTADGSEFESPKKKAKVE

SEQ ID NO: 6409 - protein, 2136 aa, synthetic construct
MPAAKRVKLDGGDKKYSIGLDIGTNSVGWAVITDEYKVPSKKFKVLGNTDRHSIKKNLIGALLFDSGETAEATRLKRTARRRYTRRKNRICYLQEIFSNEMAKVDDSFFHRLEESFLVEEDKKHERHPIFGNIVDEVAYHEKYPTIYHLRKKLVDSTDKADLRLIYLALAHMIKFRGHFLIEGDLNPDNSDVDKLFIQLVQTYNQLFEENPINASGVDAKAILSARLSKSRRLENLIAQLPGEKKNGLFGNLIALSLGLTPNFKSNFDLAEDAKLQLSKDTYDDDLDNLLAQIGDQYADLFLAAKNLSDAILLSDILRVNTEITKAPLSASMIKRYDEHHQDLTLLKALVRQQLPEKYKEIFFDQSKNGYAGYIDGGASQEEFYKFIKPILEKMDGTEELLVKLNREDLLRKQRTFDNGSIPHQIHLGELHAILRRQEDFYPFLKDNREKIEKILTFRIPYYVGPLARGNSRFAWMTRKSEETITPWNFEEVVDKGASAQSFIERMTNFDKNLPNEKVLPKHSLLYEYFTVYNELTKVKYVTEGMRKPAFLSGEQKKAIVDLLFKTNRKVTVKQLKEDYFKKIECFDSVEISGVEDRFNASLGTYHDLLKIIKDKDFLDNEENEDILEDIVLTLTLFEDREMIEERLKTYAHLFDDKVMKQLKRRRYTGWGRLSRKLINGIRDKQSGKTILDFLKSDGFANRNFMQLIHDDSLTFKEDIQKAQVSGQGDSLHEHIANLAGSPAIKKGILQTVKVVDELVKVMGRHKPENIVIEMARENQTTQKGQKNSRERMKRIEEGIKELGSQILKEHPVENTQLQNEKLYLYYLQNGRDMYVDQELDINRLSDYDVDHIVPQSFLKDDSIDNKVLTRSDKARGKSDNVPSEEVVKKMKNYWRQLLNAKLITQRKFDNLTKAERGGLSELDKAGFIKRQLVETRQITKHVAQILDSRMNTKYDENDKLIREVKVITLKSKLVSDFRKDFQFYKVREINNYHHAHDAYLNAVVGTALIKKYPKLESEFVYGDYKVYDVRKMIAKSEQEIGKATAKYFFYSNIMNFFKTEITLANGEIRKRPLIETNGETGEIVWDKGRDFATVRKVLSMPQVNIVKKTEVQTGGFSKESILPKRNSDKLIARKKDWDPKKYGGFDSPTVAYSVLVVAKVEKGKSKKLKSVKELLGITIMERSSFEKNPIDFLEAKGYKEVKKDLIIKLPKYSLFELENGRKRMLASAGELQKGNELALPSKYVNFLYLASHYEKLKGSPEDNEQKQLFVEQHKHYLDEIIEQISEFSKRVILADANLDKVLSAYNKHRDKPIREQAENIIHLFTLTNLGAPAAFKYFDTTIDRKRYTSTKEVLDATLIHQSITGLYETRIDLSQLGGDGGEAAAKEAAAKEAAAKEAAAKGGLLGRDLLTKLKAQIQFSTEGPQVTWEDRPAMCLVLNLEEEYRLHEKPVPPSIDPSWLQLFPMVWAEKAGMGLANQVPPVVVELKSDASPVAVRQYPMSKEAREGIRPHIQRFLDLGILVPCQSPWNTPLLPVKKPGTNDYRPVQDLREVNKRVQDIHPTVPNPYNLLSSLPPSHTWYSVLDLKDAFFCLKLHPNSQPLFAFEWRDPEKGNTGQLTWTRLPQGFKNSPTLFNEALHRDLASFRALNPQVVMLQYVDDLLVAAPTYRDCKEGTRRLLQELSKLGYRVSAKKAQLCREEVTYLGYLLKGGKRWLTPARKATVMKIPTPTTPRQVREFLGTAGFCRLWIPGFASLAAPLYPLTRPKVPFTWTEAHQEAFGRIKEALLSAPALALPDLTKPFALYVDEKEGVARGVLTQTLGPWRRPVAYLSKKLDPVASGWPTCLKAIAAVALLLKDADKLTLGQNVLVIAPHNLESIVRQPPDRWMTNARMTHYQSLLLNERVSFAPPAILNPATLLPVESDDTPIHICSEILAEETGTRPDLRDQPLPGVPAWYTDGSSFIMDGRRQAGAAIVDNKRTVWASNLPEGTSAQKAELIALTQALRLAEGKSINIYTDSRYAFATAHVHGAIYKQRGWLTSAGKDIKNKEEILALLEAIHLPKRVAIIHCPGHQRGTDPVATGNRKADEAAKQAAQSTRILTETTKNAGKRTADGSEFEKRTADGSEFESPKKKAKVE

SEQ ID NO: 6410 - protein, 2227 aa, synthetic construct
MPAAKRVKLDGGDKKYSIGLDIGTNSVGWAVITDEYKVPSKKFKVLGNTDRHSIKKNLIGALLFDSGETAEATRLKRTARRRYTRRKNRICYLQEIFSNEMAKVDDSFFHRLEESFLVEEDKKHERHPIFGNIVDEVAYHEKYPTIYHLRKKLVDSTDKADLRLIYLALAHMIKFRGHFLIEGDLNPDNSDVDKLFIQLVQTYNQLFEENPINASGVDAKAILSARLSKSRRLENLIAQLPGEKKNGLFGNLIALSLGLTPNFKSNFDLAEDAKLQLSKDTYDDDLDNLLAQIGDQYADLFLAAKNLSDAILLSDILRVNTEITKAPLSASMIKRYDEHHQDLTLLKALVRQQLPEKYKEIFFDQSKNGYAGYIDGGASQEEFYKFIKPILEKMDGTEELLVKLNREDLLRKQRTFDNGSIPHQIHLGELHAILRRQEDFYPFLKDNREKIEKILTFRIPYYVGPLARGNSRFAWMTRKSEETITPWNFEEVVDKGASAQSFIERMTNFDKNLPNEKVLPKHSLLYEYFTVYNELTKVKYVTEGMRKPAFLSGEQKKAIVDLLFKTNRKVTVKQLKEDYFKKIECFDSVEISGVEDRFNASLGTYHDLLKIIKDKDFLDNEENEDILEDIVLTLTLFEDREMIEERLKTYAHLFDDKVMKQLKRRRYTGWGRLSRKLINGIRDKQSGKTILDFLKSDGFANRNFMQLIHDDSLTFKEDIQKAQVSGQGDSLHEHIANLAGSPAIKKGILQTVKVVDELVKVMGRHKPENIVIEMARENQTTQKGQKNSRERMKRIEEGIKELGSQILKEHPVENTQLQNEKLYLYYLQNGRDMYVDQELDINRLSDYDVDHIVPQSFLKDDSIDNKVLTRSDKARGKSDNVPSEEVVKKMKNYWRQLLNAKLITQRKFDNLTKAERGGLSELDKAGFIKRQLVETRQITKHVAQILDSRMNTKYDENDKLIREVKVITLKSKLVSDFRKDFQFYKVREINNYHHAHDAYLNAVVGTALIKKYPKLESEFVYGDYKVYDVRKMIAKSEQEIGKATAKYFFYSNIMNFFKTEITLANGEIRKRPLIETNGETGEIVWDKGRDFATVRKVLSMPQVNIVKKTEVQTGGFSKESILPKRNSDKLIARKKDWDPKKYGGFDSPTVAYSVLVVAKVEKGKSKKLKSVKELLGITIMERSSFEKNPIDFLEAKGYKEVKKDLIIKLPKYSLFELENGRKRMLASAGELQKGNELALPSKYVNFLYLASHYEKLKGSPEDNEQKQLFVEQHKHYLDEIIEQISEFSKRVILADANLDKVLSAYNKHRDKPIREQAENIIHLFTLTNLGAPAAFKYFDTTIDRKRYTSTKEVLDATLIHQSITGLYETRIDLSQLGGDGGEAAAKEAAAKEAAAKEAAAKGGTLGDQGSRGSDPLPEPRVTLTVEGIPTEFLVNTGAEHSVLTKPMGKMGSKRTVVAGATGSKVYPWTTKRLLKIGQKQVTHSFLVIPECPAPLLGRDLLTKLKAQIQFSTEGPQVTWEDRPAMCLVLNLEEEYRLHEKPVPPSIDPSWLQLFPMVWAEKAGMGLANQVPPVVVELKSDASPVAVRQYPMSKEAREGIRPHIQRFLDLGILVPCQSPWNTPLLPVKKPGTNDYRPVQDLREVNKRVQDIHPTVPNPYNLLSSLPPSHTWYSVLDLKDAFFCLKLHPNSQPLFAFEWRDPEKGNTGQLTWTRLPQGFKNSPTLFNEALHRDLASFRALNPQVVMLQYVDDLLVAAPTYRDCKEGTRRLLQELSKLGYRVSAKKAQLCREEVTYLGYLLKGGKRWLTPARKATVMKIPTPTTPRQVREFLGTAGFCRLWIPGFASLAAPLYPLTRPKVPFTWTEAHQEAFGRIKEALLSAPALALPDLTKPFALYVDEKEGVARGVLTQTLGPWRRPVAYLSKKLDPVASGWPTCLKAIAAVALLLKDADKLTLGQNVLVIAPHNLESIVRQPPDRWMTNARMTHYQSLLLNERVSFAPPAILNPATLLPVESDDTPIHICSEILAEETGTRPDLRDQPLPGVPAWYTDGSSFIMDGRRQAGAAIVDNKRTVWASNLPEGTSAQKAELIALTQALRLAEGKSINIYTDSRYAFATAHVHGAIYKQRGWLTSAGKDIKNKEEILALLEAIHLPKRVAIIHCPGHQRGTDPVATGNRKADEAAKQAAQSTRILTETTKNAGKRTADGSEFEKRTADGSEFESPKKKAKVE

SEQ ID NO: 6411 - protein, 2105 aa, synthetic construct
MPAAKRVKLDGGDKKYSIGLDIGTNSVGWAVITDEYKVPSKKFKVLGNTDRHSIKKNLIGALLFDSGETAEATRLKRTARRRYTRRKNRICYLQEIFSNEMAKVDDSFFHRLEESFLVEEDKKHERHPIFGNIVDEVAYHEKYPTIYHLRKKLVDSTDKADLRLIYLALAHMIKFRGHFLIEGDLNPDNSDVDKLFIQLVQTYNQLFEENPINASGVDAKAILSARLSKSRRLENLIAQLPGEKKNGLFGNLIALSLGLTPNFKSNFDLAEDAKLQLSKDTYDDDLDNLLAQIGDQYADLFLAAKNLSDAILLSDILRVNTEITKAPLSASMIKRYDEHHQDLTLLKALVRQQLPEKYKEIFFDQSKNGYAGYIDGGASQEEFYKFIKPILEKMDGTEELLVKLNREDLLRKQRTFDNGSIPHQIHLGELHAILRRQEDFYPFLKDNREKIEKILTFRIPYYVGPLARGNSRFAWMTRKSEETITPWNFEEVVDKGASAQSFIERMTNFDKNLPNEKVLPKHSLLYEYFTVYNELTKVKYVTEGMRKPAFLSGEQKKAIVDLLFKTNRKVTVKQLKEDYFKKIECFDSVEISGVEDRFNASLGTYHDLLKIIKDKDFLDNEENEDILEDIVLTLTLFEDREMIEERLKTYAHLFDDKVMKQLKRRRYTGWGRLSRKLINGIRDKQSGKTILDFLKSDGFANRNFMQLIHDDSLTFKEDIQKAQVSGQGDSLHEHIANLAGSPAIKKGILQTVKVVDELVKVMGRHKPENIVIEMARENQTTQKGQKNSRERMKRIEEGIKELGSQILKEHPVENTQLQNEKLYLYYLQNGRDMYVDQELDINRLSDYDVDHIVPQSFLKDDSIDNKVLTRSDKARGKSDNVPSEEVVKKMKNYWRQLLNAKLITQRKFDNLTKAERGGLSELDKAGFIKRQLVETRQITKHVAQILDSRMNTKYDENDKLIREVKVITLKSKLVSDFRKDFQFYKVREINNYHHAHDAYLNAVVGTALIKKYPKLESEFVYGDYKVYDVRKMIAKSEQEIGKATAKYFFYSNIMNFFKTEITLANGEIRKRPLIETNGETGEIVWDKGRDFATVRKVLSMPQVNIVKKTEVQTGGFSKESILPKRNSDKLIARKKDWDPKKYGGFDSPTVAYSVLVVAKVEKGKSKKLKSVKELLGITIMERSSFEKNPIDFLEAKGYKEVKKDLIIKLPKYSLFELENGRKRMLASAGELQKGNELALPSKYVNFLYLASHYEKLKGSPEDNEQKQLFVEQHKHYLDEIIEQISEFSKRVILADANLDKVLSAYNKHRDKPIREQAENIIHLFTLTNLGAPAAFKYFDTTIDRKRYTSTKEVLDATLIHQSITGLYETRIDLSQLGGDGGEAAAKEAAAKEAAAKEAAAKGGTLNIEDEHRLHETSKEPDVSLGSTWLSDFPQAWAETGGMGLAVRQAPLIIPLKATSTPVSIKQYPMSQEARLGIKPHIQRLLDQGILVPCQSPWNTPLLPVKKPGTNDYRPVQDLREVNKRVEDIHPTVPNPYNLLSGLPPSHQWYTVLDLKDAFFCLRLHPTSQPLFAFEWRDPEMGISGQLTWTRLPQGFKNSPTLFDEALHRDLADFRIQHPDLILLQYVDDLLLAATSELDCQQGTRALLQTLGNLGYRASAKKAQICQKQVKYLGYLLKEGQRWLTEARKETVMGQPTPKTPRQLREFLGTAGFCRLWIPGFAEMAAPLYPLTKTGTLFNWGPDQQKAYQEIKQALLTAPALGLPDLTKPFELFVDEKQGYAKGVLTQKLGPWRRPVAYLSKKLDPVAAGWPPCLRMVAAIAVLTKDAGKLTMGQPLVILAPHAVEALVKQPPDRWLSNARMTHYQALLLDTDRVQFGPVVALNPATLLPLPEEGLQHNCLDILAEAHGTRPDLTDQPLPDADHTWYTDGSSLLQEGQRKAGAAVTTETEVIWAKALPAGTSAQRAELIALTQALKMAEGKKLNVYTDSRYAFATAHIHGEIYRRRGLLTSEGKEIKNKDEILALLKALFLPKRLSIIHCPGHQKGHSAEARGNRMADQAARKAAITETPDTSTLLAGKRTADGSEFEKRTADGSEFESPKKKAKVE

SEQ ID NO: 6412 - protein, 2099 aa, synthetic construct
MPAAKRVKLDGGDKKYSIGLDIGTNSVGWAVITDEYKVPSKKFKVLGNTDRHSIKKNLIGALLFDSGETAEATRLKRTARRRYTRRKNRICYLQEIFSNEMAKVDDSFFHRLEESFLVEEDKKHERHPIFGNIVDEVAYHEKYPTIYHLRKKLVDSTDKADLRLIYLALAHMIKFRGHFLIEGDLNPDNSDVDKLFIQLVQTYNQLFEENPINASGVDAKAILSARLSKSRRLENLIAQLPGEKKNGLFGNLIALSLGLTPNFKSNFDLAEDAKLQLSKDTYDDDLDNLLAQIGDQYADLFLAAKNLSDAILLSDILRVNTEITKAPLSASMIKRYDEHHQDLTLLKALVRQQLPEKYKEIFFDQSKNGYAGYIDGGASQEEFYKFIKPILEKMDGTEELLVKLNREDLLRKQRTFDNGSIPHQIHLGELHAILRRQEDFYPFLKDNREKIEKILTFRIPYYVGPLARGNSRFAWMTRKSEETITPWNFEEVVDKGASAQSFIERMTNFDKNLPNEKVLPKHSLLYEYFTVYNELTKVKYVTEGMRKPAFLSGEQKKAIVDLLFKTNRKVTVKQLKEDYFKKIECFDSVEISGVEDRFNASLGTYHDLLKIIKDKDFLDNEENEDILEDIVLTLTLFEDREMIEERLKTYAHLFDDKVMKQLKRRRYTGWGRLSRKLINGIRDKQSGKTILDFLKSDGFANRNFMQLIHDDSLTFKEDIQKAQVSGQGDSLHEHIANLAGSPAIKKGILQTVKVVDELVKVMGRHKPENIVIEMARENQTTQKGQKNSRERMKRIEEGIKELGSQILKEHPVENTQLQNEKLYLYYLQNGRDMYVDQELDINRLSDYDVDHIVPQSFLKDDSIDNKVLTRSDKARGKSDNVPSEEVVKKMKNYWRQLLNAKLITQRKFDNLTKAERGGLSELDKAGFIKRQLVETRQITKHVAQILDSRMNTKYDENDKLIREVKVITLKSKLVSDFRKDFQFYKVREINNYHHAHDAYLNAVVGTALIKKYPKLESEFVYGDYKVYDVRKMIAKSEQEIGKATAKYFFYSNIMNFFKTEITLANGEIRKRPLIETNGETGEIVWDKGRDFATVRKVLSMPQVNIVKKTEVQTGGFSKESILPKRNSDKLIARKKDWDPKKYGGFDSPTVAYSVLVVAKVEKGKSKKLKSVKELLGITIMERSSFEKNPIDFLEAKGYKEVKKDLIIKLPKYSLFELENGRKRMLASAGELQKGNELALPSKYVNFLYLASHYEKLKGSPEDNEQKQLFVEQHKHYLDEIIEQISEFSKRVILADANLDKVLSAYNKHRDKPIREQAENIIHLFTLTNLGAPAAFKYFDTTIDRKRYTSTKEVLDATLIHQSITGLYETRIDLSQLGGDGGEAAAKEAAAKEAAAKEAAAKGGTLQLDDEYRLYSPLVKPDQNIQFWLEQFPQAWAETAGMGLAKQVPPQVIQLKASATPVSVRQYPLSKEAQEGIRPHVQRLIQQGILVPVQSPWNTPLLPVRKPGTNDYRPVQDLREVNKRVQDIHPTVPNPYNLLCALPPQRSWYTVLDLKDAFFCLRLHPTSQPLFAFEWRDPGTGRTGQLTWTRLPQGFKNSPTIFDEALHRDLANFRIQHPQVTLLQYVDDLLLAGATKQDCLEGTKALLLELSDLGYRASAKKAQICRREVTYLGYSLRDGQRWLTEARKKTVVQIPAPTTAKQVREFLGTAGFCRLWIPGFATLAAPLYPLTKEKGEFSWAPEHQKAFDAIKKALLSAPALALPDVTKPFTLYVDERKGVARGVLTQTLGPWRRPVAYLSKKLDPVASGWPVCLKAIAAVAILVKDADKLTLGQNITVIAPHALENIVRQPPDRWMTNARMTHYQSLLLTERVTFAPPAALNPATLLPEETDEPVTHDCHQLLIEETGVRKDLTDIPLTGEVLTWFTDGSSYVVEGKRMAGAAVVDGTRTIWASSLPEGTSAQKAELMALTQALRLAEGKSINIYTDSRYAFATAHVHGAIYKQRGLLTSAGREIKNKEEILSLLEALHLPKRLAIIHCPGHQKAKDPISRGNQMADRVAKQAAQGVNLLAGKRTADGSEFEKRTADGSEFESPKKKAKVE

SEQ ID NO: 6413 - protein, 2099 aa, synthetic construct; identical to SEQ ID NO: 6412

SEQ ID NO: 6414 - protein, 2096 aa, synthetic construct
MPAAKRVKLDGGDKKYSIGLDIGTNSVGWAVITDEYKVPSKKFKVLGNTDRHSIKKNLIGALLFDSGETAEATRLKRTARRRYTRRKNRICYLQEIFSNEMAKVDDSFFHRLEESFLVEEDKKHERHPIFGNIVDEVAYHEKYPTIYHLRKKLVDSTDKADLRLIYLALAHMIKFRGHFLIEGDLNPDNSDVDKLFIQLVQTYNQLFEENPINASGVDAKAILSARLSKSRRLENLIAQLPGEKKNGLFGNLIALSLGLTPNFKSNFDLAEDAKLQLSKDTYDDDLDNLLAQIGDQYADLFLAAKNLSDAILLSDILRVNTEITKAPLSASMIKRYDEHHQDLTLLKALVRQQLPEKYKEIFFDQSKNGYAGYIDGGASQEEFYKFIKPILEKMDGTEELLVKLNREDLLRKQRTFDNGSIPHQIHLGELHAILRRQEDFYPFLKDNREKIEKILTFRIPYYVGPLARGNSRFAWMTRKSEETITPWNFEEVVDKGASAQSFIERMTNFDKNLPNEKVLPKHSLLYEYFTVYNELTKVKYVTEGMRKPAFLSGEQKKAIVDLLFKTNRKVTVKQLKEDYFKKIECFDSVEISGVEDRFNASLGTYHDLLKIIKDKDFLDNEENEDILEDIVLTLTLFEDREMIEERLKTYAHLFDDKVMKQLKRRRYTGWGRLSRKLINGIRDKQSGKTILDFLKSDGFANRNFMQLIHDDSLTFKEDIQKAQVSGQGDSLHEHIANLAGSPAIKKGILQTVKVVDELVKVMGRHKPENIVIEMARENQTTQKGQKNSRERMKRIEEGIKELGSQILKEHPVENTQLQNEKLYLYYLQNGRDMYVDQELDINRLSDYDVDHIVPQSFLKDDSIDNKVLTRSDKARGKSDNVPSEEVVKKMKNYWRQLLNAKLITQRKFDNLTKAERGGLSELDKAGFIKRQLVETRQITKHVAQILDSRMNTKYDENDKLIREVKVITLKSKLVSDFRKDFQFYKVREINNYHHAHDAYLNAVVGTALIKKYPKLESEFVYGDYKVYDVRKMIAKSEQEIGKATAKYFFYSNIMNFFKTEITLANGEIRKRPLIETNGETGEIVWDKGRDFATVRKVLSMPQVNIVKKTEVQTGGFSKESILPKRNSDKLIARKKDWDPKKYGGFDSPTVAYSVLVVAKVEKGKSKKLKSVKELLGITIMERSSFEKNPIDFLEAKGYKEVKKDLIIKLPKYSLFELENGRKRMLASAGELQKGNELALPSKYVNFLYLASHYEKLKGSPEDNEQKQLFVEQHKHYLDEIIEQISEFSKRVILADANLDKVLSAYNKHRDKPIREQAENIIHLFTLTNLGAPAAFKYFDTTIDRKRYTSTKEVLDATLIHQSITGLYETRIDLSQLGGDGGEAAAKEAAAKEAAAKEAAAKGGVPWLMKKPLQLTVLVPLHEYQERLLQQTALPKEQKELLQKLFLKYDALWQHWENQVGHRRIKPHNIATGTLAPRPQKQYPINPKAKPSIQIVIDDLLKQGVLIQQNSTMNTPVYPVPKPDGKWRMVLDYREVNKTIPLIAAQNQHSAGILSSIYRGKYKTTLDLTNGFWAHPITPESYWLTAFTWQGKQYCWTRLPQGFLNSPALFNADVVDLLKEIPNVQAYVDDIYISHDDPQEHLEQLEKIFSILLNAGYVVSLKKSEIAQREVEFLGFNITKEGRGLTDTFKQKLLNITPPKDLKQLQSILGKLNFARNFIPNYSELVKPLYTIVAPANGKFISWTEDNSNQLQHIISVLNQADNLEERNPETRLIIKVNSSPSAGYIRYYNEGSKRPIMYVNYIFSKAEAKFTQTEKLLTTMHKGLIKAMDLAMGQEILVYSPIVSMTKIQRTPLPERKALPVRWITWMTYLEDPRIQFHYDKSLPELQQIPNVTEDVIAKTKHPSEFAMVFYTDGSAIKHPDVNKSHSAGMGIAQVQFIPEYKIVHQWSIPLGDHTAQLAEIAAVEFACKKALKISGPVLIVTDSFYVAESANKELPYWKSNGFLNNKKKPLRHVSKWKSIAECLQLKPDIIIMHEKGHQQPMTTLHTEGNNLADKLATQGSYVVHAGKRTADGSEFEKRTADGSEFESPKKKAKVE

SEQ ID NO: 6415 - protein, 2185 aa, synthetic construct
MPAAKRVKLDGGDKKYSIGLDIGTNSVGWAVITDEYKVPSKKFKVLGNTDRHSIKKNLIGALLFDSGETAEATRLKRTARRRYTRRKNRICYLQEIFSNEMAKVDDSFFHRLEESFLVEEDKKHERHPIFGNIVDEVAYHEKYPTIYHLRKKLVDSTDKADLRLIYLALAHMIKFRGHFLIEGDLNPDNSDVDKLFIQLVQTYNQLFEENPINASGVDAKAILSARLSKSRRLENLIAQLPGEKKNGLFGNLIALSLGLTPNFKSNFDLAEDAKLQLSKDTYDDDLDNLLAQIGDQYADLFLAAKNLSDAILLSDILRVNTEITKAPLSASMIKRYDEHHQDLTLLKALVRQQLPEKYKEIFFDQSKNGYAGYIDGGASQEEFYKFIKPILEKMDGTEELLVKLNREDLLRKQRTFDNGSIPHQIHLGELHAILRRQEDFYPFLKDNREKIEKILTFRIPYYVGPLARGNSRFAWMTRKSEETITPWNFEEVVDKGASAQSFIERMTNFDKNLPNEKVLPKHSLLYEYFTVYNELTKVKYVTEGMRKPAFLSGEQKKAIVDLLFKTNRKVTVKQLKEDYFKKIECFDSVEISGVEDRFNASLGTYHDLLKIIKDKDFLDNEENEDILEDIVLTLTLFEDREMIEERLKTYAHLFDDKVMKQLKRRRYTGWGRLSRKLINGIRDKQSGKTILDFLKSDGFANRNFMQLIHDDSLTFKEDIQKAQVSGQGDSLHEHIANLAGSPAIKKGILQTVKVVDELVKVMGRHKPENIVIEMARENQTTQKGQKNSRERMKRIEEGIKELGSQILKEHPVENTQLQNEKLYLYYLQNGRDMYVDQELDINRLSDYDVDHIVPQSFLKDDSIDNKVLTRSDKARGKSDNVPSEEVVKKMKNYWRQLLNAKLITQRKFDNLTKAERGGLSELDKAGFIKRQLVETRQITKHVAQILDSRMNTKYDENDKLIREVKVITLKSKLVSDFRKDFQFYKVREINNYHHAHDAYLNAVVGTALIKKYPKLESEFVYGDYKVYDVRKMIAKSEQEIGKATAKYFFYSNIMNFFKTEITLANGEIRKRPLIETNGETGEIVWDKGRDFATVRKVLSMPQVNIVKKTEVQTGGFSKESILPKRNSDKLIARKKDWDPKKYGGFDSPTVAYSVLVVAKVEKGKSKKLKSVKELLGITIMERSSFEKNPIDFLEAKGYKEVKKDLIIKLPKYSLFELENGRKRMLASAGELQKGNELALPSKYVNFLYLASHYEKLKGSPEDNEQKQLFVEQHKHYLDEIIEQISEFSKRVILADANLDKVLSAYNKHRDKPIREQAENIIHLFTLTNLGAPAAFKYFDTTIDRKRYTSTKEVLDATLIHQSITGLYETRIDLSQLGGDGGEAAAKEAAAKEAAAKEAAAKGGMDPLQLLQPLEAEIKGTKLKAHWNSGATITCVPEAFLEDERPIQTMLIKTIHGEKQQDVYYLTFKVQGRKVEAEVLASPYDYILLNPSDVPWLMKKPLQLTVLVPLHEYQERLLQQTALPKEQKELLQKLFLKYDALWQHWENQVGHRRIKPHNIATGTLAPRPQKQYPINPKAKPSIQIVIDDLLKQGVLIQQNSTMNTPVYPVPKPDGKWRMVLDYREVNKTIPLIAAQNQHSAGILSSIYRGKYKTTLDLTNGFWAHPITPESYWLTAFTWQGKQYCWTRLPQGFLNSPALFNADVVDLLKEIPNVQAYVDDIYISHDDPQEHLEQLEKIFSILLNAGYVVSLKKSEIAQREVEFLGFNITKEGRGLTDTFKQKLLNITPPKDLKQLQSILGLLNFARNFIPNYSELVKPLYTIVAPANGKFISWTEDNSNQLQHIISVLNQADNLEERNPETRLIIKVNSSPSAGYIRYYNEGSKRPIMYVNYIFSKAEAKFTQTEKLLTTMHKGLIKAMDLAMGQEILVYSPIVSMTKIQRTPLPERKALPVRWITWMTYLEDPRIQFHYDKSLPELQQIPNVTEDVIAKTKHPSEFAMVFYTDGSAIKHPDVNKSHSAGMGIAQVQFIPEYKIVHQWSIPLGDHTAQLAEIAAVEFACKKALKISGPVLIVTDSFYVAESANKELPYWKSNGFLNNKKKPLRHVSKWKSIAECLQLKPDIIIMHEKGHQQPMTTLHTEGNNLADKLATQGSYVVHAGKRTADGSEFEKRTADGSEFESPKKKAKVE

SEQ ID NO: 6416 - protein, 2185 aa, synthetic construct
MPAAKRVKLDGGDKKYSIGLDIGTNSVGWAVITDEYKVPSKKFKVLGNTDRHSIKKNLIGALLFDSGETAEATRLKRTARRRYTRRKNRICYLQEIFSNEMAKVDDSFFHRLEESFLVEEDKKHERHPIFGNIVDEVAYHEKYPTIYHLRKKLVDSTDKADLRLIYLALAHMIKFRGHFLIEGDLNPDNSDVDKLFIQLVQTYNQLFEENPINASGVDAKAILSARLSKSRRLENLIAQLPGEKKNGLFGNLIALSLGLTPNFKSNFDLAEDAKLQLSKDTYDDDLDNLLAQIGDQYADLFLAAKNLSDAILLSDILRVNTEITKAPLSASMIKRYDEHHQDLTLLKALVRQQLPEKYKEIFFDQSKNGYAGYIDGGASQEEFYKFIKPILEKMDGTEELLVKLNREDLLRKQRTFDNGSIPHQIHLGELHAILRRQEDFYPFLKDNREKIEKILTFRIPYYVGPLARGNSRFAWMTRKSEETITPWNFEEVVDKGASAQSFIERMTNFDKNLPNEKVLPKHSLLYEYFTVYNELTKVKYVTEGMRKPAFLSGEQKKAIVDLLFKTNRKVTVKQLKEDYFKKIECFDSVEISGVEDRFNASLGTYHDLLKIIKDKDFLDNEENEDILEDIVLTLTLFEDREMIEERLKTYAHLFDDKVMKQLKRRRYTGWGRLSRKLINGIRDKQSGKTILDFLKSDGFANRNFMQLIHDDSLTFKEDIQKAQVSGQGDSLHEHIANLAGSPAIKKGILQTVKVVDELVKVMGRHKPENIVIEMARENQTTQKGQKNSRERMKRIEEGIKELGSQILKEHPVENTQLQNEKLYLYYLQNGRDMYVDQELDINRLSDYDVDHIVPQSFLKDDSIDNKVLTRSDKARGKSDNVPSEEVVKKMKNYWRQLLNAKLITQRKFDNLTKAERGGLSELDKAGFIKRQLVETRQITKHVAQILDSRMNTKYDENDKLIREVKVITLKSKLVSDFRKDFQFYKVREINNYHHAHDAYLNAVVGTALIKKYPKLESEFVYGDYKVYDVRKMIAKSEQEIGKATAKYFFYSNIMNFFKTEITLANGEIRKRPLIETNGETGEIVWDKGRDFATVRKVLSMPQVNIVKKTEVQTGGFSKESILPKRNSDKLIARKKDWDPKKYGGFDSPTVAYSVLVVAKVEKGKSKKLKSVKELLGITIMERSSFEKNPIDFLEAKGYKEVKKDLIIKLPKYSLFELENGRKRMLASAGELQKGNELALPSKYVNFLYLASHYEKLKGSPEDNEQKQLFVEQHKHYLDEIIEQISEFSKRVILADANLDKVLSAYNKHRDKPIREQAENIIHLFTLTNLGAPAAFKYFDTTIDRKRYTSTKEVLDATLIHQSITGLYETRIDLSQLGGDGGEAAAKEAAAKEAAAKEAAAKGGMDPLQLLQPLEAEIKGTKLKAHWNSGATITCVPEAFLEDERPIQTMLIKTIHGEKQQDVYYLTFKVQGRKVEAEVLASPYDYILLNPSDVPWLMKKPLQLTVLVPLHEYQERLLQQTALPKEQKELLQKLFLKYDALWQHWENQVGHRRIKPHNIATGTLAPRPQKQYPINPKAKPSIQIVIDDLLKQGVLIQQNSTMNTPVYPVPKPDGKWRMVLDYREVNKTIPLIAAQNQHSAGILSSIYRGKYKTTLDLTNGFWAHPITPESYWLTAFTWQGKQYCWTRLPQGFLNSPALFNADVVDLLKEIPNVQAYVDDIYISHDDPQEHLEQLEKIFSILLNAGYVVSLKKSEIAQREVEFLGFNITKEGRGLTDTFKQKLLNITPPKDLKQLQSILGKLNFARNFIPNYSELVKPLYTIVAPANGKFISWTEDNSNQLQHIISVLNQADNLEERNPETRLIIKVNSSPSAGYIRYYNEGSKRPIMYVNYIFSKAEAKFTQTEKLLTTMHKGLIKAMDLAMGQEILVYSPIVSMTKIQRTPLPERKALPVRWITWMTYLEDPRIQFHYDKSLPELQQIPNVTEDVIAKTKHPSEFAMVFYTDGSAIKHPDVNKSHSAGMGIAQVQFIPEYKIVHQWSIPLGDHTAQLAEIAAVEFACKKALKISGPVLIVTDSFYVAESANKELPYWKSNGFLNNKKKPLRHVSKWKSIAECLQLKPDIIIMHEKGHQQPMTTLHTEGNNLADKLATQGSYVVHAGKRTADGSEFEKRTADGSEFESPKKKAKVE

SEQ ID NO: 6417 - protein, 2185 aa, synthetic construct
MPAAKRVKLDGGDKKYSIGLDIGTNSVGWAVITDEYKVPSKKFKVLGNTDRHSIKKNLIGALLFDSGETAEATRLKRTARRRYTRRKNRICYLQEIFSNEMAKVDDSFFHRLEESFLVEEDKKHERHPIFGNIVDEVAYHEKYPTIYHLRKKLVDSTDKADLRLIYLALAHMIKFRGHFLIEGDLNPDNSDVDKLFIQLVQTYNQLFEENPINASGVDAKAILSARLSKSRRLENLIAQLPGEKKNGLFGNLIALSLGLTPNFKSNFDLAEDAKLQLSKDTYDDDLDNLLAQIGDQYADLFLAAKNLSDAILLSDILRVNTEITKAPLSASMIKRYDEHHQDLTLLKALVRQQLPEKYKEIFFDQSKNGYAGYIDGGASQEEFYKFIKPILEKMDGTEELLVKLNREDLLRKQRTFDNGSIPHQIHLGELHAILRRQEDFYPFLKDNREKIEKILTFRIPYYVGPLARGNSRFAWMTRKSEETITPWNFEEVVDKGASAQSFIERMTNFDKNLPNEKVLPKHSLLYEYFTVYNELTKVKYVTEGMRKPAFLSGEQKKAIVDLLFKTNRKVTVKQLKEDYFKKIECFDSVEISGVEDRFNASLGTYHDLLKIIKDKDFLDNEENEDILEDIVLTLTLFEDREMIEERLKTYAHLFDDKVMKQLKRRRYTGWGRLSRKLINGIRDKQSGKTILDFLKSDGFANRNFMQLIHDDSLTFKEDIQKAQVSGQGDSLHEHIANLAGSPAIKKGILQTVKVVDELVKVMGRHKPENIVIEMARENQTTQKGQKNSRERMKRIEEGIKELGSQILKEHPVENTQLQNEKLYLYYLQNGRDMYVDQELDINRLSDYDVDHIVPQSFLKDDSIDNKVLTRSDKARGKSDNVPSEEVVKKMKNYWRQLLNAKLITQRKFDNLTKAERGGLSELDKAGFIKRQLVETRQITKHVAQILDSRMNTKYDENDKLIREVKVITLKSKLVSDFRKDFQFYKVREINNYHHAHDAYLNAVVGTALIKKYPKLESEFVYGDYKVYDVRKMIAKSEQEIGKATAKYFFYSNIMNFFKTEITLANGEIRKRPLIETNGETGEIVWDKGRDFATVRKVLSMPQVNIVKKTEVQTGGFSKESILPKRNSDKLIARKKDWDPKKYGGFDSPTVAYSVLVVAKVEKGKSKKLKSVKELLGITIMERSSFEKNPIDFLEAKGYKEVKKDLIIKLPKYSLFELENGRKRMLASAGELQKGNELALPSKYVNFLYLASHYEKLKGSPEDNEQKQLFVEQHKHYLDEIIEQISEFSKRVILADANLDKVLSAYNKHRDKPIREQAENIIHLFTLTNLGAPAAFKYFDTTIDRKRYTSTKEVLDATLIHQSITGLYETRIDLSQLGGDGGEAAAKEAAAKEAAAKEAAAKGGMDPLQLLQPLEAEIKGTKLKAHWNSGATITCVPQAFLEEEVPIKNIWIKTIHGEKEQPVYYLTFKIQGRKVEAEVISSPYDYILVSPSDIPWLMKKPLQLTTLVPLQEYEERLLKQTMLTGSYKEKLQSLFLKYDALWQHWENQVGHRRIKPHHIATGTVNPRPQKQYPINPKAKASIQTVINDLLKQGVLIQQNSIMNTPVYPVPKPDGKWRMVLDYREVNKTIPLIAAQNQHSAGILSSIFRGKYKTTLDLSNGFWAHSITPESYWLTAFTWLGQQYCWTRLPQGFLNSPALFNADVVDLLKEVPNVQVYVDDIYISHDDPREHLEQLEKVFSLLLNAGYVVSLKKSEIAQHEVEFLGFNITKEGRGLTETFKQKLLNITPPRDLKQLQSILGLLNFARNFIPNFSELVKPLYNIIATAPGKYITWTTDNSQQLQNIISMLNSAENLEERNPEVRLIMKVNTSPSAGYIRFYNEFAKRPIMYLNYVYTKAEVKFTNTEKLLTTIHKGLIKALDLGMGQEILVYSPIVSMTKIQKTPLPERKALPIRWITWMSYLEDPRIQFHYDKTLPELQQVPTVTDDIIAKIKHPSEFSMVFYTDGSAIKHPNVNKSHNAGMGIAQVQFKPEFTVINTWSIPLGDHTAQLAEVAAVEFACKKALKIDGPVLIVTDSFYVAESVNKELPYWQSNGFFNNKKKPLKHVSKWKSIADCIQLKPDIIIIHEKGHQPTASTFHTEGNNLADKLATQGSYVVNAGKRTADGSEFEKRTADGSEFESPKKKAKVE

SEQ ID NO: 6418 - protein, 2185 aa, synthetic construct
MPAAKRVKLDGGDKKYSIGLDIGTNSVGWAVITDEYKVPSKKFKVLGNTDRHSIKKNLIGALLFDSGETAEATRLKRTARRRYTRRKNRICYLQEIFSNEMAKVDDSFFHRLEESFLVEEDKKHERHPIFGNIVDEVAYHEKYPTIYHLRKKLVDSTDKADLRLIYLALAHMIKFRGHFLIEGDLNPDNSDVDKLFIQLVQTYNQLFEENPINASGVDAKAILSARLSKSRRLENLIAQLPGEKKNGLFGNLIALSLGLTPNFKSNFDLAEDAKLQLSKDTYDDDLDNLLAQIGDQYADLFLAAKNLSDAILLSDILRVNTEITKAPLSASMIKRYDEHHQDLTLLKALVRQQLPEKYKEIFFDQSKNGYAGYIDGGASQEEFYKFIKPILEKMDGTEELLVKLNREDLLRKQRTFDNGSIPHQIHLGELHAILRRQEDFYPFLKDNREKIEKILTFRIPYYVGPLARGNSRFAWMTRKSEETITPWNFEEVVDKGASAQSFIERMTNFDKNLPNEKVLPKHSLLYEYFTVYNELTKVKYVTEGMRKPAFLSGEQKKAIVDLLFKTNRKVTVKQLKEDYFKKIECFDSVEISGVEDRFNASLGTYHDLLKIIKDKDFLDNEENEDILEDIVLTLTLFEDREMIEERLKTYAHLFDDKVMKQLKRRRYTGWGRLSRKLINGIRDKQSGKTILDFLKSDGFANRNFMQLIHDDSLTFKEDIQKAQVSGQGDSLHEHIANLAGSPAIKKGILQTVKVVDELVKVMGRHKPENIVIEMARENQTTQKGQKNSRERMKRIEEGIKELGSQILKEHPVENTQLQNEKLYLYYLQNGRDMYVDQELDINRLSDYDVDHIVPQSFLKDDSIDNKVLTRSDKARGKSDNVPSEEVVKKMKNYWRQLLNAKLITQRKFDNLTKAERGGLSELDKAGFIKRQLVETRQITKHVAQILDSRMNTKYDENDKLIREVKVITLKSKLVSDFRKDFQFYKVREINNYHHAHDAYLNAVVGTALIKKYPKLESEFVYGDYKVYDVRKMIAKSEQEIGKATAKYFFYSNIMNFFKTEITLANGEIRKRPLIETNGETGEIVWDKGRDFATVRKVLSMPQVNIVKKTEVQTGGFSKESILPKRNSDKLIARKKDWDPKKYGGFDSPTVAYSVLVVAKVEKGKSKKLKSVKELLGITIMERSSFEKNPIDFLEAKGYKEVKKDLIIKLPKYSLFELENGRKRMLASAGELQKGNELALPSKYVNFLYLASHYEKLKGSPEDNEQKQLFVEQHKHYLDEIIEQISEFSKRVILADANLDKVLSAYNKHRDKPIREQAENIIHLFTLTNLGAPAAFKYFDTTIDRKRYTSTKEVLDATLIHQSITGLYETRIDLSQLGGDGGEAAAKEAAAKEAAAKEAAAKGGMDPLQLLQPLEAEIKGTKLKAHWNSGATITCVPQAFLEEEVPIKNIWIKTIHGEKEQPVYYLTFKIQGRKVEAEVISSPYDYILVSPSDIPWLMKKPLQLTTLVPLQEYEERLLKQTMLTGSYKEKLQSLFLKYDALWQHWENQVGHRRIKPHHIATGTVNPRPQKQYPINPKAKASIQTVINDLLKQGVLIQQNSIMNTPVYPVPKPDGKWRMVLDYREVNKTIPLIAAQNQHSAGILSSIFRGKYKTTLDLSNGFWAHSITPESYWLTAFTWLGQQYCWTRLPQGFLNSPALFNADVVDLLKEVPNVQVYVDDIYISHDDPREHLEQLEKVFSLLLNAGYVVSLKKSEIAQHEVEFLGFNITKEGRGLTETFKQKLLNITPPRDLKQLQSILGKLNFARNFIPNFSELVKPLYNIIATAPGKYITWTTDNSQQLQNIISMLNSAENLEERNPEVRLIMKVNTSPSAGYIRFYNEFAKRPIMYLNYVYTKAEVKFTNTEKLLTTIHKGLIKALDLGMGQEILVYSPIVSMTKIQKTPLPERKALPIRWITWMSYLEDPRIQFHYDKTLPELQQVPTVTDDIIAKIKHPSEFSMVFYTDGSAIKHPNVNKSHNAGMGIAQVQFKPEFTVINTWSIPLGDHTAQLAEVAAVEFACKKALKIDGPVLIVTDSFYVAESVNKELPYWQSNGFFNNKKKPLKHVSKWKSIADCIQLKPDIIIIHEKGHQPTASTFHTEGNNLADKLATQGSYVVNAGKRTADGSEFEKRTADGSEFESPKKKAKVE

SEQ ID NO: 6419 - protein, 2105 aa, synthetic construct
MPAAKRVKLDGGDKKYSIGLDIGTNSVGWAVITDEYKVPSKKFKVLGNTDRHSIKKNLIGALLFDSGETAEATRLKRTARRRYTRRKNRICYLQEIFSNEMAKVDDSFFHRLEESFLVEEDKKHERHPIFGNIVDEVAYHEKYPTIYHLRKKLVDSTDKADLRLIYLALAHMIKFRGHFLIEGDLNPDNSDVDKLFIQLVQTYNQLFEENPINASGVDAKAILSARLSKSRRLENLIAQLPGEKKNGLFGNLIALSLGLTPNFKSNFDLAEDAKLQLSKDTYDDDLDNLLAQIGDQYADLFLAAKNLSDAILLSDILRVNTEITKAPLSASMIKRYDEHHQDLTLLKALVRQQLPEKYKEIFFDQSKNGYAGYIDGGASQEEFYKFIKPILEKMDGTEELLVKLNREDLLRKQRTFDNGSIPHQIHLGELHAILRRQEDFYPFLKDNREKIEKILTFRIPYYVGPLARGNSRFAWMTRKSEETITPWNFEEVVDKGASAQSFIERMTNFDKNLPNEKVLPKHSLLYEYFTVYNELTKVKYVTEGMRKPAFLSGEQKKAIVDLLFKTNRKVTVKQLKEDYFKKIECFDSVEISGVEDRFNASLGTYHDLLKIIKDKDFLDNEENEDILEDIVLTLTLFEDREMIEERLKTYAHLFDDKVMKQLKRRRYTGWGRLSRKLINGIRDKQSGKTILDFLKSDGFANRNFMQLIHDDSLTFKEDIQKAQVSGQGDSLHEHIANLAGSPAIKKGILQTVKVVDELVKVMGRHKPENIVIEMARENQTTQKGQKNSRERMKRIEEGIKELGSQILKEHPVENTQLQNEKLYLYYLQNGRDMYVDQELDINRLSDYDVDHIVPQSFLKDDSIDNKVLTRSDKARGKSDNVPSEEVVKKMKNYWRQLLNAKLITQRKFDNLTKAERGGLSELDKAGFIKRQLVETRQITKHVAQILDSRMNTKYDENDKLIREVKVITLKSKLVSDFRKDFQFYKVREINNYHHAHDAYLNAVVGTALIKKYPKLESEFVYGDYKVYDVRKMIAKSEQEIGKATAKYFFYSNIMNFFKTEITLANGEIRKRPLIETNGETGEIVWDKGRDFATVRKVLSMPQVNIVKKTEVQTGGFSKESILPKRNSDKLIARKKDWDPKKYGGFDSPTVAYSVLVVAKVEKGKSKKLKSVKELLGITIMERSSFEKNPIDFLEAKGYKEVKKDLIIKLPKYSLFELENGRKRMLASAGELQKGNELALPSKYVNFLYLASHYEKLKGSPEDNEQKQLFVEQHKHYLDEIIEQISEFSKRVILADANLDKVLSAYNKHRDKPIREQAENIIHLFTLTNLGAPAAFKYFDTTIDRKRYTSTKEVLDATLIHQSITGLYETRIDLSQLGGDGGEAAAKEAAAKEAAAKEAAAKGGTLNIEDEYRLHETSKEPDVPLGSTWLSDFPQAWAETGGMGLAVRQAPLIIPLKATSTPVSIKQYPMSQEARLGIKPHIQRLLDQGILVPCQSPWNTPLLPVKKPGTNDYRPVQDLREVNKRVEDIHPTVPNPYNLLSGLPPSHQWYTVLDLKDAFFCLRLHPTSQPLFAFEWRDPEMGISGQLTWTRLPQGFKNSPTLFDEALHRDLADFRIQHPDLILLQYVDDLLLAATSEQDCQRGTRALLQTLGNLGYRASAKKAQICQKQVKYLGYLLKEGQRWLTEARKETVMGQPTPKTPRQLREFLGTAGFCRLWIPGFAEMAAPLYPLTKTGTLFNWGPDQQKAYQEIKQALLTAPALGLPDLTKPFELFVDEKQGYAKGVLTQKLGPWRRPVAYLSKKLDPVAAGWPPCLRMVAAIAVLTKDAGKLTMGQPLVILAPHAVEALVKQPPDRWLSNARMTHYQAMLLDTDRVQFGPVVALNPATLLPLPEKEAPHDCLEILAETHGTRPDLTDQPIPDADYTWYTDGSSFLQEGQRRAGAAVTTETEVIWARALPAGTSAQRAELIALTQALKMAEGKKLNVYTDSRYAFATAHVHGEIYRRRGLLTSEGREIKNKNEILALLKALFLPKRLSIIHCPGHQKGNSAEARGNRMADQAAREAAMKAVLETSTLLAGKRTADGSEFEKRTADGSEFESPKKKAKVE

SEQ ID NO: 6420 - protein, 2112 aa, synthetic construct
MPAAKRVKLDGGDKKYSIGLDIGTNSVGWAVITDEYKVPSKKFKVLGNTDRHSIKKNLIGALLFDSGETAEATRLKRTARRRYTRRKNRICYLQEIFSNEMAKVDDSFFHRLEESFLVEEDKKHERHPIFGNIVDEVAYHEKYPTIYHLRKKLVDSTDKADLRLIYLALAHMIKFRGHFLIEGDLNPDNSDVDKLFIQLVQTYNQLFEENPINASGVDAKAILSARLSKSRRLENLIAQLPGEKKNGLFGNLIALSLGLTPNFKSNFDLAEDAKLQLSKDTYDDDLDNLLAQIGDQYADLFLAAKNLSDAILLSDILRVNTEITKAPLSASMIKRYDEHHQDLTLLKALVRQQLPEKYKEIFFDQSKNGYAGYIDGGASQEEFYKFIKPILEKMDGTEELLVKLNREDLLRKQRTFDNGSIPHQIHLGELHAILRRQEDFYPFLKDNREKIEKILTFRIPYYVGPLARGNSRFAWMTRKSEETITPWNFEEVVDKGASAQSFIERMTNFDKNLPNEKVLPKHSLLYEYFTVYNELTKVKYVTEGMRKPAFLSGEQKKAIVDLLFKTNRKVTVKQLKEDYFKKIECFDSVEISGVEDRFNASLGTYHDLLKIIKDKDFLDNEENEDILEDIVLTLTLFEDREMIEERLKTYAHLFDDKVMKQLKRRRYTGWGRLSRKLINGIRDKQSGKTILDFLKSDGFANRNFMQLIHDDSLTFKEDIQKAQVSGQGDSLHEHIANLAGSPAIKKGILQTVKVVDELVKVMGRHKPENIVIEMARENQTTQKGQKNSRERMKRIEEGIKELGSQILKEHPVENTQLQNEKLYLYYLQNGRDMYVDQELDINRLSDYDVDHIVPQSFLKDDSIDNKVLTRSDKARGKSDNVPSEEVVKKMKNYWRQLLNAKLITQRKFDNLTKAERGGLSELDKAGFIKRQLVETRQITKHVAQILDSRMNTKYDENDKLIREVKVITLKSKLVSDFRKDFQFYKVREINNYHHAHDAYLNAVVGTALIKKYPKLESEFVYGDYKVYDVRKMIAKSEQEIGKATAKYFFYSNIMNFFKTEITLANGEIRKRPLIETNGETGEIVWDKGRDFATVRKVLSMPQVNIVKKTEVQTGGFSKESILPKRNSDKLIARKKDWDPKKYGGFDSPTVAYSVLVVAKVEKGKSKKLKSVKELLGITIMERSSFEKNPIDFLEAKGYKEVKKDLIIKLPKYSLFELENGRKRMLASAGELQKGNELALPSKYVNFLYLASHYEKLKGSPEDNEQKQLFVEQHKHYLDEIIEQISEFSKRVILADANLDKVLSAYNKHRDKPIREQAENIIHLFTLTNLGAPAAFKYFDTTIDRKRYTSTKEVLDATLIHQSITGLYETRIDLSQLGGDGGEAAAKEAAAKEAAAKEAAAKEAAAKGGTAPLEEEYRLFLEAPIQNVTLLEQWKREIPKVWAEINPPGLASTQAPIHVQLLSTALPVRVRQYPITLEAKRSLRETIRKFRAAGILRPVHSPWNTPLLPVRKSGTSEYRMVQDLREVNKRVETIHPTVPNPYTLLSLLPPDRIWYSVLDLKDAFFCIPLAPESQLIFAFEWADAEEGESGQLTWTRLPQGFKNSPTLFDEALNRDLQGFRLDHPSVSLLQYVDDLLIAADTQAACLSATRDLLMTLAELGYRVSGKKAQLCQEEVTYLGFKIHKGSRSLSNSRTQAILQIPVPKTKRQVREFLGTIGYCRLWIPGFAELAQPLYAATRGGNDPLVWGEKEEEAFQSLKLALTQPPALALPSLDKPFQLFVEETSGAAKGVLTQALGPWKRPVAYLSKRLDPVAAGWPRCLRAIAAAALLTREASKLTFGQDIEITSSHNLESLLRSPPDKWLTNARITQYQVLLLDPPRVRFKQTAALNPATLLPETDDTLPIHHCLDTLDSLTSTRPDLTDQPLAQAEATLFTDGSSYIRDGKRYAGAAVVTLDSVIWAEPLPIGTSAQKAELIALTKALEWSKDKSVNIYTDSRYAFATLHVHGMIYRERGLLTAGGKAIKNAPEILALLTAVWLPKRVAVMHCKGHQKDDAPTSTGNRRADEVAREVAIRPLSTQATISAGKRTADGSEFEKRTADGSEFESPKKKAKVE

SEQ ID NO: 6421 - protein, 2112 aa, synthetic construct
MPAAKRVKLDGGDKKYSIGLDIGTNSVGWAVITDEYKVPSKKFKVLGNTDRHSIKKNLIGALLFDSGETAEATRLKRTARRRYTRRKNRICYLQEIFSNEMAKVDDSFFHRLEESFLVEEDKKHERHPIFGNIVDEVAYHEKYPTIYHLRKKLVDSTDKADLRLIYLALAHMIKFRGHFLIEGDLNPDNSDVDKLFIQLVQTYNQLFEENPINASGVDAKAILSARLSKSRRLENLIAQLPGEKKNGLFGNLIALSLGLTPNFKSNFDLAEDAKLQLSKDTYDDDLDNLLAQIGDQYADLFLAAKNLSDAILLSDILRVNTEITKAPLSASMIKRYDEHHQDLTLLKALVRQQLPEKYKEIFFDQSKNGYAGYIDGGASQEEFYKFIKPILEKMDGTEELLVKLNREDLLRKQRTFDNGSIPHQIHLGELHAILRRQEDFYPFLKDNREKIEKILTFRIPYYVGPLARGNSRFAWMTRKSEETITPWNFEEVVDKGASAQSFIERMTNFDKNLPNEKVLPKHSLLYEYFTVYNELTKVKYVTEGMRKPAFLSGEQKKAIVDLLFKTNRKVTVKQLKEDYFKKIECFDSVEISGVEDRFNASLGTYHDLLKIIKDKDFLDNEENEDILEDIVLTLTLFEDREMIEERLKTYAHLFDDKVMKQLKRRRYTGWGRLSRKLINGIRDKQSGKTILDFLKSDGFANRNFMQLIHDDSLTFKEDIQKAQVSGQGDSLHEHIANLAGSPAIKKGILQTVKVVDELVKVMGRHKPENIVIEMARENQTTQKGQKNSRERMKRIEEGIKELGSQILKEHPVENTQLQNEKLYLYYLQNGRDMYVDQELDINRLSDYDVDHIVPQSFLKDDSIDNKVLTRSDKARGKSDNVPSEEVVKKMKNYWRQLLNAKLITQRKFDNLTKAERGGLSELDKAGFIKRQLVETRQITKHVAQILDSRMNTKYDENDKLIREVKVITLKSKLVSDFRKDFQFYKVREINNYHHAHDAYLNAVVGTALIKKYPKLESEFVYGDYKVYDVRKMIAKSEQEIGKATAKYFFYSNIMNFFKTEITLANGEIRKRPLIETNGETGEIVWDKGRDFATVRKVLSMPQVNIVKKTEVQTGGFSKESILPKRNSDKLIARKKDWDPKKYGGFDSPTVAYSVLVVAKVEKGKSKKLKSVKELLGITIMERSSFEKNPIDFLEAKGYKEVKKDLIIKLPKYSLFELENGRKRMLASAGELQKGNELALPSKYVNFLYLASHYEKLKGSPEDNEQKQLFVEQHKHYLDEIIEQISEFSKRVILADANLDKVLSAYNKHRDKPIREQAENIIHLFTLTNLGAPAAFKYFDTTIDRKRYTSTKEVLDATLIHQSITGLYETRIDLSQLGGDGGEAAAKEAAAKEAAAKEAAAKEAAAKGGTAPLEEEYRLFLEAPIQNVTLLEQWKREIPKVWAEINPPGLASTQAPIHVQLLSTALPVRVRQYPITLEAKRSLRETIRKFRAAGILRPVHSPWNTPLLPVRKSGTSEYRMVQDLREVNKRVETIHPTVPNPYTLLSLLPPDRIWYSVLDLKDAFFCIPLAPESQLIFAFEWADAEEGESGQLTWTRLPQGFKNSPTLFNEALNRDLQGFRLDHPSVSLLQYVDDLLIAADTQAACLSATRDLLMTLAELGYRVSGKKAQLCQEEVTYLGFKIHKGSRSLSNSRTQAILQIPVPKTKRQVREFLGTIGYCRLWIPGFAELAQPLYAATRPGNDPLVWGEKEEEAFQSLKLALTQPPALALPSLDKPFQLFVEETSGAAKGVLTQALGPWKRPVAYLSKRLDPVAAGWPRCLRAIAAAALLTREASKLTFGQDIEITSSHNLESLLRSPPDKWLTNARITQYQVLLLDPPRVRFKQTAALNPATLLPETDDTLPIHHCLDTLDSLTSTRPDLTDQPLAQAEATLFTDGSSYIRDGKRYAGAAVVTLDSVIWAEPLPIGTSAQKAELIALTKALEWSKDKSVNIYTDSRYAFATLHVHGMIYRERGWLTAGGKAIKNAPEILALLTAVWLPKRVAVMHCKGHQKDDAPTSTGNRRADEVAREVAIRPLSTQATISAGKRTADGSEFEKRTADGSEFESPKKKAKVE

SEQ ID NO: 6422 - protein, 2187 aa, synthetic construct
MPAAKRVKLDGGDKKYSIGLDIGTNSVGWAVITDEYKVPSKKFKVLGNTDRHSIKKNLIGALLFDSGETAEATRLKRTARRRYTRRKNRICYLQEIFSNEMAKVDDSFFHRLEESFLVEEDKKHERHPIFGNIVDEVAYHEKYPTIYHLRKKLVDSTDKADLRLIYLALAHMIKFRGHFLIEGDLNPDNSDVDKLFIQLVQTYNQLFEENPINASGVDAKAILSARLSKSRRLENLIAQLPGEKKNGLFGNLIALSLGLTPNFKSNFDLAEDAKLQLSKDTYDDDLDNLLAQIGDQYADLFLAAKNLSDAILLSDILRVNTEITKAPLSASMIKRYDEHHQDLTLLKALVRQQLPEKYKEIFFDQSKNGYAGYIDGGASQEEFYKFIKPILEKMDGTEELLVKLNREDLLRKQRTFDNGSIPHQIHLGELHAILRRQEDFYPFLKDNREKIEKILTFRIPYYVGPLARGNSRFAWMTRKSEETITPWNFEEVVDKGASAQSFIERMTNFDKNLPNEKVLPKHSLLYEYFTVYNELTKVKYVTEGMRKPAFLSGEQKKAIVDLLFKTNRKVTVKQLKEDYFKKIECFDSVEISGVEDRFNASLGTYHDLLKIIKDKDFLDNEENEDILEDIVLTLTLFEDREMIEERLKTYAHLFDDKVMKQLKRRRYTGWGRLSRKLINGIRDKQSGKTILDFLKSDGFANRNFMQLIHDDSLTFKEDIQKAQVSGQGDSLHEHIANLAGSPAIKKGILQTVKVVDELVKVMGRHKPENIVIEMARENQTTQKGQKNSRERMKRIEEGIKELGSQILKEHPVENTQLQNEKLYLYYLQNGRDMYVDQELDINRLSDYDVDHIVPQSFLKDDSIDNKVLTRSDKARGKSDNVPSEEVVKKMKNYWRQLLNAKLITQRKFDNLTKAERGGLSELDKAGFIKRQLVETRQITKHVAQILDSRMNTKYDENDKLIREVKVITLKSKLVSDFRKDFQFYKVREINNYHHAHDAYLNAVVGTALIKKYPKLESEFVYGDYKVYDVRKMIAKSEQEIGKATAKYFFYSNIMNFFKTEITLANGEIRKRPLIETNGETGEIVWDKGRDFATVRKVLSMPQVNIVKKTEVQTGGFSKESILPKRNSDKLIARKKDWDPKKYGGFDSPTVAYSVLVVAKVEKGKSKKLKSVKELLGITIMERSSFEKNPIDFLEAKGYKEVKKDLIIKLPKYSLFELENGRKRMLASAGELQKGNELALPSKYVNFLYLASHYEKLKGSPEDNEQKQLFVEQHKHYLDEIIEQISEFSKRVILADANLDKVLSAYNKHRDKPIREQAENIIHLFTLTNLGAPAAFKYFDTTIDRKRYTSTKEVLDATLIHQSITGLYETRIDLSQLGGDGGEAAAKEAAAKEAAAKEAAAKEAAAKGGMDLLKPLTVERKGVKIKGYWNSQADITCVPKDLLQGEEPVRQQNVTTIHGTQEGDVYYVNLKIDGRRINTEVIGTTLDYAIITPGDVPWILKKPLELTIKLDLEEQQGTLLNNSILSKKGKEELKQLFEKYSALWQSWENQVGHRRIRPHKIATGTVKPTPQKQYHINPKAKPDIQIVINDLLKQGVLIQKESTMNTPVYPVPKPNGRWRMVLDYRAVNKVTPLIAVQNQHSYGILGSLFKGRYKTTIDLSNGFWAHPIVPEDYWITAFTWQGKQYCWTVLPQGFLNSPGLFTGDVVDLLQGIPNVEVYVDDVYISHDSEKEHLEYLDILFNRLKEAGYIISLKKSNIANSIVDFLGFQITNEGRGLTDTFKEKLENITAPTTLKQLQSILGLLNFARNFIPDFTELIAPLYALIPKSTKNYVPWQIEHSTTLETLITKLNGAEYLQGRKGDKTLIMKVNASYTTGYIRYYNEGEKKPISYVSIVFSKTELKFTELEKLLTTVHKGLLKALDLSMGQNIHVYSPIVSMQNIQKTPQTAKKALASRWLSWLSYLEDPRIRFFYDPQMPALKDLPAVDTGKDNKKHPSNFQHIFYTDGSAITSPTKEGHLNAGMGIVYFINKDGNLQKQQEWSISLGNHTAQFAEIAAFEFALKKCLPLGGNILVVTDSNYVAKAYNEELDVWASNGFVNNRKKPLKHISKWKSVADLKRLRPDVVVTHEPGHQKLDSSPHAYGNNLADQLATQASFKVHAGKRTADGSEFEKRTADGSEFESPKKKAKVE

SEQ ID NO: 6423 - protein, 2101 aa, synthetic construct
MPAAKRVKLDGGDKKYSIGLDIGTNSVGWAVITDEYKVPSKKFKVLGNTDRHSIKKNLIGALLFDSGETAEATRLKRTARRRYTRRKNRICYLQEIFSNEMAKVDDSFFHRLEESFLVEEDKKHERHPIFGNIVDEVAYHEKYPTIYHLRKKLVDSTDKADLRLIYLALAHMIKFRGHFLIEGDLNPDNSDVDKLFIQLVQTYNQLFEENPINASGVDAKAILSARLSKSRRLENLIAQLPGEKKNGLFGNLIALSLGLTPNFKSNFDLAEDAKLQLSKDTYDDDLDNLLAQIGDQYADLFLAAKNLSDAILLSDILRVNTEITKAPLSASMIKRYDEHHQDLTLLKALVRQQLPEKYKEIFFDQSKNGYAGYIDGGASQEEFYKFIKPILEKMDGTEELLVKLNREDLLRKQRTFDNGSIPHQIHLGELHAILRRQEDFYPFLKDNREKIEKILTFRIPYYVGPLARGNSRFAWMTRKSEETITPWNFEEVVDKGASAQSFIERMTNFDKNLPNEKVLPKHSLLYEYFTVYNELTKVKYVTEGMRKPAFLSGEQKKAIVDLLFKTNRKVTVKQLKEDYFKKIECFDSVEISGVEDRFNASLGTYHDLLKIIKDKDFLDNEENEDILEDIVLTLTLFEDREMIEERLKTYAHLFDDKVMKQLKRRRYTGWGRLSRKLINGIRDKQSGKTILDFLKSDGFANRNFMQLIHDDSLTFKEDIQKAQVSGQGDSLHEHIANLAGSPAIKKGILQTVKVVDELVKVMGRHKPENIVIEMARENQTTQKGQKNSRERMKRIEEGIKELGSQILKEHPVENTQLQNEKLYLYYLQNGRDMYVDQELDINRLSDYDVDHIVPQSFLKDDSIDNKVLTRSDKARGKSDNVPSEEVVKKMKNYWRQLLNAKLITQRKFDNLTKAERGGLSELDKAGFIKRQLVETRQITKHVAQILDSRMNTKYDENDKLIREVKVITLKSKLVSDFRKDFQFYKVREINNYHHAHDAYLNAVVGTALIKKYPKLESEFVYGDYKVYDVRKMIAKSEQEIGKATAKYFFYSNIMNFFKTEITLANGEIRKRPLIETNGETGEIVWDKGRDFATVRKVLSMPQVNIVKKTEVQTGGFSKESILPKRNSDKLIARKKDWDPKKYGGFDSPTVAYSVLVVAKVEKGKSKKLKSVKELLGITIMERSSFEKNPIDFLEAKGYKEVKKDLIIKLPKYSLFELENGRKRMLASAGELQKGNELALPSKYVNFLYLASHYEKLKGSPEDNEQKQLFVEQHKHYLDEIIEQISEFSKRVILADANLDKVLSAYNKHRDKPIREQAENIIHLFTLTNLGAPAAFKYFDTTIDRKRYTSTKEVLDATLIHQSITGLYETRIDLSQLGGDGGEAAAKEAAAKEAAAKEAAAKEAAAKGGVPWILKKPLELTIKLDLEEQQGTLLNNSILSKKGKEELKQLFEKYSALWQSWENQVGHRRIRPHKIATGTVKPTPQKQYHINPKAKPDIQIVINDLLKQGVLIQKESTMNTPVYPVPKPNGRWRMVLDYRAVNKVTPLIAVQNQHSYGILGSLFKGRYKTTIDLSNGFWAHPIVPEDYWITAFTWQGKQYCWTVLPQGFLNSPGLFTGDVVDLLQGIPNVEVYVDDVYISHDSEKEHLEYLDILFNRLKEAGYIISLKKSNIANSIVDFLGFQITNEGRGLTDTFKEKLENITAPTTLKQLQSILGLLNFARNFIPDFTELIAPLYALIPKSTKNYVPWQIEHSTTLETLITKLNGAEYLQGRKGDKTLIMKVNASYTTGYIRYYNEGEKKPISYVSIVFSKTELKFTELEKLLTTVHKGLLKALDLSMGQNIHVYSPIVSMQNIQKTPQTAKKALASRWLSWLSYLEDPRIRFFYDPQMPALKDLPAVDTGKDNKKHPSNFQHIFYTDGSAITSPTKEGHLNAGMGIVYFINKDGNLQKQQEWSISLGNHTAQFAEIAAFEFALKKCLPLGGNILVVTDSNYVAKAYNEELDVWASNGFVNNRKKPLKHISKWKSVADLKRLRPDVVVTHEPGHQKLDSSPHAYGNNLADQLATQASFKVHAGKRTADGSEFEKRTADGSEFESPKKKAKVE

SEQ ID NO: 6424 - protein, 2101 aa, synthetic construct
MPAAKRVKLDGGDKKYSIGLDIGTNSVGWAVITDEYKVPSKKFKVLGNTDRHSIKKNLIGALLFDSGETAEATRLKRTARRRYTRRKNRICYLQEIFSNEMAKVDDSFFHRLEESFLVEEDKKHERHPIFGNIVDEVAYHEKYPTIYHLRKKLVDSTDKADLRLIYLALAHMIKFRGHFLIEGDLNPDNSDVDKLFIQLVQTYNQLFEENPINASGVDAKAILSARLSKSRRLENLIAQLPGEKKNGLFGNLIALSLGLTPNFKSNFDLAEDAKLQLSKDTYDDDLDNLLAQIGDQYADLFLAAKNLSDAILLSDILRVNTEITKAPLSASMIKRYDEHHQDLTLLKALVRQQLPEKYKEIFFDQSKNGYAGYIDGGASQEEFYKFIKPILEKMDGTEELLVKLNREDLLRKQRTFDNGSIPHQIHLGELHAILRRQEDFYPFLKDNREKIEKILTFRIPYYVGPLARGNSRFAWMTRKSEETITPWNFEEVVDKGASAQSFIERMTNFDKNLPNEKVLPKHSLLYEYFTVYNELTKVKYVTEGMRKPAFLSGEQKKAIVDLLFKTNRKVTVKQLKEDYFKKIECFDSVEISGVEDRFNASLGTYHDLLKIIKDKDFLDNEENEDILEDIVLTLTLFEDREMIEERLKTYAHLFDDKVMKQLKRRRYTGWGRLSRKLINGIRDKQSGKTILDFLKSDGFANRNFMQLIHDDSLTFKEDIQKAQVSGQGDSLHEHIANLAGSPAIKKGILQTVKVVDELVKVMGRHKPENIVIEMARENQTTQKGQKNSRERMKRIEEGIKELGSQILKEHPVENTQLQNEKLYLYYLQNGRDMYVDQELDINRLSDYDVDHIVPQSFLKDDSIDNKVLTRSDKARGKSDNVPSEEVVKKMKNYWRQLLNAKLITQRKFDNLTKAERGGLSELDKAGFIKRQLVETRQITKHVAQILDSRMNTKYDENDKLIREVKVITLKSKLVSDFRKDFQFYKVREINNYHHAHDAYLNAVVGTALIKKYPKLESEFVYGDYKVYDVRKMIAKSEQEIGKATAKYFFYSNIMNFFKTEITLANGEIRKRPLIETNGETGEIVWDKGRDFATVRKVLSMPQVNIVKKTEVQTGGFSKESILPKRNSDKLIARKKDWDPKKYGGFDSPTVAYSVLVVAKVEKGKSKKLKSVKELLGITIMERSSFEKNPIDFLEAKGYKEVKKDLIIKLPKYSLFELENGRKRMLASAGELQKGNELALPSKYVNFLYLASHYEKLKGSPEDNEQKQLFVEQHKHYLDEIIEQISEFSKRVILADANLDKVLSAYNKHRDKPIREQAENIIHLFTLTNLGAPAAFKYFDTTIDRKRYTSTKEVLDATLIHQSITGLYETRIDLSQLGGDGGEAAAKEAAAKEAAAKEAAAKEAAAKGGVPWILKKPLELTIKLDLEEQQGTLLNNSILSKKGKEELKQLFEKYSALWQSWENQVGHRRIRPHKIATGTVKPTPQKQYHINPKAKPDIQIVINDLLKQGVLIQKESTMNTPVYPVPKPNGRWRMVLDYRAVNKVTPLIAVQNQHSYGILGSLFKGRYKTTIDLSNGFWAHPIVPEDYWITAFTWQGKQYCWTVLPQGFLNSPGLFNGDVVDLLQGIPNVEVYVDDVYISHDSEKEHLEYLDILFNRLKEAGYIISLKKSNIANSIVDFLGFQITNEGRGLTDTFKEKLENITAPTTLKQLQSILGLLNFARNFIPDFTELIAPLYALIPKSPKNYVPWQIEHSTTLETLITKLNGAEYLQGRKGDKTLIMKVNASYTTGYIRYYNEGEKKPISYVSIVFSKTELKFTELEKLLTTVHKGLLKALDLSMGQNIHVYSPIVSMQNIQKTPQTAKKALASRWLSWLSYLEDPRIRFFYDPQMPALKDLPAVDTGKDNKKHPSNFQHIFYTDGSAITSPTKEGHLNAGMGIVYFINKDGNLQKQQEWSISLGNHTAQFAEIAAFEFALKKCLPLGGNILVVTDSNYVAKAYNEELDVWASNGFVNNRKKPLKHISKWKSVADLKRLRPDVVVTHEPGHQKLDSSPHAYGNNLADQLATQASFKVHAGKRTADGSEFEKRTADGSEFESPKKKAKVE

SEQ ID NO: 6425 - protein, 2109 aa, synthetic construct
MPAAKRVKLDGGDKKYSIGLDIGTNSVGWAVITDEYKVPSKKFKVLGNTDRHSIKKNLIGALLFDSGETAEATRLKRTARRRYTRRKNRICYLQEIFSNEMAKVDDSFFHRLEESFLVEEDKKHERHPIFGNIVDEVAYHEKYPTIYHLRKKLVDSTDKADLRLIYLALAHMIKFRGHFLIEGDLNPDNSDVDKLFIQLVQTYNQLFEENPINASGVDAKAILSARLSKSRRLENLIAQLPGEKKNGLFGNLIALSLGLTPNFKSNFDLAEDAKLQLSKDTYDDDLDNLLAQIGDQYADLFLAAKNLSDAILLSDILRVNTEITKAPLSASMIKRYDEHHQDLTLLKALVRQQLPEKYKEIFFDQSKNGYAGYIDGGASQEEFYKFIKPILEKMDGTEELLVKLNREDLLRKQRTFDNGSIPHQIHLGELHAILRRQEDFYPFLKDNREKIEKILTFRIPYYVGPLARGNSRFAWMTRKSEETITPWNFEEVVDKGASAQSFIERMTNFDKNLPNEKVLPKHSLLYEYFTVYNELTKVKYVTEGMRKPAFLSGEQKKAIVDLLFKTNRKVTVKQLKEDYFKKIECFDSVEISGVEDRFNASLGTYHDLLKIIKDKDFLDNEENEDILEDIVLTLTLFEDREMIEERLKTYAHLFDDKVMKQLKRRRYTGWGRLSRKLINGIRDKQSGKTILDFLKSDGFANRNFMQLIHDDSLTFKEDIQKAQVSGQGDSLHEHIANLAGSPAIKKGILQTVKVVDELVKVMGRHKPENIVIEMARENQTTQKGQKNSRERMKRIEEGIKELGSQILKEHPVENTQLQNEKLYLYYLQNGRDMYVDQELDINRLSDYDVDHIVPQSFLKDDSIDNKVLTRSDKARGKSDNVPSEEVVKKMKNYWRQLLNAKLITQRKFDNLTKAERGGLSELDKAGFIKRQLVETRQITKHVAQILDSRMNTKYDENDKLIREVKVITLKSKLVSDFRKDFQFYKVREINNYHHAHDAYLNAVVGTALIKKYPKLESEFVYGDYKVYDVRKMIAKSEQEIGKATAKYFFYSNIMNFFKTEITLANGEIRKRPLIETNGETGEIVWDKGRDFATVRKVLSMPQVNIVKKTEVQTGGFSKESILPKRNSDKLIARKKDWDPKKYGGFDSPTVAYSVLVVAKVEKGKSKKLKSVKELLGITIMERSSFEKNPIDFLEAKGYKEVKKDLIIKLPKYSLFELENGRKRMLASAGELQKGNELALPSKYVNFLYLASHYEKLKGSPEDNEQKQLFVEQHKHYLDEIIEQISEFSKRVILADANLDKVLSAYNKHRDKPIREQAENIIHLFTLTNLGAPAAFKYFDTTIDRKRYTSTKEVLDATLIHQSITGLYETRIDLSQLGGDGGEAAAKEAAAKEAAAKEAAAKEAAAKGGTLQLEEEYRLFEPESTQKQEMDIWLKNFPQAWAETGGMGTAHCQAPVLIQLKATATPISIRQYPMPHEAYQGIKPHIRRMLDQGILKPCQSPWNTPLLPVKKPGTEDYRPVQDLREVNKRVEDIHPTVPNPYNLLSTLPPSHPWYTVLDLKDAFFCLRLHSESQLLFAFEWRDPEIGLSGQLTWTRLPQGFKNSPTLFNEALHSDLADFRVRYPALVLLQYVDDLLLAAATRTECLEGTKALLETLGNKGYRASAKKAQICLQEVTYLGYSLKDGQRWLTKARKEAILSIPVPKNSRQVREFLGKAGYCRLFIPGFAELAAPLYPLTRPGTLFQWGTEQQLAFEDIKKALLSSPALGLPDITKPFELFIDENSGFAKGVLVQKLGPWKRPVAYLSKKLDTVASGWPPCLRMVAAIAILVKDAGKLTLGQPLTILTSHPVEALVRQPPNKWLSNARMTHYQAMLLDAERVHFGPTVSLNPATLLPLPSGGNHHDCLQILAETHGTRPDLTDQPLPDADLTWYTDGSSFIRNGEREAGAAVTTESEVIWAAPLPPGTSAQRAELIALTQALKMAEGKKLTVYTDSRYAFATTHVHGEIYRRRGWLTSEGKEIKNKNEILALLEALFLPKRLSIIHCPGHQKGDSPQAKGNRLADDTAKKAATETHSSLTVLPAGKRTADGSEFEKRTADGSEFESPKKKAKVE

SEQ ID NO: 6426 - protein, 2101 aa, synthetic construct
MPAAKRVKLDGGDKKYSIGLDIGTNSVGWAVITDEYKVPSKKFKVLGNTDRHSIKKNLIGALLFDSGETAEATRLKRTARRRYTRRKNRICYLQEIFSNEMAKVDDSFFHRLEESFLVEEDKKHERHPIFGNIVDEVAYHEKYPTIYHLRKKLVDSTDKADLRLIYLALAHMIKFRGHFLIEGDLNPDNSDVDKLFIQLVQTYNQLFEENPINASGVDAKAILSARLSKSRRLENLIAQLPGEKKNGLFGNLIALSLGLTPNFKSNFDLAEDAKLQLSKDTYDDDLDNLLAQIGDQYADLFLAAKNLSDAILLSDILRVNTEITKAPLSASMIKRYDEHHQDLTLLKALVRQQLPEKYKEIFFDQSKNGYAGYIDGGASQEEFYKFIKPILEKMDGTEELLVKLNREDLLRKQRTFDNGSIPHQIHLGELHAILRRQEDFYPFLKDNREKIEKILTFRIPYYVGPLARGNSRFAWMTRKSEETITPWNFEEVVDKGASAQSFIERMTNFDKNLPNEKVLPKHSLLYEYFTVYNELTKVKYVTEGMRKPAFLSGEQKKAIVDLLFKTNRKVTVKQLKEDYFKKIECFDSVEISGVEDRFNASLGTYHDLLKIIKDKDFLDNEENEDILEDIVLTLTLFEDREMIEERLKTYAHLFDDKVMKQLKRRRYTGWGRLSRKLINGIRDKQSGKTILDFLKSDGFANRNFMQLIHDDSLTFKEDIQKAQVSGQGDSLHEHIANLAGSPAIKKGILQTVKVVDELVKVMGRHKPENIVIEMARENQTTQKGQKNSRERMKRIEEGIKELGSQILKEHPVENTQLQNEKLYLYYLQNGRDMYVDQELDINRLSDYDVDHIVPQSFLKDDSIDNKVLTRSDKARGKSDNVPSEEVVKKMKNYWRQLLNAKLITQRKFDNLTKAERGGLSELDKAGFIKRQLVETRQITKHVAQILDSRMNTKYDENDKLIREVKVITLKSKLVSDFRKDFQFYKVREINNYHHAHDAYLNAVVGTALIKKYPKLESEFVYGDYKVYDVRKMIAKSEQEIGKATAKYFFYSNIMNFFKTEITLANGEIRKRPLIETNGETGEIVWDKGRDFATVRKVLSMPQVNIVKKTEVQTGGFSKESILPKRNSDKLIARKKDWDPKKYGGFDSPTVAYSVLVVAKVEKGKSKKLKSVKELLGITIMERSSFEKNPIDFLEAKGYKEVKKDLIIKLPKYSLFELENGRKRMLASAGELQKGNELALPSKYVNFLYLASHYEKLKGSPEDNEQKQLFVEQHKHYLDEIIEQISEFSKRVILADANLDKVLSAYNKHRDKPIREQAENIIHLFTLTNLGAPAAFKYFDTTIDRKRYTSTKEVLDATLIHQSITGLYETRIDLSQLGGDGGEAAAKEAAAKEAAAKEAAAKEAAAKGGVPWLTQQPLQLTILVPLQEYQEKILSKTALPEDQKQQLKTLFVKYDNLWQHWENQVGHRKIRPHNIATGDYPPRPQKQYPINPKAKPSIQIVIDDLLKQGVLTPQNSTMNTPVYPVPKPDGRWRMVLDYREVNKTIPLTAAQNQHSAGILATIVRQKYKTTLDLANGFWAHPITPESYWLTAFTWQGKQYCWTRLPQGFLNSPALFNADVVDLLKEIPNVQVYVDDIYLSHDDPKEHVQQLEKVFQILLQAGYVVSLKKSEIGQKTVEFLGFNITKEGRGLTDTFKTKLLNITPPKDLKQLQSILGLLNFARNFIPNFAELVQPLYNLIAPAKGKYIEWSEENTKQLNMVIEALNTASNLEERLPEQRLVIKVNTSPSAGYVRYYNETGKKPIMYLNYVFSKAELKFSMLEKLLTTMHKALIKAMDLAMGQEILVYSPIVSMTKIQKTPLPERKALPIRWITWMTYLEDPRIQFHYDKTLPELKHIPDVYTSSQSPVKHPSQYEGVFYTDGSAIKSPDPTKSNNAGMGIVHATYKPEYQVLNQWSIPLGNHTAQMAEIAAVEFACKKALKIPGPVLVITDSFYVAESANKELPYWKSNGFVNNKKKPLKHISKWKSIAECLSMKPDITIQHEKGISLQIPVFILKGNALADKLATQGSYVVNAGKRTADGSEFEKRTADGSEFESPKKKAKVE

SEQ ID NO: 6427 - protein, 2101 aa, synthetic construct
MPAAKRVKLDGGDKKYSIGLDIGTNSVGWAVITDEYKVPSKKFKVLGNTDRHSIKKNLIGALLFDSGETAEATRLKRTARRRYTRRKNRICYLQEIFSNEMAKVDDSFFHRLEESFLVEEDKKHERHPIFGNIVDEVAYHEKYPTIYHLRKKLVDSTDKADLRLIYLALAHMIKFRGHFLIEGDLNPDNSDVDKLFIQLVQTYNQLFEENPINASGVDAKAILSARLSKSRRLENLIAQLPGEKKNGLFGNLIALSLGLTPNFKSNFDLAEDAKLQLSKDTYDDDLDNLLAQIGDQYADLFLAAKNLSDAILLSDILRVNTEITKAPLSASMIKRYDEHHQDLTLLKALVRQQLPEKYKEIFFDQSKNGYAGYIDGGASQEEFYKFIKPILEKMDGTEELLVKLNREDLLRKQRTFDNGSIPHQIHLGELHAILRRQEDFYPFLKDNREKIEKILTFRIPYYVGPLARGNSRFAWMTRKSEETITPWNFEEVVDKGASAQSFIERMTNFDKNLPNEKVLPKHSLLYEYFTVYNELTKVKYVTEGMRKPAFLSGEQKKAIVDLLFKTNRKVTVKQLKEDYFKKIECFDSVEISGVEDRFNASLGTYHDLLKIIKDKDFLDNEENEDILEDIVLTLTLFEDREMIEERLKTYAHLFDDKVMKQLKRRRYTGWGRLSRKLINGIRDKQSGKTILDFLKSDGFANRNFMQLIHDDSLTFKEDIQKAQVSGQGDSLHEHIANLAGSPAIKKGILQTVKVVDELVKVMGRHKPENIVIEMARENQTTQKGQKNSRERMKRIEEGIKELGSQILKEHPVENTQLQNEKLYLYYLQNGRDMYVDQELDINRLSDYDVDHIVPQSFLKDDSIDNKVLTRSDKARGKSDNVPSEEVVKKMKNYWRQLLNAKLITQRKFDNLTKAERGGLSELDKAGFIKRQLVETRQITKHVAQILDSRMNTKYDENDKLIREVKVITLKSKLVSDFRKDFQFYKVREINNYHHAHDAYLNAVVGTALIKKYPKLESEFVYGDYKVYDVRKMIAKSEQEIGKATAKYFFYSNIMNFFKTEITLANGEIRKRPLIETNGETGEIVWDKGRDFATVRKVLSMPQVNIVKKTEVQTGGFSKESILPKRNSDKLIARKKDWDPKKYGGFDSPTVAYSVLVVAKVEKGKSKKLKSVKELLGITIMERSSFEKNPIDFLEAKGYKEVKKDLIIKLPKYSLFELENGRKRMLASAGELQKGNELALPSKYVNFLYLASHYEKLKGSPEDNEQKQLFVEQHKHYLDEIIEQISEFSKRVILADANLDKVLSAYNKHRDKPIREQAENIIHLFTLTNLGAPAAFKYFDTTIDRKRYTSTKEVLDATLIHQSITGLYETRIDLSQLGGDGGEAAAKEAAAKEAAAKEAAAKEAAAKGGVPWLTQQPLQLTILVPLQEYQEKILSKTALPEDQKQQLKTLFVKYDNLWQHWENQVGHRKIRPHNIATGDYPPRPQKQYPINPKAKPSIQIVIDDLLKQGVLTPQNSTMNTPVYPVPKPDGRWRMVLDYREVNKTIPLTAAQNQHSAGILATIVRQKYKTTLDLANGFWAHPITPESYWLTAFTWQGKQYCWTRLPQGFLNSPALFNADVVDLLKEIPNVQVYVDDIYLSHDDPKEHVQQLEKVFQILLQAGYVVSLKKSEIGQKTVEFLGFNITKEGRGLTDTFKTKLLNITPPKDLKQLQSILGKLNFARNFIPNFAELVQPLYNLIAPAKGKYIEWSEENTKQLNMVIEALNTASNLEERLPEQRLVIKVNTSPSAGYVRYYNETGKKPIMYLNYVFSKAELKFSMLEKLLTTMHKALIKAMDLAMGQEILVYSPIVSMTKIQKTPLPERKALPIRWITWMTYLEDPRIQFHYDKTLPELKHIPDVYTSSQSPVKHPSQYEGVFYTDGSAIKSPDPTKSNNAGMGIVHATYKPEYQVLNQWSIPLGNHTAQMAEIAAVEFACKKALKIPGPVLVITDSFYVAESANKELPYWKSNGFVNNKKKPLKHISKWKSIAECLSMKPDITIQHEKGISLQIPVFILKGNALADKLATQGSYVVNAGKRTADGSEFEKRTADGSEFESPKKKAKVE

SEQ ID NO: 6428 - protein, 2190 aa, synthetic construct
MPAAKRVKLDGGDKKYSIGLDIGTNSVGWAVITDEYKVPSKKFKVLGNTDRHSIKKNLIGALLFDSGETAEATRLKRTARRRYTRRKNRICYLQEIFSNEMAKVDDSFFHRLEESFLVEEDKKHERHPIFGNIVDEVAYHEKYPTIYHLRKKLVDSTDKADLRLIYLALAHMIKFRGHFLIEGDLNPDNSDVDKLFIQLVQTYNQLFEENPINASGVDAKAILSARLSKSRRLENLIAQLPGEKKNGLFGNLIALSLGLTPNFKSNFDLAEDAKLQLSKDTYDDDLDNLLAQIGDQYADLFLAAKNLSDAILLSDILRVNTEITKAPLSASMIKRYDEHHQDLTLLKALVRQQLPEKYKEIFFDQSKNGYAGYIDGGASQEEFYKFIKPILEKMDGTEELLVKLNREDLLRKQRTFDNGSIPHQIHLGELHAILRRQEDFYPFLKDNREKIEKILTFRIPYYVGPLARGNSRFAWMTRKSEETITPWNFEEVVDKGASAQSFIERMTNFDKNLPNEKVLPKHSLLYEYFTVYNELTKVKYVTEGMRKPAFLSGEQKKAIVDLLFKTNRKVTVKQLKEDYFKKIECFDSVEISGVEDRFNASLGTYHDLLKIIKDKDFLDNEENEDILEDIVLTLTLFEDREMIEERLKTYAHLFDDKVMKQLKRRRYTGWGRLSRKLINGIRDKQSGKTILDFLKSDGFANRNFMQLIHDDSLTFKEDIQKAQVSGQGDSLHEHIANLAGSPAIKKGILQTVKVVDELVKVMGRHKPENIVIEMARENQTTQKGQKNSRERMKRIEEGIKELGSQILKEHPVENTQLQNEKLYLYYLQNGRDMYVDQELDINRLSDYDVDHIVPQSFLKDDSIDNKVLTRSDKARGKSDNVPSEEVVKKMKNYWRQLLNAKLITQRKFDNLTKAERGGLSELDKAGFIKRQLVETRQITKHVAQILDSRMNTKYDENDKLIREVKVITLKSKLVSDFRKDFQFYKVREINNYHHAHDAYLNAVVGTALIKKYPKLESEFVYGDYKVYDVRKMIAKSEQEIGKATAKYFFYSNIMNFFKTEITLANGEIRKRPLIETNGETGEIVWDKGRDFATVRKVLSMPQVNIVKKTEVQTGGFSKESILPKRNSDKLIARKKDWDPKKYGGFDSPTVAYSVLVVAKVEKGKSKKLKSVKELLGITIMERSSFEKNPIDFLEAKGYKEVKKDLIIKLPKYSLFELENGRKRMLASAGELQKGNELALPSKYVNFLYLASHYEKLKGSPEDNEQKQLFVEQHKHYLDEIIEQISEFSKRVILADANLDKVLSAYNKHRDKPIREQAENIIHLFTLTNLGAPAAFKYFDTTIDRKRYTSTKEVLDATLIHQSITGLYETRIDLSQLGGDGGEAAAKEAAAKEAAAKEAAAKEAAAKGGMNPLQLLQPLPAEIKGTKLLAHWNSGATITCIPESFLEDEQPIKKTLIKTIHGEKQQNVYYVTFKVKGRKVEAEVIASPYEYILLSPTDVPWLTQQPLQLTILVPLQEYQEKILSKTALPEDQKQQLKTLFVKYDNLWQHWENQVGHRKIRPHNIATGDYPPRPQKQYPINPKAKPSIQIVIDDLLKQGVLTPQNSTMNTPVYPVPKPDGRWRMVLDYREVNKTIPLTAAQNQHSAGILATIVRQKYKTTLDLANGFWAHPITPESYWLTAFTWQGKQYCWTRLPQGFLNSPALFNADVVDLLKEIPNVQVYVDDIYLSHDDPKEHVQQLEKVFQILLQAGYVVSLKKSEIGQKTVEFLGFNITKEGRGLTDTFKTKLLNITPPKDLKQLQSILGLLNFARNFIPNFAELVQPLYNLIAPAKGKYIEWSEENTKQLNMVIEALNTASNLEERLPEQRLVIKVNTSPSAGYVRYYNETGKKPIMYLNYVFSKAELKFSMLEKLLTTMHKALIKAMDLAMGQEILVYSPIVSMTKIQKTPLPERKALPIRWITWMTYLEDPRIQFHYDKTLPELKHIPDVYTSSQSPVKHPSQYEGVFYTDGSAIKSPDPTKSNNAGMGIVHATYKPEYQVLNQWSIPLGNHTAQMAEIAAVEFACKKALKIPGPVLVITDSFYVAESANKELPYWKSNGFVNNKKKPLKHISKWKSIAECLSMKPDITIQHEKGISLQIPVFILKGNALADKLATQGSYVVNAGKRTADGSEFEKRTADGSEFESPKKKAKVE

SEQ ID NO: 6429 - protein, 2190 aa, synthetic construct
MPAAKRVKLDGGDKKYSIGLDIGTNSVGWAVITDEYKVPSKKFKVLGNTDRHSIKKNLIGALLFDSGETAEATRLKRTARRRYTRRKNRICYLQEIFSNEMAKVDDSFFHRLEESFLVEEDKKHERHPIFGNIVDEVAYHEKYPTIYHLRKKLVDSTDKADLRLIYLALAHMIKFRGHFLIEGDLNPDNSDVDKLFIQLVQTYNQLFEENPINASGVDAKAILSARLSKSRRLENLIAQLPGEKKNGLFGNLIALSLGLTPNFKSNFDLAEDAKLQLSKDTYDDDLDNLLAQIGDQYADLFLAAKNLSDAILLSDILRVNTEITKAPLSASMIKRYDEHHQDLTLLKALVRQQLPEKYKEIFFDQSKNGYAGYIDGGASQEEFYKFIKPILEKMDGTEELLVKLNREDLLRKQRTFDNGSIPHQIHLGELHAILRRQEDFYPFLKDNREKIEKILTFRIPYYVGPLARGNSRFAWMTRKSEETITPWNFEEVVDKGASAQSFIERMTNFDKNLPNEKVLPKHSLLYEYFTVYNELTKVKYVTEGMRKPAFLSGEQKKAIVDLLFKTNRKVTVKQLKEDYFKKIECFDSVEISGVEDRFNASLGTYHDLLKIIKDKDFLDNEENEDILEDIVLTLTLFEDREMIEERLKTYAHLFDDKVMKQLKRRRYTGWGRLSRKLINGIRDKQSGKTILDFLKSDGFANRNFMQLIHDDSLTFKEDIQKAQVSGQGDSLHEHIANLAGSPAIKKGILQTVKVVDELVKVMGRHKPENIVIEMARENQTTQKGQKNSRERMKRIEEGIKELGSQILKEHPVENTQLQNEKLYLYYLQNGRDMYVDQELDINRLSDYDVDHIVPQSFLKDDSIDNKVLTRSDKARGKSDNVPSEEVVKKMKNYWRQLLNAKLITQRKFDNLTKAERGGLSELDKAGFIKRQLVETRQITKHVAQILDSRMNTKYDENDKLIREVKVITLKSKLVSDFRKDFQFYKVREINNYHHAHDAYLNAVVGTALIKKYPKLESEFVYGDYKVYDVRKMIAKSEQEIGKATAKYFFYSNIMNFFKTEITLANGEIRKRPLIETNGETGEIVWDKGRDFATVRKVLSMPQVNIVKKTEVQTGGFSKESILPKRNSDKLIARKKDWDPKKYGGFDSPTVAYSVLVVAKVEKGKSKKLKSVKELLGITIMERSSFEKNPIDFLEAKGYKEVKKDLIIKLPKYSLFELENGRKRMLASAGELQKGNELALPSKYVNFLYLASHYEKLKGSPEDNEQKQLFVEQHKHYLDEIIEQISEFSKRVILADANLDKVLSAYNKHRDKPIREQAENIIHLFTLTNLGAPAAFKYFDTTIDRKRYTSTKEVLDATLIHQSITGLYETRIDLSQLGGDGGEAAAKEAAAKEAAAKEAAAKEAAAKGGMNPLQLLQPLPAEIKGTKLLAHWNSGATITCIPESFLEDEQPIKKTLIKTIHGEKQQNVYYVTFKVKGRKVEAEVIASPYEYILLSPTDVPWLTQQPLQLTILVPLQEYQEKILSKTALPEDQKQQLKTLFVKYDNLWQHWENQVGHRKIRPHNIATGDYPPRPQKQYPINPKAKPSIQIVIDDLLKQGVLTPQNSTMNTPVYPVPKPDGRWRMVLDYREVNKTIPLTAAQNQHSAGILATIVRQKYKTTLDLANGFWAHPITPESYWLTAFTWQGKQYCWTRLPQGFLNSPALFNADVVDLLKEIPNVQVYVDDIYLSHDDPKEHVQQLEKVFQILLQAGYVVSLKKSEIGQKTVEFLGFNITKEGRGLTDTFKTKLLNITPPKDLKQLQSILGKLNFARNFIPNFAELVQPLYNLIAPAKGKYIEWSEENTKQLNMVIEALNTASNLEERLPEQRLVIKVNTSPSAGYVRYYNETGKKPIMYLNYVFSKAELKFSMLEKLLTTMHKALIKAMDLAMGQEILVYSPIVSMTKIQKTPLPERKALPIRWITWMTYLEDPRIQFHYDKTLPELKHIPDVYTSSQSPVKHPSQYEGVFYTDGSAIKSPDPTKSNNAGMGIVHATYKPEYQVLNQWSIPLGNHTAQMAEIAAVEFACKKALKIPGPVLVITDSFYVAESANKELPYWKSNGFVNNKKKPLKHISKWKSIAECLSMKPDITIQHEKGISLQIPVFILKGNALADKLATQGSYVVNAGKRTADGSEFEKRTADGSEFESPKKKAKVE

SEQ ID NO: 6430 - protein, 2108 aa, synthetic construct
MPAAKRVKLDGGDKKYSIGLDIGTNSVGWAVITDEYKVPSKKFKVLGNTDRHSIKKNLIGALLFDSGETAEATRLKRTARRRYTRRKNRICYLQEIFSNEMAKVDDSFFHRLEESFLVEEDKKHERHPIFGNIVDEVAYHEKYPTIYHLRKKLVDSTDKADLRLIYLALAHMIKFRGHFLIEGDLNPDNSDVDKLFIQLVQTYNQLFEENPINASGVDAKAILSARLSKSRRLENLIAQLPGEKKNGLFGNLIALSLGLTPNFKSNFDLAEDAKLQLSKDTYDDDLDNLLAQIGDQYADLFLAAKNLSDAILLSDILRVNTEITKAPLSASMIKRYDEHHQDLTLLKALVRQQLPEKYKEIFFDQSKNGYAGYIDGGASQEEFYKFIKPILEKMDGTEELLVKLNREDLLRKQRTFDNGSIPHQIHLGELHAILRRQEDFYPFLKDNREKIEKILTFRIPYYVGPLARGNSRFAWMTRKSEETITPWNFEEVVDKGASAQSFIERMTNFDKNLPNEKVLPKHSLLYEYFTVYNELTKVKYVTEGMRKPAFLSGEQKKAIVDLLFKTNRKVTVKQLKEDYFKKIECFDSVEISGVEDRFNASLGTYHDLLKIIKDKDFLDNEENEDILEDIVLTLTLFEDREMIEERLKTYAHLFDDKVMKQLKRRRYTGWGRLSRKLINGIRDKQSGKTILDFLKSDGFANRNFMQLIHDDSLTFKEDIQKAQVSGQGDSLHEHIANLAGSPAIKKGILQTVKVVDELVKVMGRHKPENIVIEMARENQTTQKGQKNSRERMKRIEEGIKELGSQILKEHPVENTQLQNEKLYLYYLQNGRDMYVDQELDINRLSDYDVDHIVPQSFLKDDSIDNKVLTRSDKARGKSDNVPSEEVVKKMKNYWRQLLNAKLITQRKFDNLTKAERGGLSELDKAGFIKRQLVETRQITKHVAQILDSRMNTKYDENDKLIREVKVITLKSKLVSDFRKDFQFYKVREINNYHHAHDAYLNAVVGTALIKKYPKLESEFVYGDYKVYDVRKMIAKSEQEIGKATAKYFFYSNIMNFFKTEITLANGEIRKRPLIETNGETGEIVWDKGRDFATVRKVLSMPQVNIVKKTEVQTGGFSKESILPKRNSDKLIARKKDWDPKKYGGFDSPTVAYSVLVVAKVEKGKSKKLKSVKELLGITIMERSSFEKNPIDFLEAKGYKEVKKDLIIKLPKYSLFELENGRKRMLASAGELQKGNELALPSKYVNFLYLASHYEKLKGSPEDNEQKQLFVEQHKHYLDEIIEQISEFSKRVILADANLDKVLSAYNKHRDKPIREQAENIIHLFTLTNLGAPAAFKYFDTTIDRKRYTSTKEVLDATLIHQSITGLYETRIDLSQLGGDGGEAAAKEAAAKEAAAKEAAAKEAAAKGGVLNLEEEYRLHEKPVPSSIDPSWLQLFPTVWAERAGMGLANQVPPVVVELRSGASPVAVRQYPMSKEAREGIRPHIQKFLDLGVLVPCRSPWNTPLLPVKKPGTNDYRPVQDLREINKRVQDIHPTVPNPYNLLSSLPPSYTWYSVLDLKDAFFCLRLHPNSQPLFAFEWKDPEKGNTGQLTWTRLPQGFKNSPTLFNEALHRDLAPFRALNPQVVLLQYVDDLLVAAPTYEDCKKGTQKLLQELSKLGYRVSAKKAQLCQREVTYLGYLLKEGKRWLTPARKATVMKIPVPTTPRQVREFLGTAGFCRLWIPGFASLAAPLYPLTKPSIPFIWTEEHQQAFDHIKKALLSAPALALPDLTKPFTLYIDERAGVARGVLTQTLGPWRRPVAYLSKKLDPVASGWPTCLKAVAAVALLLKDADKLTLGQNVTVIASHSLESIVRQPPDRWMTNARMTHYQSLLLNERVSFAPPAVLNPATLLPVESEATPVHRCSEILAEETGTRRDLEDQPLPGVPTWYTDGSSFITEGKRRAGAPIVDGKRTVWASSLPEGTSAQKAELVALTQALRLAEGKNINIYTDSRYAFATAHIHGAIYKQRGWLTSAGKDIKNKEEILALLEAIHLPRRVAIIHCPGHQRGSNPVATGNRRADEAAKQAALSTRVLAGTTKPAGKRTADGSEFEKRTADGSEFESPKKKAKVE

SEQ ID NO: 6431 - protein, 2108 aa, synthetic construct
MPAAKRVKLDGGDKKYSIGLDIGTNSVGWAVITDEYKVPSKKFKVLGNTDRHSIKKNLIGALLFDSGETAEATRLKRTARRRYTRRKNRICYLQEIFSNEMAKVDDSFFHRLEESFLVEEDKKHERHPIFGNIVDEVAYHEKYPTIYHLRKKLVDSTDKADLRLIYLALAHMIKFRGHFLIEGDLNPDNSDVDKLFIQLVQTYNQLFEENPINASGVDAKAILSARLSKSRRLENLIAQLPGEKKNGLFGNLIALSLGLTPNFKSNFDLAEDAKLQLSKDTYDDDLDNLLAQIGDQYADLFLAAKNLSDAILLSDILRVNTEITKAPLSASMIKRYDEHHQDLTLLKALVRQQLPEKYKEIFFDQSKNGYAGYIDGGASQEEFYKFIKPILEKMDGTEELLVKLNREDLLRKQRTFDNGSIPHQIHLGELHAILRRQEDFYPFLKDNREKIEKILTFRIPYYVGPLARGNSRFAWMTRKSEETITPWNFEEVVDKGASAQSFIERMTNFDKNLPNEKVLPKHSLLYEYFTVYNELTKVKYVTEGMRKPAFLSGEQKKAIVDLLFKTNRKVTVKQLKEDYFKKIECFDSVEISGVEDRFNASLGTYHDLLKIIKDKDFLDNEENEDILEDIVLTLTLFEDREMIEERLKTYAHLFDDKVMKQLKRRRYTGWGRLSRKLINGIRDKQSGKTILDFLKSDGFANRNFMQLIHDDSLTFKEDIQKAQVSGQGDSLHEHIANLAGSPAIKKGILQTVKVVDELVKVMGRHKPENIVIEMARENQTTQKGQKNSRERMKRIEEGIKELGSQILKEHPVENTQLQNEKLYLYYLQNGRDMYVDQELDINRLSDYDVDHIVPQSFLKDDSIDNKVLTRSDKARGKSDNVPSEEVVKKMKNYWRQLLNAKLITQRKFDNLTKAERGGLSELDKAGFIKRQLVETRQITKHVAQILDSRMNTKYDENDKLIREVKVITLKSKLVSDFRKDFQFYKVREINNYHHAHDAYLNAVVGTALIKKYPKLESEFVYGDYKVYDVRKMIAKSEQEIGKATAKYFFYSNIMNFFKTEITLANGEIRKRPLIETNGETGEIVWDKGRDFATVRKVLSMPQVNIVKKTEVQTGGFSKESILPKRNSDKLIARKKDWDPKKYGGFDSPTVAYSVLVVAKVEKGKSKKLKSVKELLGITIMERSSFEKNPIDFLEAKGYKEVKKDLIIKLPKYSLFELENGRKRMLASAGELQKGNELALPSKYVNFLYLASHYEKLKGSPEDNEQKQLFVEQHKHYLDEIIEQISEFSKRVILADANLDKVLSAYNKHRDKPIREQAENIIHLFTLTNLGAPAAFKYFDTTIDRKRYTSTKEVLDATLIHQSITGLYETRIDLSQLGGDGGEAAAKEAAAKEAAAKEAAAKEAAAKGGVLNLEEEYRLHEKPVPSSIDPSWLQLFPTVWAERAGMGLANQVPPVVVELRSGASPVAVRQYPMSKEAREGIRPHIQKFLDLGVLVPCRSPWNTPLLPVKKPGTNDYRPVQDLREINKRVQDIHPTVPNPYNLLSSLPPSYTWYSVLDLKDAFFCLRLHPNSQPLFAFEWKDPEKGNTGQLTWTRLPQGFKNSPTLFNEALHRDLAPFRALNPQVVLLQYVDDLLVAAPTYEDCKKGTQKLLQELSKLGYRVSAKKAQLCQREVTYLGYLLKEGKRWLTPARKATVMKIPVPTTPRQVREFLGKAGFCRLFIPGFASLAAPLYPLTKPSIPFIWTEEHQQAFDHIKKALLSAPALALPDLTKPFTLYIDERAGVARGVLTQTLGPWRRPVAYLSKKLDPVASGWPTCLKAVAAVALLLKDADKLTLGQNVTVIASHSLESIVRQPPDRWMTNARMTHYQSLLLNERVSFAPPAVLNPATLLPVESEATPVHRCSEILAEETGTRRDLEDQPLPGVPTWYTDGSSFITEGKRRAGAPIVDGKRTVWASSLPEGTSAQKAELVALTQALRLAEGKNINIYTDSRYAFATAHIHGAIYKQRGWLTSAGKDIKNKEEILALLEAIHLPRRVAIIHCPGHQRGSNPVATGNRRADEAAKQAALSTRVLAGTTKPAGKRTADGSEFEKRTADGSEFESPKKKAKVE

SEQ ID NO: 6432 - protein, 2232 aa, synthetic construct
MPAAKRVKLDGGDKKYSIGLDIGTNSVGWAVITDEYKVPSKKFKVLGNTDRHSIKKNLIGALLFDSGETAEATRLKRTARRRYTRRKNRICYLQEIFSNEMAKVDDSFFHRLEESFLVEEDKKHERHPIFGNIVDEVAYHEKYPTIYHLRKKLVDSTDKADLRLIYLALAHMIKFRGHFLIEGDLNPDNSDVDKLFIQLVQTYNQLFEENPINASGVDAKAILSARLSKSRRLENLIAQLPGEKKNGLFGNLIALSLGLTPNFKSNFDLAEDAKLQLSKDTYDDDLDNLLAQIGDQYADLFLAAKNLSDAILLSDILRVNTEITKAPLSASMIKRYDEHHQDLTLLKALVRQQLPEKYKEIFFDQSKNGYAGYIDGGASQEEFYKFIKPILEKMDGTEELLVKLNREDLLRKQRTFDNGSIPHQIHLGELHAILRRQEDFYPFLKDNREKIEKILTFRIPYYVGPLARGNSRFAWMTRKSEETITPWNFEEVVDKGASAQSFIERMTNFDKNLPNEKVLPKHSLLYEYFTVYNELTKVKYVTEGMRKPAFLSGEQKKAIVDLLFKTNRKVTVKQLKEDYFKKIECFDSVEISGVEDRFNASLGTYHDLLKIIKDKDFLDNEENEDILEDIVLTLTLFEDREMIEERLKTYAHLFDDKVMKQLKRRRYTGWGRLSRKLINGIRDKQSGKTILDFLKSDGFANRNFMQLIHDDSLTFKEDIQKAQVSGQGDSLHEHIANLAGSPAIKKGILQTVKVVDELVKVMGRHKPENIVIEMARENQTTQKGQKNSRERMKRIEEGIKELGSQILKEHPVENTQLQNEKLYLYYLQNGRDMYVDQELDINRLSDYDVDHIVPQSFLKDDSIDNKVLTRSDKARGKSDNVPSEEVVKKMKNYWRQLLNAKLITQRKFDNLTKAERGGLSELDKAGFIKRQLVETRQITKHVAQILDSRMNTKYDENDKLIREVKVITLKSKLVSDFRKDFQFYKVREINNYHHAHDAYLNAVVGTALIKKYPKLESEFVYGDYKVYDVRKMIAKSEQEIGKATAKYFFYSNIMNFFKTEITLANGEIRKRPLIETNGETGEIVWDKGRDFATVRKVLSMPQVNIVKKTEVQTGGFSKESILPKRNSDKLIARKKDWDPKKYGGFDSPTVAYSVLVVAKVEKGKSKKLKSVKELLGITIMERSSFEKNPIDFLEAKGYKEVKKDLIIKLPKYSLFELENGRKRMLASAGELQKGNELALPSKYVNFLYLASHYEKLKGSPEDNEQKQLFVEQHKHYLDEIIEQISEFSKRVILADANLDKVLSAYNKHRDKPIREQAENIIHLFTLTNLGAPAAFKYFDTTIDRKRYTSTKEVLDATLIHQSITGLYETRIDLSQLGGDGGEAAAKEAAAKEAAAKEAAAKEAAAKGGTLGDQGSRGSDPLPEPRVTLTVEGIPTEFLVNTGAEHSVLTKPMGKMGSKRTVVAGATGSKVYPWTTKRLLKIGQKQVTHSFLVIPECPAPLLGRDLLTKLKAQIQFSTEGPQVTWEDRPAMCLVLNLEEEYRLHEKPVPPSIDPSWLQLFPMVWAEKAGMGLANQVPPVVVELKSDASPVAVRQYPMSKEAREGIRPHIQRFLDLGILVPCQSPWNTPLLPVKKPGTNDYRPVQDLREVNKRVQDIHPTVPNPYNLLSSLPPSHTWYSVLDLKDAFFCLKLHPNSQPLFAFEWRDPEKGNTGQLTWTRLPQGFKNSPTLFNEALHRDLASFRALNPQVVMLQYVDDLLVAAPTYRDCKEGTRRLLQELSKLGYRVSAKKAQLCREEVTYLGYLLKGGKRWLTPARKATVMKIPTPTTPRQVREFLGTAGFCRLWIPGFASLAAPLYPLTRPKVPFTWTEAHQEAFGRIKEALLSAPALALPDLTKPFALYVDEKEGVARGVLTQTLGPWRRPVAYLSKKLDPVASGWPTCLKAIAAVALLLKDADKLTLGQNVLVIAPHNLESIVRQPPDRWMTNARMTHYQSLLLNERVSFAPPAILNPATLLPVESDDTPIHICSEILAEETGTRPDLRDQPLPGVPAWYTDGSSFIMDGRRQAGAAIVDNKRTVWASNLPEGTSAQKAELIALTQALRLAEGKSINIYTDSRYAFATAHVHGAIYKQRGWLTSAGKDIKNKEEILALLEAIHLPKRVAIIHCPGHQRGTDPVATGNRKADEAAKQAAQSTRILTETTKNAGKRTADGSEFEKRTADGSEFESPKKKAKVE

SEQ ID NO: 6433 - protein, 2110 aa, synthetic construct
MPAAKRVKLDGGDKKYSIGLDIGTNSVGWAVITDEYKVPSKKFKVLGNTDRHSIKKNLIGALLFDSGETAEATRLKRTARRRYTRRKNRICYLQEIFSNEMAKVDDSFFHRLEESFLVEEDKKHERHPIFGNIVDEVAYHEKYPTIYHLRKKLVDSTDKADLRLIYLALAHMIKFRGHFLIEGDLNPDNSDVDKLFIQLVQTYNQLFEENPINASGVDAKAILSARLSKSRRLENLIAQLPGEKKNGLFGNLIALSLGLTPNFKSNFDLAEDAKLQLSKDTYDDDLDNLLAQIGDQYADLFLAAKNLSDAILLSDILRVNTEITKAPLSASMIKRYDEHHQDLTLLKALVRQQLPEKYKEIFFDQSKNGYAGYIDGGASQEEFYKFIKPILEKMDGTEELLVKLNREDLLRKQRTFDNGSIPHQIHLGELHAILRRQEDFYPFLKDNREKIEKILTFRIPYYVGPLARGNSRFAWMTRKSEETITPWNFEEVVDKGASAQSFIERMTNFDKNLPNEKVLPKHSLLYEYFTVYNELTKVKYVTEGMRKPAFLSGEQKKAIVDLLFKTNRKVTVKQLKEDYFKKIECFDSVEISGVEDRFNASLGTYHDLLKIIKDKDFLDNEENEDILEDIVLTLTLFEDREMIEERLKTYAHLFDDKVMKQLKRRRYTGWGRLSRKLINGIRDKQSGKTILDFLKSDGFANRNFMQLIHDDSLTFKEDIQKAQVSGQGDSLHEHIANLAGSPAIKKGILQTVKVVDELVKVMGRHKPENIVIEMARENQTTQKGQKNSRERMKRIEEGIKELGSQILKEHPVENTQLQNEKLYLYYLQNGRDMYVDQELDINRLSDYDVDHIVPQSFLKDDSIDNKVLTRSDKARGKSDNVPSEEVVKKMKNYWRQLLNAKLITQRKFDNLTKAERGGLSELDKAGFIKRQLVETRQITKHVAQILDSRMNTKYDENDKLIREVKVITLKSKLVSDFRKDFQFYKVREINNYHHAHDAYLNAVVGTALIKKYPKLESEFVYGDYKVYDVRKMIAKSEQEIGKATAKYFFYSNIMNFFKTEITLANGEIRKRPLIETNGETGEIVWDKGRDFATVRKVLSMPQVNIVKKTEVQTGGFSKESILPKRNSDKLIARKKDWDPKKYGGFDSPTVAYSVLVVAKVEKGKSKKLKSVKELLGITIMERSSFEKNPIDFLEAKGYKEVKKDLIIKLPKYSLFELENGRKRMLASAGELQKGNELALPSKYVNFLYLASHYEKLKGSPEDNEQKQLFVEQHKHYLDEIIEQISEFSKRVILADANLDKVLSAYNKHRDKPIREQAENIIHLFTLTNLGAPAAFKYFDTTIDRKRYTSTKEVLDATLIHQSITGLYETRIDLSQLGGDGGEAAAKEAAAKEAAAKEAAAKEAAAKGGTLNLEDEYRLYETSAEPEVSPGSTWLSDFPQAWAETGGMGLAVRQAPLIIPLKATSTPVSIKQYPMSQEAKLGIKPHIQRLLDQGILVPCQSPWNTPLLPVKKPGTNDYRPVQDLREVNKRVEDIHPTVPNPYNLLSGLPPSHRWYTVLDLKDAFFCLRLHPTSQPLFAFEWRDPGMGISGQLTWTRLPQGFKNSPTLFNEALHRDLADFRIQHPDLILLQYVDDILLAATSELDCQQGTRALLLTLGNLGYRASAKKAQLCQKQVKYLGYLLKEGQRWLTEARKETVMGQPTPKTPRQLREFLGTAGFCRLWIPGFAEMAAPLYPLTKPGTLFNWGPDQQKAYQEIKQALLTAPALGLPDLTKPFELFVDEKQGYAKGVLTQKLGPWRRPVAYLSKKLDPVAAGWPPCLRMVAAIAVLRKDAGKLTMGQPLVILAPHAVEALVKQPPDRWLSNARMTHYQAMLLDTDRVQFGPVVALNPATLLPLPEEGAPHDCLEILAETHGTRPDLTDQPIPDADHTWYTDGSSFLQEGQRKAGAAVTTETEVIWARALPAGTSAQRAELIALTQALKMAEGKRLNVYTDSRYAFATAHIHGEIYRRRGWLTSEGREIKNKSEILALLKALFLPKRLSIIHCLGHQKGDSAEARGNRLADQAAREAAIKTPPDTSTLLAGKRTADGSEFEKRTADGSEFESPKKKAKVE

SEQ ID NO: 6434 - protein, 2110 aa, synthetic construct; identical to SEQ ID NO: 4507

SEQ ID NO: 6435 - protein, 2110 aa, synthetic construct
MPAAKRVKLDGGDKKYSIGLDIGTNSVGWAVITDEYKVPSKKFKVLGNTDRHSIKKNLIGALLFDSGETAEATRLKRTARRRYTRRKNRICYLQEIFSNEMAKVDDSFFHRLEESFLVEEDKKHERHPIFGNIVDEVAYHEKYPTIYHLRKKLVDSTDKADLRLIYLALAHMIKFRGHFLIEGDLNPDNSDVDKLFIQLVQTYNQLFEENPINASGVDAKAILSARLSKSRRLENLIAQLPGEKKNGLFGNLIALSLGLTPNFKSNFDLAEDAKLQLSKDTYDDDLDNLLAQIGDQYADLFLAAKNLSDAILLSDILRVNTEITKAPLSASMIKRYDEHHQDLTLLKALVRQQLPEKYKEIFFDQSKNGYAGYIDGGASQEEFYKFIKPILEKMDGTEELLVKLNREDLLRKQRTFDNGSIPHQIHLGELHAILRRQEDFYPFLKDNREKIEKILTFRIPYYVGPLARGNSRFAWMTRKSEETITPWNFEEVVDKGASAQSFIERMTNFDKNLPNEKVLPKHSLLYEYFTVYNELTKVKYVTEGMRKPAFLSGEQKKAIVDLLFKTNRKVTVKQLKEDYFKKIECFDSVEISGVEDRFNASLGTYHDLLKIIKDKDFLDNEENEDILEDIVLTLTLFEDREMIEERLKTYAHLFDDKVMKQLKRRRYTGWGRLSRKLINGIRDKQSGKTILDFLKSDGFANRNFMQLIHDDSLTFKEDIQKAQVSGQGDSLHEHIANLAGSPAIKKGILQTVKVVDELVKVMGRHKPENIVIEMARENQTTQKGQKNSRERMKRIEEGIKELGSQILKEHPVENTQLQNEKLYLYYLQNGRDMYVDQELDINRLSDYDVDHIVPQSFLKDDSIDNKVLTRSDKARGKSDNVPSEEVVKKMKNYWRQLLNAKLITQRKFDNLTKAERGGLSELDKAGFIKRQLVETRQITKHVAQILDSRMNTKYDENDKLIREVKVITLKSKLVSDFRKDFQFYKVREINNYHHAHDAYLNAVVGTALIKKYPKLESEFVYGDYKVYDVRKMIAKSEQEIGKATAKYFFYSNIMNFFKTEITLANGEIRKRPLIETNGETGEIVWDKGRDFATVRKVLSMPQVNIVKKTEVQTGGFSKESILPKRNSDKLIARKKDWDPKKYGGFDSPTVAYSVLVVAKVEKGKSKKLKSVKELLGITIMERSSFEKNPIDFLEAKGYKEVKKDLIIKLPKYSLFELENGRKRMLASAGELQKGNELALPSKYVNFLYLASHYEKLKGSPEDNEQKQLFVEQHKHYLDEIIEQISEFSKRVILADANLDKVLSAYNKHRDKPIREQAENIIHLFTLTNLGAPAAFKYFDTTIDRKRYTSTKEVLDATLIHQSITGLYETRIDLSQLGGDGGEAAAKEAAAKEAAAKEAAAKEAAAKGGTLNIEDEYRLHETSKGPDVPLGSTWLSDFPQAWAETGGMGLAVRQAPLIIPLKATSTPVSIKQYPMSQEARLGIKPHIQRLLDQGILVPCQSPWNTPLLPVKKPGTNDYRPVQDLREVNKRVEDIHPTVPNPYNLLSGLPPSHQWYTVLDLKDAFFCLRLHPTSQSLFAFEWRDPEMGISGQLTWTRLPQGFKNSPTLFDEALHRDLADFRIQHPDLILLQYVDDLLLAATSELDCQQGTRALLQTLGDLGYRASAKKAQICQKQVKYLGYLLKEGQRWLTEARKETVMGQPTPKTPRQLREFLGTAGFCRLWIPGFAEMAAPLYPLTKTGTLFEWGPDQQKAYQEIKQALLTAPALGLPDLTKPFELFVDEKQGYAKGVLTQKLGPWRRPVAYLSKKLDPVAAGWPPCLRMVAAIAVLTKDAGKLTMGQPLVILAPHAVEALVKQPPDRWLSNARMTHYQALLLDTDRVQFGPIVALNPATLLPLPEEGLQHDCLDILAEAHGTRPDLTDQPLPDADHTWYTDGSSFLQEGQRKAGAAVTTETEVVWAKALPAGTSAQRAELIALTQALKMAEGKKLNVYTDSRYAFATAHIHGEIYRRRGLLTSEGKEIKNKDEILALLKALFLPKRLSIIHCPGHQKGNRAEARGNRMADQAAREVATRETPETSTLLAGKRTADGSEFEKRTADGSEFESPKKKAKVE

SEQ ID NO: 6436 - protein, 2110 aa, synthetic construct
MPAAKRVKLDGGDKKYSIGLDIGTNSVGWAVITDEYKVPSKKFKVLGNTDRHSIKKNLIGALLFDSGETAEATRLKRTARRRYTRRKNRICYLQEIFSNEMAKVDDSFFHRLEESFLVEEDKKHERHPIFGNIVDEVAYHEKYPTIYHLRKKLVDSTDKADLRLIYLALAHMIKFRGHFLIEGDLNPDNSDVDKLFIQLVQTYNQLFEENPINASGVDAKAILSARLSKSRRLENLIAQLPGEKKNGLFGNLIALSLGLTPNFKSNFDLAEDAKLQLSKDTYDDDLDNLLAQIGDQYADLFLAAKNLSDAILLSDILRVNTEITKAPLSASMIKRYDEHHQDLTLLKALVRQQLPEKYKEIFFDQSKNGYAGYIDGGASQEEFYKFIKPILEKMDGTEELLVKLNREDLLRKQRTFDNGSIPHQIHLGELHAILRRQEDFYPFLKDNREKIEKILTFRIPYYVGPLARGNSRFAWMTRKSEETITPWNFEEVVDKGASAQSFIERMTNFDKNLPNEKVLPKHSLLYEYFTVYNELTKVKYVTEGMRKPAFLSGEQKKAIVDLLFKTNRKVTVKQLKEDYFKKIECFDSVEISGVEDRFNASLGTYHDLLKIIKDKDFLDNEENEDILEDIVLTLTLFEDREMIEERLKTYAHLFDDKVMKQLKRRRYTGWGRLSRKLINGIRDKQSGKTILDFLKSDGFANRNFMQLIHDDSLTFKEDIQKAQVSGQGDSLHEHIANLAGSPAIKKGILQTVKVVDELVKVMGRHKPENIVIEMARENQTTQKGQKNSRERMKRIEEGIKELGSQILKEHPVENTQLQNEKLYLYYLQNGRDMYVDQELDINRLSDYDVDHIVPQSFLKDDSIDNKVLTRSDKARGKSDNVPSEEVVKKMKNYWRQLLNAKLITQRKFDNLTKAERGGLSELDKAGFIKRQLVETRQITKHVAQILDSRMNTKYDENDKLIREVKVITLKSKLVSDFRKDFQFYKVREINNYHHAHDAYLNAVVGTALIKKYPKLESEFVYGDYKVYDVRKMIAKSEQEIGKATAKYFFYSNIMNFFKTEITLANGEIRKRPLIETNGETGEIVWDKGRDFATVRKVLSMPQVNIVKKTEVQTGGFSKESILPKRNSDKLIARKKDWDPKKYGGFDSPTVAYSVLVVAKVEKGKSKKLKSVKELLGITIMERSSFEKNPIDFLEAKGYKEVKKDLIIKLPKYSLFELENGRKRMLASAGELQKGNELALPSKYVNFLYLASHYEKLKGSPEDNEQKQLFVEQHKHYLDEIIEQISEFSKRVILADANLDKVLSAYNKHRDKPIREQAENIIHLFTLTNLGAPAAFKYFDTTIDRKRYTSTKEVLDATLIHQSITGLYETRIDLSQLGGDGGEAAAKEAAAKEAAAKEAAAKEAAAKGGTLNIEDEHRLHETSKEPDVSLGSTWLSDFPQAWAETGGMGLAVRQAPLIIPLKATSTPVSIKQYPMSQEARLGIKPHIQRLLDQGILVPCQSPWNTPLLPVKKPGTNDYRPVQDLREVNKRVEDIHPTVPNPYNLLSGLPPSHQWYTVLDLKDAFFCLRLHPTSQPLFAFEWRDPEMGISGQLTWTRLPQGFKNSPTLFDEALHRDLADFRIQHPDLILLQYVDDLLLAATSELDCQQGTRALLQTLGNLGYRASAKKAQICQKQVKYLGYLLKEGQRWLTEARKETVMGQPTPKTPRQLREFLGTAGFCRLWIPGFAEMAAPLYPLTKTGTLFNWGPDQQKAYQEIKQALLTAPALGLPDLTKPFELFVDEKQGYAKGVLTQKLGPWRRPVAYLSKKLDPVAAGWPPCLRMVAAIAVLTKDAGKLTMGQPLVILAPHAVEALVKQPPDRWLSNARMTHYQALLLDTDRVQFGPVVALNPATLLPLPEEGLQHNCLDILAEAHGTRPDLTDQPLPDADHTWYTDGSSLLQEGQRKAGAAVTTETEVIWAKALPAGTSAQRAELIALTQALKMAEGKKLNVYTDSRYAFATAHIHGEIYRRRGLLTSEGKEIKNKDEILALLKALFLPKRLSIIHCPGHQKGHSAEARGNRMADQAARKAAITETPDTSTLLAGKRTADGSEFEKRTADGSEFESPKKKAKVE

SEQ ID NO: 6437 - protein, 2190 aa, synthetic construct
MPAAKRVKLDGGDKKYSIGLDIGTNSVGWAVITDEYKVPSKKFKVLGNTDRHSIKKNLIGALLFDSGETAEATRLKRTARRRYTRRKNRICYLQEIFSNEMAKVDDSFFHRLEESFLVEEDKKHERHPIFGNIVDEVAYHEKYPTIYHLRKKLVDSTDKADLRLIYLALAHMIKFRGHFLIEGDLNPDNSDVDKLFIQLVQTYNQLFEENPINASGVDAKAILSARLSKSRRLENLIAQLPGEKKNGLFGNLIALSLGLTPNFKSNFDLAEDAKLQLSKDTYDDDLDNLLAQIGDQYADLFLAAKNLSDAILLSDILRVNTEITKAPLSASMIKRYDEHHQDLTLLKALVRQQLPEKYKEIFFDQSKNGYAGYIDGGASQEEFYKFIKPILEKMDGTEELLVKLNREDLLRKQRTFDNGSIPHQIHLGELHAILRRQEDFYPFLKDNREKIEKILTFRIPYYVGPLARGNSRFAWMTRKSEETITPWNFEEVVDKGASAQSFIERMTNFDKNLPNEKVLPKHSLLYEYFTVYNELTKVKYVTEGMRKPAFLSGEQKKAIVDLLFKTNRKVTVKQLKEDYFKKIECFDSVEISGVEDRFNASLGTYHDLLKIIKDKDFLDNEENEDILEDIVLTLTLFEDREMIEERLKTYAHLFDDKVMKQLKRRRYTGWGRLSRKLINGIRDKQSGKTILDFLKSDGFANRNFMQLIHDDSLTFKEDIQKAQVSGQGDSLHEHIANLAGSPAIKKGILQTVKVVDELVKVMGRHKPENIVIEMARENQTTQKGQKNSRERMKRIEEGIKELGSQILKEHPVENTQLQNEKLYLYYLQNGRDMYVDQELDINRLSDYDVDHIVPQSFLKDDSIDNKVLTRSDKARGKSDNVPSEEVVKKMKNYWRQLLNAKLITQRKFDNLTKAERGGLSELDKAGFIKRQLVETRQITKHVAQILDSRMNTKYDENDKLIREVKVITLKSKLVSDFRKDFQFYKVREINNYHHAHDAYLNAVVGTALIKKYPKLESEFVYGDYKVYDVRKMIAKSEQEIGKATAKYFFYSNIMNFFKTEITLANGEIRKRPLIETNGETGEIVWDKGRDFATVRKVLSMPQVNIVKKTEVQTGGFSKESILPKRNSDKLIARKKDWDPKKYGGFDSPTVAYSVLVVAKVEKGKSKKLKSVKELLGITIMERSSFEKNPIDFLEAKGYKEVKKDLIIKLPKYSLFELENGRKRMLASAGELQKGNELALPSKYVNFLYLASHYEKLKGSPEDNEQKQLFVEQHKHYLDEIIEQISEFSKRVILADANLDKVLSAYNKHRDKPIREQAENIIHLFTLTNLGAPAAFKYFDTTIDRKRYTSTKEVLDATLIHQSITGLYETRIDLSQLGGDGGEAAAKEAAAKEAAAKEAAAKEAAAKGGMDPLQLLQPLEAEIKGTKLKAHWNSGATITCVPEAFLEDERPIQTMLIKTIHGEKQQDVYYLTFKVQGRKVEAEVLASPYDYILLNPSDVPWLMKKPLQLTVLVPLHEYQERLLQQTALPKEQKELLQKLFLKYDALWQHWENQVGHRRIKPHNIATGTLAPRPQKQYPINPKAKPSIQIVIDDLLKQGVLIQQNSTMNTPVYPVPKPDGKWRMVLDYREVNKTIPLIAAQNQHSAGILSSIYRGKYKTTLDLTNGFWAHPITPESYWLTAFTWQGKQYCWTRLPQGFLNSPALFTADVVDLLKEIPNVQAYVDDIYISHDDPQEHLEQLEKIFSILLNAGYVVSLKKSEIAQREVEFLGFNITKEGRGLTDTFKQKLLNITPPKDLKQLQSILGLLNFARNFIPNYSELVKPLYTIVANANGKFISWTEDNSNQLQHIISVLNQADNLEERNPETRLIIKVNSSPSAGYIRYYNEGSKRPIMYVNYIFSKAEAKFTQTEKLLTTMHKGLIKAMDLAMGQEILVYSPIVSMTKIQRTPLPERKALPVRWITWMTYLEDPRIQFHYDKSLPELQQIPNVTEDVIAKTKHPSEFAMVFYTDGSAIKHPDVNKSHSAGMGIAQVQFIPEYKIVHQWSIPLGDHTAQLAEIAAVEFACKKALKISGPVLIVTDSFYVAESANKELPYWKSNGFLNNKKKPLRHVSKWKSIAECLQLKPDIIIMHEKGHQQPMTTLHTEGNNLADKLATQGSYVVHAGKRTADGSEFEKRTADGSEFESPKKKAKVE

SEQ ID NO: 6438 - protein, 2110 aa, synthetic construct
MPAAKRVKLDGGDKKYSIGLDIGTNSVGWAVITDEYKVPSKKFKVLGNTDRHSIKKNLIGALLFDSGETAEATRLKRTARRRYTRRKNRICYLQEIFSNEMAKVDDSFFHRLEESFLVEEDKKHERHPIFGNIVDEVAYHEKYPTIYHLRKKLVDSTDKADLRLIYLALAHMIKFRGHFLIEGDLNPDNSDVDKLFIQLVQTYNQLFEENPINASGVDAKAILSARLSKSRRLENLIAQLPGEKKNGLFGNLIALSLGLTPNFKSNFDLAEDAKLQLSKDTYDDDLDNLLAQIGDQYADLFLAAKNLSDAILLSDILRVNTEITKAPLSASMIKRYDEHHQDLTLLKALVRQQLPEKYKEIFFDQSKNGYAGYIDGGASQEEFYKFIKPILEKMDGTEELLVKLNREDLLRKQRTFDNGSIPHQIHLGELHAILRRQEDFYPFLKDNREKIEKILTFRIPYYVGPLARGNSRFAWMTRKSEETITPWNFEEVVDKGASAQSFIERMTNFDKNLPNEKVLPKHSLLYEYFTVYNELTKVKYVTEGMRKPAFLSGEQKKAIVDLLFKTNRKVTVKQLKEDYFKKIECFDSVEISGVEDRFNASLGTYHDLLKIIKDKDFLDNEENEDILEDIVLTLTLFEDREMIEERLKTYAHLFDDKVMKQLKRRRYTGWGRLSRKLINGIRDKQSGKTILDFLKSDGFANRNFMQLIHDDSLTFKEDIQKAQVSGQGDSLHEHIANLAGSPAIKKGILQTVKVVDELVKVMGRHKPENIVIEMARENQTTQKGQKNSRERMKRIEEGIKELGSQILKEHPVENTQLQNEKLYLYYLQNGRDMYVDQELDINRLSDYDVDHIVPQSFLKDDSIDNKVLTRSDKARGKSDNVPSEEVVKKMKNYWRQLLNAKLITQRKFDNLTKAERGGLSELDKAGFIKRQLVETRQITKHVAQILDSRMNTKYDENDKLIREVKVITLKSKLVSDFRKDFQFYKVREINNYHHAHDAYLNAVVGTALIKKYPKLESEFVYGDYKVYDVRKMIAKSEQEIGKATAKYFFYSNIMNFFKTEITLANGEIRKRPLIETNGETGEIVWDKGRDFATVRKVLSMPQVNIVKKTEVQTGGFSKESILPKRNSDKLIARKKDWDPKKYGGFDSPTVAYSVLVVAKVEKGKSKKLKSVKELLGITIMERSSFEKNPIDFLEAKGYKEVKKDLIIKLPKYSLFELENGRKRMLASAGELQKGNELALPSKYVNFLYLASHYEKLKGSPEDNEQKQLFVEQHKHYLDEIIEQISEFSKRVILADANLDKVLSAYNKHRDKPIREQAENIIHLFTLTNLGAPAAFKYFDTTIDRKRYTSTKEVLDATLIHQSITGLYETRIDLSQLGGDGGEAAAKEAAAKEAAAKEAAAKEAAAKGGTLNIEDEYRLHETSKEPDVPLGSTWLSDFPQAWAETGGMGLAVRQAPLIIPLKATSTPVSIKQYPMSQEARLGIKPHIQRLLDQGILVPCQSPWNTPLLPVKKPGTNDYRPVQDLREVNKRVEDIHPTVPNPYNLLSGLPPSHQWYTVLDLKDAFFCLRLHPTSQPLFAFEWRDPEMGISGQLTWTRLPQGFKNSPTLFDEALHRDLADFRIQHPDLILLQYVDDLLLAATSEQDCQRGTRALLQTLGNLGYRASAKKAQICQKQVKYLGYLLKEGQRWLTEARKETVMGQPTPKTPRQLREFLGTAGFCRLWIPGFAEMAAPLYPLTKTGTLFNWGPDQQKAYQEIKQALLTAPALGLPDLTKPFELFVDEKQGYAKGVLTQKLGPWRRPVAYLSKKLDPVAAGWPPCLRMVAAIAVLTKDAGKLTMGQPLVILAPHAVEALVKQPPDRWLSNARMTHYQAMLLDTDRVQFGPVVALNPATLLPLPEKEAPHDCLEILAETHGTRPDLTDQPIPDADYTWYTDGSSFLQEGQRRAGAAVTTETEVIWARALPAGTSAQRAELIALTQALKMAEGKKLNVYTDSRYAFATAHVHGEIYRRRGLLTSEGREIKNKNEILALLKALFLPKRLSIIHCPGHQKGNSAEARGNRMADQAAREAAMKAVLETSTLLAGKRTADGSEFEKRTADGSEFESPKKKAKVE

SEQ ID NO: 6439 - protein, 2110 aa, synthetic construct
MPAAKRVKLDGGDKKYSIGLDIGTNSVGWAVITDEYKVPSKKFKVLGNTDRHSIKKNLIGALLFDSGETAEATRLKRTARRRYTRRKNRICYLQEIFSNEMAKVDDSFFHRLEESFLVEEDKKHERHPIFGNIVDEVAYHEKYPTIYHLRKKLVDSTDKADLRLIYLALAHMIKFRGHFLIEGDLNPDNSDVDKLFIQLVQTYNQLFEENPINASGVDAKAILSARLSKSRRLENLIAQLPGEKKNGLFGNLIALSLGLTPNFKSNFDLAEDAKLQLSKDTYDDDLDNLLAQIGDQYADLFLAAKNLSDAILLSDILRVNTEITKAPLSASMIKRYDEHHQDLTLLKALVRQQLPEKYKEIFFDQSKNGYAGYIDGGASQEEFYKFIKPILEKMDGTEELLVKLNREDLLRKQRTFDNGSIPHQIHLGELHAILRRQEDFYPFLKDNREKIEKILTFRIPYYVGPLARGNSRFAWMTRKSEETITPWNFEEVVDKGASAQSFIERMTNFDKNLPNEKVLPKHSLLYEYFTVYNELTKVKYVTEGMRKPAFLSGEQKKAIVDLLFKTNRKVTVKQLKEDYFKKIECFDSVEISGVEDRFNASLGTYHDLLKIIKDKDFLDNEENEDILEDIVLTLTLFEDREMIEERLKTYAHLFDDKVMKQLKRRRYTGWGRLSRKLINGIRDKQSGKTILDFLKSDGFANRNFMQLIHDDSLTFKEDIQKAQVSGQGDSLHEHIANLAGSPAIKKGILQTVKVVDELVKVMGRHKPENIVIEMARENQTTQKGQKNSRERMKRIEEGIKELGSQILKEHPVENTQLQNEKLYLYYLQNGRDMYVDQELDINRLSDYDVDHIVPQSFLKDDSIDNKVLTRSDKARGKSDNVPSEEVVKKMKNYWRQLLNAKLITQRKFDNLTKAERGGLSELDKAGFIKRQLVETRQITKHVAQILDSRMNTKYDENDKLIREVKVITLKSKLVSDFRKDFQFYKVREINNYHHAHDAYLNAVVGTALIKKYPKLESEFVYGDYKVYDVRKMIAKSEQEIGKATAKYFFYSNIMNFFKTEITLANGEIRKRPLIETNGETGEIVWDKGRDFATVRKVLSMPQVNIVKKTEVQTGGFSKESILPKRNSDKLIARKKDWDPKKYGGFDSPTVAYSVLVVAKVEKGKSKKLKSVKELLGITIMERSSFEKNPIDFLEAKGYKEVKKDLIIKLPKYSLFELENGRKRMLASAGELQKGNELALPSKYVNFLYLASHYEKLKGSPEDNEQKQLFVEQHKHYLDEIIEQISEFSKRVILADANLDKVLSAYNKHRDKPIREQAENIIHLFTLTNLGAPAAFKYFDTTIDRKRYTSTKEVLDATLIHQSITGLYETRIDLSQLGGDGGEAAAKEAAAKEAAAKEAAAKEAAAKGGTLNIEDEYRLHETSKEPDVPLGSTWLSDFPQAWAETGGMGLAVRQAPLIIPLKATSTPVSIKQYPMSQEARLGIKPHIQRLLDQGILVPCQSPWNTPLLPVKKPGTNDYRPVQDLREVNKRVEDIHPTVPNPYNLLSGLPPSHQWYTVLDLKDAFFCLRLHPTSQPLFAFEWRDPEMGISGQLTWTRLPQGFKNSPTLFNEALHRDLADFRIQHPDLILLQYVDDLLLAATSEQDCQRGTRALLQTLGNLGYRASAKKAQICQKQVKYLGYLLKEGQRWLTEARKETVMGQPTPKTPRQLREFLGTAGFCRLWIPGFAEMAAPLYPLTKPGTLFNWGPDQQKAYQEIKQALLTAPALGLPDLTKPFELFVDEKQGYAKGVLTQKLGPWRRPVAYLSKKLDPVAAGWPPCLRMVAAIAVLTKDAGKLTMGQPLVILAPHAVEALVKQPPDRWLSNARMTHYQAMLLDTDRVQFGPVVALNPATLLPLPEKEAPHDCLEILAETHGTRPDLTDQPIPDADYTWYTDGSSFLQEGQRRAGAAVTTETEVIWARALPAGTSAQRAELIALTQALKMAEGKKLNVYTDSRYAFATAHVHGEIYRRRGWLTSEGREIKNKNEILALLKALFLPKRLSIIHCPGHQKGNSAEARGNRMADQAAREAAMKAVLETSTLLAGKRTADGSEFEKRTADGSEFESPKKKAKVE

SEQ ID NO: 6440 - protein, 2117 aa, synthetic construct
MPAAKRVKLDGGDKKYSIGLDIGTNSVGWAVITDEYKVPSKKFKVLGNTDRHSIKKNLIGALLFDSGETAEATRLKRTARRRYTRRKNRICYLQEIFSNEMAKVDDSFFHRLEESFLVEEDKKHERHPIFGNIVDEVAYHEKYPTIYHLRKKLVDSTDKADLRLIYLALAHMIKFRGHFLIEGDLNPDNSDVDKLFIQLVQTYNQLFEENPINASGVDAKAILSARLSKSRRLENLIAQLPGEKKNGLFGNLIALSLGLTPNFKSNFDLAEDAKLQLSKDTYDDDLDNLLAQIGDQYADLFLAAKNLSDAILLSDILRVNTEITKAPLSASMIKRYDEHHQDLTLLKALVRQQLPEKYKEIFFDQSKNGYAGYIDGGASQEEFYKFIKPILEKMDGTEELLVKLNREDLLRKQRTFDNGSIPHQIHLGELHAILRRQEDFYPFLKDNREKIEKILTFRIPYYVGPLARGNSRFAWMTRKSEETITPWNFEEVVDKGASAQSFIERMTNFDKNLPNEKVLPKHSLLYEYFTVYNELTKVKYVTEGMRKPAFLSGEQKKAIVDLLFKTNRKVTVKQLKEDYFKKIECFDSVEISGVEDRFNASLGTYHDLLKIIKDKDFLDNEENEDILEDIVLTLTLFEDREMIEERLKTYAHLFDDKVMKQLKRRRYTGWGRLSRKLINGIRDKQSGKTILDFLKSDGFANRNFMQLIHDDSLTFKEDIQKAQVSGQGDSLHEHIANLAGSPAIKKGILQTVKVVDELVKVMGRHKPENIVIEMARENQTTQKGQKNSRERMKRIEEGIKELGSQILKEHPVENTQLQNEKLYLYYLQNGRDMYVDQELDINRLSDYDVDHIVPQSFLKDDSIDNKVLTRSDKARGKSDNVPSEEVVKKMKNYWRQLLNAKLITQRKFDNLTKAERGGLSELDKAGFIKRQLVETRQITKHVAQILDSRMNTKYDENDKLIREVKVITLKSKLVSDFRKDFQFYKVREINNYHHAHDAYLNAVVGTALIKKYPKLESEFVYGDYKVYDVRKMIAKSEQEIGKATAKYFFYSNIMNFFKTEITLANGEIRKRPLIETNGETGEIVWDKGRDFATVRKVLSMPQVNIVKKTEVQTGGFSKESILPKRNSDKLIARKKDWDPKKYGGFDSPTVAYSVLVVAKVEKGKSKKLKSVKELLGITIMERSSFEKNPIDFLEAKGYKEVKKDLIIKLPKYSLFELENGRKRMLASAGELQKGNELALPSKYVNFLYLASHYEKLKGSPEDNEQKQLFVEQHKHYLDEIIEQISEFSKRVILADANLDKVLSAYNKHRDKPIREQAENIIHLFTLTNLGAPAAFKYFDTTIDRKRYTSTKEVLDATLIHQSITGLYETRIDLSQLGGDGGEAAAKEAAAKEAAAKEAAAKEAAAKEAAAKGGTAPLEEEYRLFLEAPIQNVTLLEQWKREIPKVWAEINPPGLASTQAPIHVQLLSTALPVRVRQYPITLEAKRSLRETIRKFRAAGILRPVHSPWNTPLLPVRKSGTSEYRMVQDLREVNKRVETIHPTVPNPYTLLSLLPPDRIWYSVLDLKDAFFCIPLAPESQLIFAFEWADAEEGESGQLTWTRLPQGFKNSPTLFDEALNRDLQGFRLDHPSVSLLQYVDDLLIAADTQAACLSATRDLLMTLAELGYRVSGKKAQLCQEEVTYLGFKIHKGSRSLSNSRTQAILQIPVPKTKRQVREFLGTIGYCRLWIPGFAELAQPLYAATRGGNDPLVWGEKEEEAFQSLKLALTQPPALALPSLDKPFQLFVEETSGAAKGVLTQALGPWKRPVAYLSKRLDPVAAGWPRCLRAIAAAALLTREASKLTFGQDIEITSSHNLESLLRSPPDKWLTNARITQYQVLLLDPPRVRFKQTAALNPATLLPETDDTLPIHHCLDTLDSLTSTRPDLTDQPLAQAEATLFTDGSSYIRDGKRYAGAAVVTLDSVIWAEPLPIGTSAQKAELIALTKALEWSKDKSVNIYTDSRYAFATLHVHGMIYRERGLLTAGGKAIKNAPEILALLTAVWLPKRVAVMHCKGHQKDDAPTSTGNRRADEVAREVAIRPLSTQATISAGKRTADGSEFEKRTADGSEFESPKKKAKVE

SEQ ID NO: 6441 - protein, 2117 aa, synthetic construct
MPAAKRVKLDGGDKKYSIGLDIGTNSVGWAVITDEYKVPSKKFKVLGNTDRHSIKKNLIGALLFDSGETAEATRLKRTARRRYTRRKNRICYLQEIFSNEMAKVDDSFFHRLEESFLVEEDKKHERHPIFGNIVDEVAYHEKYPTIYHLRKKLVDSTDKADLRLIYLALAHMIKFRGHFLIEGDLNPDNSDVDKLFIQLVQTYNQLFEENPINASGVDAKAILSARLSKSRRLENLIAQLPGEKKNGLFGNLIALSLGLTPNFKSNFDLAEDAKLQLSKDTYDDDLDNLLAQIGDQYADLFLAAKNLSDAILLSDILRVNTEITKAPLSASMIKRYDEHHQDLTLLKALVRQQLPEKYKEIFFDQSKNGYAGYIDGGASQEEFYKFIKPILEKMDGTEELLVKLNREDLLRKQRTFDNGSIPHQIHLGELHAILRRQEDFYPFLKDNREKIEKILTFRIPYYVGPLARGNSRFAWMTRKSEETITPWNFEEVVDKGASAQSFIERMTNFDKNLPNEKVLPKHSLLYEYFTVYNELTKVKYVTEGMRKPAFLSGEQKKAIVDLLFKTNRKVTVKQLKEDYFKKIECFDSVEISGVEDRFNASLGTYHDLLKIIKDKDFLDNEENEDILEDIVLTLTLFEDREMIEERLKTYAHLFDDKVMKQLKRRRYTGWGRLSRKLINGIRDKQSGKTILDFLKSDGFANRNFMQLIHDDSLTFKEDIQKAQVSGQGDSLHEHIANLAGSPAIKKGILQTVKVVDELVKVMGRHKPENIVIEMARENQTTQKGQKNSRERMKRIEEGIKELGSQILKEHPVENTQLQNEKLYLYYLQNGRDMYVDQELDINRLSDYDVDHIVPQSFLKDDSIDNKVLTRSDKARGKSDNVPSEEVVKKMKNYWRQLLNAKLITQRKFDNLTKAERGGLSELDKAGFIKRQLVETRQITKHVAQILDSRMNTKYDENDKLIREVKVITLKSKLVSDFRKDFQFYKVREINNYHHAHDAYLNAVVGTALIKKYPKLESEFVYGDYKVYDVRKMIAKSEQEIGKATAKYFFYSNIMNFFKTEITLANGEIRKRPLIETNGETGEIVWDKGRDFATVRKVLSMPQVNIVKKTEVQTGGFSKESILPKRNSDKLIARKKDWDPKKYGGFDSPTVAYSVLVVAKVEKGKSKKLKSVKELLGITIMERSSFEKNPIDFLEAKGYKEVKKDLIIKLPKYSLFELENGRKRMLASAGELQKGNELALPSKYVNFLYLASHYEKLKGSPEDNEQKQLFVEQHKHYLDEIIEQISEFSKRVILADANLDKVLSAYNKHRDKPIREQAENIIHLFTLTNLGAPAAFKYFDTTIDRKRYTSTKEVLDATLIHQSITGLYETRIDLSQLGGDGGEAAAKEAAAKEAAAKEAAAKEAAAKEAAAKGGTAPLEEEYRLFLEAPIQNVTLLEQWKREIPKVWAEINPPGLASTQAPIHVQLLSTALPVRVRQYPITLEAKRSLRETIRKFRAAGILRPVHSPWNTPLLPVRKSGTSEYRMVQDLREVNKRVETIHPTVPNPYTLLSLLPPDRIWYSVLDLKDAFFCIPLAPESQLIFAFEWADAEEGESGQLTWTRLPQGFKNSPTLFNEALNRDLQGFRLDHPSVSLLQYVDDLLIAADTQAACLSATRDLLMTLAELGYRVSGKKAQLCQEEVTYLGFKIHKGSRSLSNSRTQAILQIPVPKTKRQVREFLGTIGYCRLWIPGFAELAQPLYAATRPGNDPLVWGEKEEEAFQSLKLALTQPPALALPSLDKPFQLFVEETSGAAKGVLTQALGPWKRPVAYLSKRLDPVAAGWPRCLRAIAAAALLTREASKLTFGQDIEITSSHNLESLLRSPPDKWLTNARITQYQVLLLDPPRVRFKQTAALNPATLLPETDDTLPIHHCLDTLDSLTSTRPDLTDQPLAQAEATLFTDGSSYIRDGKRYAGAAVVTLDSVIWAEPLPIGTSAQKAELIALTKALEWSKDKSVNIYTDSRYAFATLHVHGMIYRERGWLTAGGKAIKNAPEILALLTAVWLPKRVAVMHCKGHQKDDAPTSTGNRRADEVAREVAIRPLSTQATISAGKRTADGSEFEKRTADGSEFESPKKKAKVE

SEQ ID NO: 6442 - protein, 2121 aa, synthetic construct
MPAAKRVKLDGGDKKYSIGLDIGTNSVGWAVITDEYKVPSKKFKVLGNTDRHSIKKNLIGALLFDSGETAEATRLKRTARRRYTRRKNRICYLQEIFSNEMAKVDDSFFHRLEESFLVEEDKKHERHPIFGNIVDEVAYHEKYPTIYHLRKKLVDSTDKADLRLIYLALAHMIKFRGHFLIEGDLNPDNSDVDKLFIQLVQTYNQLFEENPINASGVDAKAILSARLSKSRRLENLIAQLPGEKKNGLFGNLIALSLGLTPNFKSNFDLAEDAKLQLSKDTYDDDLDNLLAQIGDQYADLFLAAKNLSDAILLSDILRVNTEITKAPLSASMIKRYDEHHQDLTLLKALVRQQLPEKYKEIFFDQSKNGYAGYIDGGASQEEFYKFIKPILEKMDGTEELLVKLNREDLLRKQRTFDNGSIPHQIHLGELHAILRRQEDFYPFLKDNREKIEKILTFRIPYYVGPLARGNSRFAWMTRKSEETITPWNFEEVVDKGASAQSFIERMTNFDKNLPNEKVLPKHSLLYEYFTVYNELTKVKYVTEGMRKPAFLSGEQKKAIVDLLFKTNRKVTVKQLKEDYFKKIECFDSVEISGVEDRFNASLGTYHDLLKIIKDKDFLDNEENEDILEDIVLTLTLFEDREMIEERLKTYAHLFDDKVMKQLKRRRYTGWGRLSRKLINGIRDKQSGKTILDFLKSDGFANRNFMQLIHDDSLTFKEDIQKAQVSGQGDSLHEHIANLAGSPAIKKGILQTVKVVDELVKVMGRHKPENIVIEMARENQTTQKGQKNSRERMKRIEEGIKELGSQILKEHPVENTQLQNEKLYLYYLQNGRDMYVDQELDINRLSDYDVDHIVPQSFLKDDSIDNKVLTRSDKARGKSDNVPSEEVVKKMKNYWRQLLNAKLITQRKFDNLTKAERGGLSELDKAGFIKRQLVETRQITKHVAQILDSRMNTKYDENDKLIREVKVITLKSKLVSDFRKDFQFYKVREINNYHHAHDAYLNAVVGTALIKKYPKLESEFVYGDYKVYDVRKMIAKSEQEIGKATAKYFFYSNIMNFFKTEITLANGEIRKRPLIETNGETGEIVWDKGRDFATVRKVLSMPQVNIVKKTEVQTGGFSKESILPKRNSDKLIARKKDWDPKKYGGFDSPTVAYSVLVVAKVEKGKSKKLKSVKELLGITIMERSSFEKNPIDFLEAKGYKEVKKDLIIKLPKYSLFELENGRKRMLASAGELQKGNELALPSKYVNFLYLASHYEKLKGSPEDNEQKQLFVEQHKHYLDEIIEQISEFSKRVILADANLDKVLSAYNKHRDKPIREQAENIIHLFTLTNLGAPAAFKYFDTTIDRKRYTSTKEVLDATLIHQSITGLYETRIDLSQLGGDGGEAAAKEAAAKEAAAKEAAAKEAAAKEAAAKGGTVSLQDEHRLFDIPVTTSLPDVWLQDFPQAWAETGGLGRAKCQAPIIIDLKPTAVPVSIKQYPMSLEAHMGIRQHIIKFLELGVLRPCRSPWNTPLLPVKKPGTQDYRPVQDLREINKRTVDIHPTVPNPYNLLSTLKPDYSWYTVLDLKDAFFCLPLAPQSQELFAFEWKDPERGISGQLTWTRLPQGFKNSPTLFDEALHRDLTDFRTQHPEVTLLQYVDDLLLAAPTKKACTQGTRHLLQELGEKGYRASAKKAQICQTKVTYLGYILSEGKRWLTPGRIETVARIPPPRNPREVREFLGTAGFCRLWIPGFAELAAPLYALTKESTPFTWQTEHQLAFEALKKALLSAPALGLPDTSKPFTLFLDERQGIAKGVLTQKLGPWKRPVAYLSKKLDPVAAGWPPCLRIMAATAMLVKDSAKLTLGQPLTVITPHTLEAIVRQPPDRWITNARLTHYQALLLDTDRVQFGPPVTLNPATLLPVPENQPSPHDCRQVLAETHGTREDLKDQELPDADHTWYTDGSSYLDSGTRRAGAAVVDGHNTIWAQSLPPGTSAQKAELIALTKALELSKGKKANIYTDSRYAFATAHTHGSIYERRGLLTSEGKEIKNKAEIIALLKALFLPQEVAIIHCPGHQKGQDPVAVGNRQADRVARQAAMAEVLTLATEPDNTSHITAGKRTADGSEFEKRTADGSEFESPKKKAKVE

SEQ ID NO: 6443 - protein, 2192 aa, synthetic construct
MPAAKRVKLDGGDKKYSIGLDIGTNSVGWAVITDEYKVPSKKFKVLGNTDRHSIKKNLIGALLFDSGETAEATRLKRTARRRYTRRKNRICYLQEIFSNEMAKVDDSFFHRLEESFLVEEDKKHERHPIFGNIVDEVAYHEKYPTIYHLRKKLVDSTDKADLRLIYLALAHMIKFRGHFLIEGDLNPDNSDVDKLFIQLVQTYNQLFEENPINASGVDAKAILSARLSKSRRLENLIAQLPGEKKNGLFGNLIALSLGLTPNFKSNFDLAEDAKLQLSKDTYDDDLDNLLAQIGDQYADLFLAAKNLSDAILLSDILRVNTEITKAPLSASMIKRYDEHHQDLTLLKALVRQQLPEKYKEIFFDQSKNGYAGYIDGGASQEEFYKFIKPILEKMDGTEELLVKLNREDLLRKQRTFDNGSIPHQIHLGELHAILRRQEDFYPFLKDNREKIEKILTFRIPYYVGPLARGNSRFAWMTRKSEETITPWNFEEVVDKGASAQSFIERMTNFDKNLPNEKVLPKHSLLYEYFTVYNELTKVKYVTEGMRKPAFLSGEQKKAIVDLLFKTNRKVTVKQLKEDYFKKIECFDSVEISGVEDRFNASLGTYHDLLKIIKDKDFLDNEENEDILEDIVLTLTLFEDREMIEERLKTYAHLFDDKVMKQLKRRRYTGWGRLSRKLINGIRDKQSGKTILDFLKSDGFANRNFMQLIHDDSLTFKEDIQKAQVSGQGDSLHEHIANLAGSPAIKKGILQTVKVVDELVKVMGRHKPENIVIEMARENQTTQKGQKNSRERMKRIEEGIKELGSQILKEHPVENTQLQNEKLYLYYLQNGRDMYVDQELDINRLSDYDVDHIVPQSFLKDDSIDNKVLTRSDKARGKSDNVPSEEVVKKMKNYWRQLLNAKLITQRKFDNLTKAERGGLSELDKAGFIKRQLVETRQITKHVAQILDSRMNTKYDENDKLIREVKVITLKSKLVSDFRKDFQFYKVREINNYHHAHDAYLNAVVGTALIKKYPKLESEFVYGDYKVYDVRKMIAKSEQEIGKATAKYFFYSNIMNFFKTEITLANGEIRKRPLIETNGETGEIVWDKGRDFATVRKVLSMPQVNIVKKTEVQTGGFSKESILPKRNSDKLIARKKDWDPKKYGGFDSPTVAYSVLVVAKVEKGKSKKLKSVKELLGITIMERSSFEKNPIDFLEAKGYKEVKKDLIIKLPKYSLFELENGRKRMLASAGELQKGNELALPSKYVNFLYLASHYEKLKGSPEDNEQKQLFVEQHKHYLDEIIEQISEFSKRVILADANLDKVLSAYNKHRDKPIREQAENIIHLFTLTNLGAPAAFKYFDTTIDRKRYTSTKEVLDATLIHQSITGLYETRIDLSQLGGDGGEAAAKEAAAKEAAAKEAAAKEAAAKEAAAKGGMDLLKPLTVERKGVKIKGYWNSQADITCVPKDLLQGEEPVRQQNVTTIHGTQEGDVYYVNLKIDGRRINTEVIGTTLDYAIITPGDVPWILKKPLELTIKLDLEEQQGTLLNNSILSKKGKEELKQLFEKYSALWQSWENQVGHRRIRPHKIATGTVKPTPQKQYHINPKAKPDIQIVINDLLKQGVLIQKESTMNTPVYPVPKPNGRWRMVLDYRAVNKVTPLIAVQNQHSYGILGSLFKGRYKTTIDLSNGFWAHPIVPEDYWITAFTWQGKQYCWTVLPQGFLNSPGLFTGDVVDLLQGIPNVEVYVDDVYISHDSEKEHLEYLDILFNRLKEAGYIISLKKSNIANSIVDFLGFQITNEGRGLTDTFKEKLENITAPTTLKQLQSILGLLNFARNFIPDFTELIAPLYALIPKSTKNYVPWQIEHSTTLETLITKLNGAEYLQGRKGDKTLIMKVNASYTTGYIRYYNEGEKKPISYVSIVFSKTELKFTELEKLLTTVHKGLLKALDLSMGQNIHVYSPIVSMQNIQKTPQTAKKALASRWLSWLSYLEDPRIRFFYDPQMPALKDLPAVDTGKDNKKHPSNFQHIFYTDGSAITSPTKEGHLNAGMGIVYFINKDGNLQKQQEWSISLGNHTAQFAEIAAFEFALKKCLPLGGNILVVTDSNYVAKAYNEELDVWASNGFVNNRKKPLKHISKWKSVADLKRLRPDVVVTHEPGHQKLDSSPHAYGNNLADQLATQASFKVHAGKRTADGSEFEKRTADGSEFESPKKKAKVE

SEQ ID NO: 6444 - protein, 2106 aa, synthetic construct
MPAAKRVKLDGGDKKYSIGLDIGTNSVGWAVITDEYKVPSKKFKVLGNTDRHSIKKNLIGALLFDSGETAEATRLKRTARRRYTRRKNRICYLQEIFSNEMAKVDDSFFHRLEESFLVEEDKKHERHPIFGNIVDEVAYHEKYPTIYHLRKKLVDSTDKADLRLIYLALAHMIKFRGHFLIEGDLNPDNSDVDKLFIQLVQTYNQLFEENPINASGVDAKAILSARLSKSRRLENLIAQLPGEKKNGLFGNLIALSLGLTPNFKSNFDLAEDAKLQLSKDTYDDDLDNLLAQIGDQYADLFLAAKNLSDAILLSDILRVNTEITKAPLSASMIKRYDEHHQDLTLLKALVRQQLPEKYKEIFFDQSKNGYAGYIDGGASQEEFYKFIKPILEKMDGTEELLVKLNREDLLRKQRTFDNGSIPHQIHLGELHAILRRQEDFYPFLKDNREKIEKILTFRIPYYVGPLARGNSRFAWMTRKSEETITPWNFEEVVDKGASAQSFIERMTNFDKNLPNEKVLPKHSLLYEYFTVYNELTKVKYVTEGMRKPAFLSGEQKKAIVDLLFKTNRKVTVKQLKEDYFKKIECFDSVEISGVEDRFNASLGTYHDLLKIIKDKDFLDNEENEDILEDIVLTLTLFEDREMIEERLKTYAHLFDDKVMKQLKRRRYTGWGRLSRKLINGIRDKQSGKTILDFLKSDGFANRNFMQLIHDDSLTFKEDIQKAQVSGQGDSLHEHIANLAGSPAIKKGILQTVKVVDELVKVMGRHKPENIVIEMARENQTTQKGQKNSRERMKRIEEGIKELGSQILKEHPVENTQLQNEKLYLYYLQNGRDMYVDQELDINRLSDYDVDHIVPQSFLKDDSIDNKVLTRSDKARGKSDNVPSEEVVKKMKNYWRQLLNAKLITQRKFDNLTKAERGGLSELDKAGFIKRQLVETRQITKHVAQILDSRMNTKYDENDKLIREVKVITLKSKLVSDFRKDFQFYKVREINNYHHAHDAYLNAVVGTALIKKYPKLESEFVYGDYKVYDVRKMIAKSEQEIGKATAKYFFYSNIMNFFKTEITLANGEIRKRPLIETNGETGEIVWDKGRDFATVRKVLSMPQVNIVKKTEVQTGGFSKESILPKRNSDKLIARKKDWDPKKYGGFDSPTVAYSVLVVAKVEKGKSKKLKSVKELLGITIMERSSFEKNPIDFLEAKGYKEVKKDLIIKLPKYSLFELENGRKRMLASAGELQKGNELALPSKYVNFLYLASHYEKLKGSPEDNEQKQLFVEQHKHYLDEIIEQISEFSKRVILADANLDKVLSAYNKHRDKPIREQAENIIHLFTLTNLGAPAAFKYFDTTIDRKRYTSTKEVLDATLIHQSITGLYETRIDLSQLGGDGGEAAAKEAAAKEAAAKEAAAKEAAAKEAAAKGGVPWILKKPLELTIKLDLEEQQGTLLNNSILSKKGKEELKQLFEKYSALWQSWENQVGHRRIRPHKIATGTVKPTPQKQYHINPKAKPDIQIVINDLLKQGVLIQKESTMNTPVYPVPKPNGRWRMVLDYRAVNKVTPLIAVQNQHSYGILGSLFKGRYKTTIDLSNGFWAHPIVPEDYWITAFTWQGKQYCWTVLPQGFLNSPGLFTGDVVDLLQGIPNVEVYVDDVYISHDSEKEHLEYLDILFNRLKEAGYIISLKKSNIANSIVDFLGFQITNEGRGLTDTFKEKLENITAPTTLKQLQSILGLLNFARNFIPDFTELIAPLYALIPKSTKNYVPWQIEHSTTLETLITKLNGAEYLQGRKGDKTLIMKVNASYTTGYIRYYNEGEKKPISYVSIVFSKTELKFTELEKLLTTVHKGLLKALDLSMGQNIHVYSPIVSMQNIQKTPQTAKKALASRWLSWLSYLEDPRIRFFYDPQMPALKDLPAVDTGKDNKKHPSNFQHIFYTDGSAITSPTKEGHLNAGMGIVYFINKDGNLQKQQEWSISLGNHTAQFAEIAAFEFALKKCLPLGGNILVVTDSNYVAKAYNEELDVWASNGFVNNRKKPLKHISKWKSVADLKRLRPDVVVTHEPGHQKLDSSPHAYGNNLADQLATQASFKVHAGKRTADGSEFEKRTADGSEFESPKKKAKVE

SEQ ID NO: 6445 - protein, 2192 aa, synthetic construct
MPAAKRVKLDGGDKKYSIGLDIGTNSVGWAVITDEYKVPSKKFKVLGNTDRHSIKKNLIGALLFDSGETAEATRLKRTARRRYTRRKNRICYLQEIFSNEMAKVDDSFFHRLEESFLVEEDKKHERHPIFGNIVDEVAYHEKYPTIYHLRKKLVDSTDKADLRLIYLALAHMIKFRGHFLIEGDLNPDNSDVDKLFIQLVQTYNQLFEENPINASGVDAKAILSARLSKSRRLENLIAQLPGEKKNGLFGNLIALSLGLTPNFKSNFDLAEDAKLQLSKDTYDDDLDNLLAQIGDQYADLFLAAKNLSDAILLSDILRVNTEITKAPLSASMIKRYDEHHQDLTLLKALVRQQLPEKYKEIFFDQSKNGYAGYIDGGASQEEFYKFIKPILEKMDGTEELLVKLNREDLLRKQRTFDNGSIPHQIHLGELHAILRRQEDFYPFLKDNREKIEKILTFRIPYYVGPLARGNSRFAWMTRKSEETITPWNFEEVVDKGASAQSFIERMTNFDKNLPNEKVLPKHSLLYEYFTVYNELTKVKYVTEGMRKPAFLSGEQKKAIVDLLFKTNRKVTVKQLKEDYFKKIECFDSVEISGVEDRFNASLGTYHDLLKIIKDKDFLDNEENEDILEDIVLTLTLFEDREMIEERLKTYAHLFDDKVMKQLKRRRYTGWGRLSRKLINGIRDKQSGKTILDFLKSDGFANRNFMQLIHDDSLTFKEDIQKAQVSGQGDSLHEHIANLAGSPAIKKGILQTVKVVDELVKVMGRHKPENIVIEMARENQTTQKGQKNSRERMKRIEEGIKELGSQILKEHPVENTQLQNEKLYLYYLQNGRDMYVDQELDINRLSDYDVDHIVPQSFLKDDSIDNKVLTRSDKARGKSDNVPSEEVVKKMKNYWRQLLNAKLITQRKFDNLTKAERGGLSELDKAGFIKRQLVETRQITKHVAQILDSRMNTKYDENDKLIREVKVITLKSKLVSDFRKDFQFYKVREINNYHHAHDAYLNAVVGTALIKKYPKLESEFVYGDYKVYDVRKMIAKSEQEIGKATAKYFFYSNIMNFFKTEITLANGEIRKRPLIETNGETGEIVWDKGRDFATVRKVLSMPQVNIVKKTEVQTGGFSKESILPKRNSDKLIARKKDWDPKKYGGFDSPTVAYSVLVVAKVEKGKSKKLKSVKELLGITIMERSSFEKNPIDFLEAKGYKEVKKDLIIKLPKYSLFELENGRKRMLASAGELQKGNELALPSKYVNFLYLASHYEKLKGSPEDNEQKQLFVEQHKHYLDEIIEQISEFSKRVILADANLDKVLSAYNKHRDKPIREQAENIIHLFTLTNLGAPAAFKYFDTTIDRKRYTSTKEVLDATLIHQSITGLYETRIDLSQLGGDGGEAAAKEAAAKEAAAKEAAAKEAAAKEAAAKGGMDLLKPLTVERKGVKIKGYWNSQADITCVPKDLLQGEEPVRQQNVTTIHGTQEGDVYYVNLKIDGRRINTEVIGTTLDYAIITPGDVPWILKKPLELTIKLDLEEQQGTLLNNSILSKKGKEELKQLFEKYSALWQSWENQVGHRRIRPHKIATGTVKPTPQKQYHINPKAKPDIQIVINDLLKQGVLIQKESTMNTPVYPVPKPNGRWRMVLDYRAVNKVTPLIAVQNQHSYGILGSLFKGRYKTTIDLSNGFWAHPIVPEDYWITAFTWQGKQYCWTVLPQGFLNSPGLFNGDVVDLLQGIPNVEVYVDDVYISHDSEKEHLEYLDILFNRLKEAGYIISLKKSNIANSIVDFLGFQITNEGRGLTDTFKEKLENITAPTTLKQLQSILGLLNFARNFIPDFTELIAPLYALIPKSPKNYVPWQIEHSTTLETLITKLNGAEYLQGRKGDKTLIMKVNASYTTGYIRYYNEGEKKPISYVSIVFSKTELKFTELEKLLTTVHKGLLKALDLSMGQNIHVYSPIVSMQNIQKTPQTAKKALASRWLSWLSYLEDPRIRFFYDPQMPALKDLPAVDTGKDNKKHPSNFQHIFYTDGSAITSPTKEGHLNAGMGIVYFINKDGNLQKQQEWSISLGNHTAQFAEIAAFEFALKKCLPLGGNILVVTDSNYVAKAYNEELDVWASNGFVNNRKKPLKHISKWKSVADLKRLRPDVVVTHEPGHQKLDSSPHAYGNNLADQLATQASFKVHAGKRTADGSEFEKRTADGSEFESPKKKAKVE

SEQ ID NO: 6446 - protein, 2192 aa, synthetic construct
MPAAKRVKLDGGDKKYSIGLDIGTNSVGWAVITDEYKVPSKKFKVLGNTDRHSIKKNLIGALLFDSGETAEATRLKRTARRRYTRRKNRICYLQEIFSNEMAKVDDSFFHRLEESFLVEEDKKHERHPIFGNIVDEVAYHEKYPTIYHLRKKLVDSTDKADLRLIYLALAHMIKFRGHFLIEGDLNPDNSDVDKLFIQLVQTYNQLFEENPINASGVDAKAILSARLSKSRRLENLIAQLPGEKKNGLFGNLIALSLGLTPNFKSNFDLAEDAKLQLSKDTYDDDLDNLLAQIGDQYADLFLAAKNLSDAILLSDILRVNTEITKAPLSASMIKRYDEHHQDLTLLKALVRQQLPEKYKEIFFDQSKNGYAGYIDGGASQEEFYKFIKPILEKMDGTEELLVKLNREDLLRKQRTFDNGSIPHQIHLGELHAILRRQEDFYPFLKDNREKIEKILTFRIPYYVGPLARGNSRFAWMTRKSEETITPWNFEEVVDKGASAQSFIERMTNFDKNLPNEKVLPKHSLLYEYFTVYNELTKVKYVTEGMRKPAFLSGEQKKAIVDLLFKTNRKVTVKQLKEDYFKKIECFDSVEISGVEDRFNASLGTYHDLLKIIKDKDFLDNEENEDILEDIVLTLTLFEDREMIEERLKTYAHLFDDKVMKQLKRRRYTGWGRLSRKLINGIRDKQSGKTILDFLKSDGFANRNFMQLIHDDSLTFKEDIQKAQVSGQGDSLHEHIANLAGSPAIKKGILQTVKVVDELVKVMGRHKPENIVIEMARENQTTQKGQKNSRERMKRIEEGIKELGSQILKEHPVENTQLQNEKLYLYYLQNGRDMYVDQELDINRLSDYDVDHIVPQSFLKDDSIDNKVLTRSDKARGKSDNVPSEEVVKKMKNYWRQLLNAKLITQRKFDNLTKAERGGLSELDKAGFIKRQLVETRQITKHVAQILDSRMNTKYDENDKLIREVKVITLKSKLVSDFRKDFQFYKVREINNYHHAHDAYLNAVVGTALIKKYPKLESEFVYGDYKVYDVRKMIAKSEQEIGKATAKYFFYSNIMNFFKTEITLANGEIRKRPLIETNGETGEIVWDKGRDFATVRKVLSMPQVNIVKKTEVQTGGFSKESILPKRNSDKLIARKKDWDPKKYGGFDSPTVAYSVLVVAKVEKGKSKKLKSVKELLGITIMERSSFEKNPIDFLEAKGYKEVKKDLIIKLPKYSLFELENGRKRMLASAGELQKGNELALPSKYVNFLYLASHYEKLKGSPEDNEQKQLFVEQHKHYLDEIIEQISEFSKRVILADANLDKVLSAYNKHRDKPIREQAENIIHLFTLTNLGAPAAFKYFDTTIDRKRYTSTKEVLDATLIHQSITGLYETRIDLSQLGGDGGEAAAKEAAAKEAAAKEAAAKEAAAKEAAAKGGMDLLKPLTVERKGVKIKGYWNSQADITCVPKDLLQGEEPVRQQNVTTIHGTQEGDVYYVNLKIDGRRINTEVIGTTLDYAIITPGDVPWILKKPLELTIKLDLEEQQGTLLNNSILSKKGKEELKQLFEKYSALWQSWENQVGHRRIRPHKIATGTVKPTPQKQYHINPKAKPDIQIVINDLLKQGVLIQKESTMNTPVYPVPKPNGRWRMVLDYRAVNKVTPLIAVQNQHSYGILGSLFKGRYKTTIDLSNGFWAHPIVPEDYWITAFTWQGKQYCWTVLPQGFLNSPGLFNGDVVDLLQGIPNVEVYVDDVYISHDSEKEHLEYLDILFNRLKEAGYIISLKKSNIANSIVDFLGFQITNEGRGLTDTFKEKLENITAPTTLKQLQSILGKLNFARNFIPDFTELIAPLYALIPKSPKNYVPWQIEHSTTLETLITKLNGAEYLQGRKGDKTLIMKVNASYTTGYIRYYNEGEKKPISYVSIVFSKTELKFTELEKLLTTVHKGLLKALDLSMGQNIHVYSPIVSMQNIQKTPQTAKKALASRWLSWLSYLEDPRIRFFYDPQMPALKDLPAVDTGKDNKKHPSNFQHIFYTDGSAITSPTKEGHLNAGMGIVYFINKDGNLQKQQEWSISLGNHTAQFAEIAAFEFALKKCLPLGGNILVVTDSNYVAKAYNEELDVWASNGFVNNRKKPLKHISKWKSVADLKRLRPDVVVTHEPGHQKLDSSPHAYGNNLADQLATQASFKVHAGKRTADGSEFEKRTADGSEFESPKKKAKVE

SEQ ID NO: 6447 - protein, 2195 aa, synthetic construct
MPAAKRVKLDGGDKKYSIGLDIGTNSVGWAVITDEYKVPSKKFKVLGNTDRHSIKKNLIGALLFDSGETAEATRLKRTARRRYTRRKNRICYLQEIFSNEMAKVDDSFFHRLEESFLVEEDKKHERHPIFGNIVDEVAYHEKYPTIYHLRKKLVDSTDKADLRLIYLALAHMIKFRGHFLIEGDLNPDNSDVDKLFIQLVQTYNQLFEENPINASGVDAKAILSARLSKSRRLENLIAQLPGEKKNGLFGNLIALSLGLTPNFKSNFDLAEDAKLQLSKDTYDDDLDNLLAQIGDQYADLFLAAKNLSDAILLSDILRVNTEITKAPLSASMIKRYDEHHQDLTLLKALVRQQLPEKYKEIFFDQSKNGYAGYIDGGASQEEFYKFIKPILEKMDGTEELLVKLNREDLLRKQRTFDNGSIPHQIHLGELHAILRRQEDFYPFLKDNREKIEKILTFRIPYYVGPLARGNSRFAWMTRKSEETITPWNFEEVVDKGASAQSFIERMTNFDKNLPNEKVLPKHSLLYEYFTVYNELTKVKYVTEGMRKPAFLSGEQKKAIVDLLFKTNRKVTVKQLKEDYFKKIECFDSVEISGVEDRFNASLGTYHDLLKIIKDKDFLDNEENEDILEDIVLTLTLFEDREMIEERLKTYAHLFDDKVMKQLKRRRYTGWGRLSRKLINGIRDKQSGKTILDFLKSDGFANRNFMQLIHDDSLTFKEDIQKAQVSGQGDSLHEHIANLAGSPAIKKGILQTVKVVDELVKVMGRHKPENIVIEMARENQTTQKGQKNSRERMKRIEEGIKELGSQILKEHPVENTQLQNEKLYLYYLQNGRDMYVDQELDINRLSDYDVDHIVPQSFLKDDSIDNKVLTRSDKARGKSDNVPSEEVVKKMKNYWRQLLNAKLITQRKFDNLTKAERGGLSELDKAGFIKRQLVETRQITKHVAQILDSRMNTKYDENDKLIREVKVITLKSKLVSDFRKDFQFYKVREINNYHHAHDAYLNAVVGTALIKKYPKLESEFVYGDYKVYDVRKMIAKSEQEIGKATAKYFFYSNIMNFFKTEITLANGEIRKRPLIETNGETGEIVWDKGRDFATVRKVLSMPQVNIVKKTEVQTGGFSKESILPKRNSDKLIARKKDWDPKKYGGFDSPTVAYSVLVVAKVEKGKSKKLKSVKELLGITIMERSSFEKNPIDFLEAKGYKEVKKDLIIKLPKYSLFELENGRKRMLASAGELQKGNELALPSKYVNFLYLASHYEKLKGSPEDNEQKQLFVEQHKHYLDEIIEQISEFSKRVILADANLDKVLSAYNKHRDKPIREQAENIIHLFTLTNLGAPAAFKYFDTTIDRKRYTSTKEVLDATLIHQSITGLYETRIDLSQLGGDGGEAAAKEAAAKEAAAKEAAAKEAAAKEAAAKGGMNPLQLLQPLPAEIKGTKLLAHWNSGATITCIPESFLEDEQPIKKTLIKTIHGEKQQNVYYVTFKVKGRKVEAEVIASPYEYILLSPTDVPWLTQQPLQLTILVPLQEYQEKILSKTALPEDQKQQLKTLFVKYDNLWQHWENQVGHRKIRPHNIATGDYPPRPQKQYPINPKAKPSIQIVIDDLLKQGVLTPQNSTMNTPVYPVPKPDGRWRMVLDYREVNKTIPLTAAQNQHSAGILATIVRQKYKTTLDLANGFWAHPITPESYWLTAFTWQGKQYCWTRLPQGFLNSPALFTADVVDLLKEIPNVQVYVDDIYLSHDDPKEHVQQLEKVFQILLQAGYVVSLKKSEIGQKTVEFLGFNITKEGRGLTDTFKTKLLNITPPKDLKQLQSILGLLNFARNFIPNFAELVQPLYNLIASAKGKYIEWSEENTKQLNMVIEALNTASNLEERLPEQRLVIKVNTSPSAGYVRYYNETGKKPIMYLNYVFSKAELKFSMLEKLLTTMHKALIKAMDLAMGQEILVYSPIVSMTKIQKTPLPERKALPIRWITWMTYLEDPRIQFHYDKTLPELKHIPDVYTSSQSPVKHPSQYEGVFYTDGSAIKSPDPTKSNNAGMGIVHATYKPEYQVLNQWSIPLGNHTAQMAEIAAVEFACKKALKIPGPVLVITDSFYVAESANKELPYWKSNGFVNNKKKPLKHISKWKSIAECLSMKPDITIQHEKGISLQIPVFILKGNALADKLATQGSYVVNAGKRTADGSEFEKRTADGSEFESPKKKAKVE

SEQ ID NO: 6448 - protein, 2106 aa, synthetic construct
MPAAKRVKLDGGDKKYSIGLDIGTNSVGWAVITDEYKVPSKKFKVLGNTDRHSIKKNLIGALLFDSGETAEATRLKRTARRRYTRRKNRICYLQEIFSNEMAKVDDSFFHRLEESFLVEEDKKHERHPIFGNIVDEVAYHEKYPTIYHLRKKLVDSTDKADLRLIYLALAHMIKFRGHFLIEGDLNPDNSDVDKLFIQLVQTYNQLFEENPINASGVDAKAILSARLSKSRRLENLIAQLPGEKKNGLFGNLIALSLGLTPNFKSNFDLAEDAKLQLSKDTYDDDLDNLLAQIGDQYADLFLAAKNLSDAILLSDILRVNTEITKAPLSASMIKRYDEHHQDLTLLKALVRQQLPEKYKEIFFDQSKNGYAGYIDGGASQEEFYKFIKPILEKMDGTEELLVKLNREDLLRKQRTFDNGSIPHQIHLGELHAILRRQEDFYPFLKDNREKIEKILTFRIPYYVGPLARGNSRFAWMTRKSEETITPWNFEEVVDKGASAQSFIERMTNFDKNLPNEKVLPKHSLLYEYFTVYNELTKVKYVTEGMRKPAFLSGEQKKAIVDLLFKTNRKVTVKQLKEDYFKKIECFDSVEISGVEDRFNASLGTYHDLLKIIKDKDFLDNEENEDILEDIVLTLTLFEDREMIEERLKTYAHLFDDKVMKQLKRRRYTGWGRLSRKLINGIRDKQSGKTILDFLKSDGFANRNFMQLIHDDSLTFKEDIQKAQVSGQGDSLHEHIANLAGSPAIKKGILQTVKVVDELVKVMGRHKPENIVIEMARENQTTQKGQKNSRERMKRIEEGIKELGSQILKEHPVENTQLQNEKLYLYYLQNGRDMYVDQELDINRLSDYDVDHIVPQSFLKDDSIDNKVLTRSDKARGKSDNVPSEEVVKKMKNYWRQLLNAKLITQRKFDNLTKAERGGLSELDKAGFIKRQLVETRQITKHVAQILDSRMNTKYDENDKLIREVKVITLKSKLVSDFRKDFQFYKVREINNYHHAHDAYLNAVVGTALIKKYPKLESEFVYGDYKVYDVRKMIAKSEQEIGKATAKYFFYSNIMNFFKTEITLANGEIRKRPLIETNGETGEIVWDKGRDFATVRKVLSMPQVNIVKKTEVQTGGFSKESILPKRNSDKLIARKKDWDPKKYGGFDSPTVAYSVLVVAKVEKGKSKKLKSVKELLGITIMERSSFEKNPIDFLEAKGYKEVKKDLIIKLPKYSLFELENGRKRMLASAGELQKGNELALPSKYVNFLYLASHYEKLKGSPEDNEQKQLFVEQHKHYLDEIIEQISEFSKRVILADANLDKVLSAYNKHRDKPIREQAENIIHLFTLTNLGAPAAFKYFDTTIDRKRYTSTKEVLDATLIHQSITGLYETRIDLSQLGGDGGEAAAKEAAAKEAAAKEAAAKEAAAKEAAAKGGVPWLTQQPLQLTILVPLQEYQEKILSKTALPEDQKQQLKTLFVKYDNLWQHWENQVGHRKIRPHNIATGDYPPRPQKQYPINPKAKPSIQIVIDDLLKQGVLTPQNSTMNTPVYPVPKPDGRWRMVLDYREVNKTIPLTAAQNQHSAGILATIVRQKYKTTLDLANGFWAHPITPESYWLTAFTWQGKQYCWTRLPQGFLNSPALFNADVVDLLKEIPNVQVYVDDIYLSHDDPKEHVQQLEKVFQILLQAGYVVSLKKSEIGQKTVEFLGFNITKEGRGLTDTFKTKLLNITPPKDLKQLQSILGKLNFARNFIPNFAELVQPLYNLIAPAKGKYIEWSEENTKQLNMVIEALNTASNLEERLPEQRLVIKVNTSPSAGYVRYYNETGKKPIMYLNYVFSKAELKFSMLEKLLTTMHKALIKAMDLAMGQEILVYSPIVSMTKIQKTPLPERKALPIRWITWMTYLEDPRIQFHYDKTLPELKHIPDVYTSSQSPVKHPSQYEGVFYTDGSAIKSPDPTKSNNAGMGIVHATYKPEYQVLNQWSIPLGNHTAQMAEIAAVEFACKKALKIPGPVLVITDSFYVAESANKELPYWKSNGFVNNKKKPLKHISKWKSIAECLSMKPDITIQHEKGISLQIPVFILKGNALADKLATQGSYVVNAGKRTADGSEFEKRTADGSEFESPKKKAKVE

SEQ ID NO: 6449 - protein, 2195 aa, synthetic construct
MPAAKRVKLDGGDKKYSIGLDIGTNSVGWAVITDEYKVPSKKFKVLGNTDRHSIKKNLIGALLFDSGETAEATRLKRTARRRYTRRKNRICYLQEIFSNEMAKVDDSFFHRLEESFLVEEDKKHERHPIFGNIVDEVAYHEKYPTIYHLRKKLVDSTDKADLRLIYLALAHMIKFRGHFLIEGDLNPDNSDVDKLFIQLVQTYNQLFEENPINASGVDAKAILSARLSKSRRLENLIAQLPGEKKNGLFGNLIALSLGLTPNFKSNFDLAEDAKLQLSKDTYDDDLDNLLAQIGDQYADLFLAAKNLSDAILLSDILRVNTEITKAPLSASMIKRYDEHHQDLTLLKALVRQQLPEKYKEIFFDQSKNGYAGYIDGGASQEEFYKFIKPILEKMDGTEELLVKLNREDLLRKQRTFDNGSIPHQIHLGELHAILRRQEDFYPFLKDNREKIEKILTFRIPYYVGPLARGNSRFAWMTRKSEETITPWNFEEVVDKGASAQSFIERMTNFDKNLPNEKVLPKHSLLYEYFTVYNELTKVKYVTEGMRKPAFLSGEQKKAIVDLLFKTNRKVTVKQLKEDYFKKIECFDSVEISGVEDRFNASLGTYHDLLKIIKDKDFLDNEENEDILEDIVLTLTLFEDREMIEERLKTYAHLFDDKVMKQLKRRRYTGWGRLSRKLINGIRDKQSGKTILDFLKSDGFANRNFMQLIHDDSLTFKEDIQKAQVSGQGDSLHEHIANLAGSPAIKKGILQTVKVVDELVKVMGRHKPENIVIEMARENQTTQKGQKNSRERMKRIEEGIKELGSQILKEHPVENTQLQNEKLYLYYLQNGRDMYVDQELDINRLSDYDVDHIVPQSFLKDDSIDNKVLTRSDKARGKSDNVPSEEVVKKMKNYWRQLLNAKLITQRKFDNLTKAERGGLSELDKAGFIKRQLVETRQITKHVAQILDSRMNTKYDENDKLIREVKVITLKSKLVSDFRKDFQFYKVREINNYHHAHDAYLNAVVGTALIKKYPKLESEFVYGDYKVYDVRKMIAKSEQEIGKATAKYFFYSNIMNFFKTEITLANGEIRKRPLIETNGETGEIVWDKGRDFATVRKVLSMPQVNIVKKTEVQTGGFSKESILPKRNSDKLIARKKDWDPKKYGGFDSPTVAYSVLVVAKVEKGKSKKLKSVKELLGITIMERSSFEKNPIDFLEAKGYKEVKKDLIIKLPKYSLFELENGRKRMLASAGELQKGNELALPSKYVNFLYLASHYEKLKGSPEDNEQKQLFVEQHKHYLDEIIEQISEFSKRVILADANLDKVLSAYNKHRDKPIREQAENIIHLFTLTNLGAPAAFKYFDTTIDRKRYTSTKEVLDATLIHQSITGLYETRIDLSQLGGDGGEAAAKEAAAKEAAAKEAAAKEAAAKEAAAKGGMNPLQLLQPLPAEIKGTKLLAHWNSGATITCIPESFLEDEQPIKKTLIKTIHGEKQQNVYYVTFKVKGRKVEAEVIASPYEYILLSPTDVPWLTQQPLQLTILVPLQEYQEKILSKTALPEDQKQQLKTLFVKYDNLWQHWENQVGHRKIRPHNIATGDYPPRPQKQYPINPKAKPSIQIVIDDLLKQGVLTPQNSTMNTPVYPVPKPDGRWRMVLDYREVNKTIPLTAAQNQHSAGILATIVRQKYKTTLDLANGFWAHPITPESYWLTAFTWQGKQYCWTRLPQGFLNSPALFNADVVDLLKEIPNVQVYVDDIYLSHDDPKEHVQQLEKVFQILLQAGYVVSLKKSEIGQKTVEFLGFNITKEGRGLTDTFKTKLLNITPPKDLKQLQSILGLLNFARNFIPNFAELVQPLYNLIAPAKGKYIEWSEENTKQLNMVIEALNTASNLEERLPEQRLVIKVNTSPSAGYVRYYNETGKKPIMYLNYVFSKAELKFSMLEKLLTTMHKALIKAMDLAMGQEILVYSPIVSMTKIQKTPLPERKALPIRWITWMTYLEDPRIQFHYDKTLPELKHIPDVYTSSQSPVKHPSQYEGVFYTDGSAIKSPDPTKSNNAGMGIVHATYKPEYQVLNQWSIPLGNHTAQMAEIAAVEFACKKALKIPGPVLVITDSFYVAESANKELPYWKSNGFVNNKKKPLKHISKWKSIAECLSMKPDITIQHEKGISLQIPVFILKGNALADKLATQGSYVVNAGKRTADGSEFEKRTADGSEFESPKKKAKVE

SEQ ID NO: 6450 - protein, 2113 aa, synthetic construct
MPAAKRVKLDGGDKKYSIGLDIGTNSVGWAVITDEYKVPSKKFKVLGNTDRHSIKKNLIGALLFDSGETAEATRLKRTARRRYTRRKNRICYLQEIFSNEMAKVDDSFFHRLEESFLVEEDKKHERHPIFGNIVDEVAYHEKYPTIYHLRKKLVDSTDKADLRLIYLALAHMIKFRGHFLIEGDLNPDNSDVDKLFIQLVQTYNQLFEENPINASGVDAKAILSARLSKSRRLENLIAQLPGEKKNGLFGNLIALSLGLTPNFKSNFDLAEDAKLQLSKDTYDDDLDNLLAQIGDQYADLFLAAKNLSDAILLSDILRVNTEITKAPLSASMIKRYDEHHQDLTLLKALVRQQLPEKYKEIFFDQSKNGYAGYIDGGASQEEFYKFIKPILEKMDGTEELLVKLNREDLLRKQRTFDNGSIPHQIHLGELHAILRRQEDFYPFLKDNREKIEKILTFRIPYYVGPLARGNSRFAWMTRKSEETITPWNFEEVVDKGASAQSFIERMTNFDKNLPNEKVLPKHSLLYEYFTVYNELTKVKYVTEGMRKPAFLSGEQKKAIVDLLFKTNRKVTVKQLKEDYFKKIECFDSVEISGVEDRFNASLGTYHDLLKIIKDKDFLDNEENEDILEDIVLTLTLFEDREMIEERLKTYAHLFDDKVMKQLKRRRYTGWGRLSRKLINGIRDKQSGKTILDFLKSDGFANRNFMQLIHDDSLTFKEDIQKAQVSGQGDSLHEHIANLAGSPAIKKGILQTVKVVDELVKVMGRHKPENIVIEMARENQTTQKGQKNSRERMKRIEEGIKELGSQILKEHPVENTQLQNEKLYLYYLQNGRDMYVDQELDINRLSDYDVDHIVPQSFLKDDSIDNKVLTRSDKARGKSDNVPSEEVVKKMKNYWRQLLNAKLITQRKFDNLTKAERGGLSELDKAGFIKRQLVETRQITKHVAQILDSRMNTKYDENDKLIREVKVITLKSKLVSDFRKDFQFYKVREINNYHHAHDAYLNAVVGTALIKKYPKLESEFVYGDYKVYDVRKMIAKSEQEIGKATAKYFFYSNIMNFFKTEITLANGEIRKRPLIETNGETGEIVWDKGRDFATVRKVLSMPQVNIVKKTEVQTGGFSKESILPKRNSDKLIARKKDWDPKKYGGFDSPTVAYSVLVVAKVEKGKSKKLKSVKELLGITIMERSSFEKNPIDFLEAKGYKEVKKDLIIKLPKYSLFELENGRKRMLASAGELQKGNELALPSKYVNFLYLASHYEKLKGSPEDNEQKQLFVEQHKHYLDEIIEQISEFSKRVILADANLDKVLSAYNKHRDKPIREQAENIIHLFTLTNLGAPAAFKYFDTTIDRKRYTSTKEVLDATLIHQSITGLYETRIDLSQLGGDGGEAAAKEAAAKEAAAKEAAAKEAAAKEAAAKGGVLNLEEEYRLHEKPVPSSIDPSWLQLFPTVWAERAGMGLANQVPPVVVELRSGASPVAVRQYPMSKEAREGIRPHIQKFLDLGVLVPCRSPWNTPLLPVKKPGTNDYRPVQDLREINKRVQDIHPTVPNPYNLLSSLPPSYTWYSVLDLKDAFFCLRLHPNSQPLFAFEWKDPEKGNTGQLTWTRLPQGFKNSPTLFDEALHRDLAPFRALNPQVVLLQYVDDLLVAAPTYEDCKKGTQKLLQELSKLGYRVSAKKAQLCQREVTYLGYLLKEGKRWLTPARKATVMKIPVPTTPRQVREFLGTAGFCRLWIPGFASLAAPLYPLTKESIPFIWTEEHQQAFDHIKKALLSAPALALPDLTKPFTLYIDERAGVARGVLTQTLGPWRRPVAYLSKKLDPVASGWPTCLKAVAAVALLLKDADKLTLGQNVTVIASHSLESIVRQPPDRWMTNARMTHYQSLLLNERVSFAPPAVLNPATLLPVESEATPVHRCSEILAEETGTRRDLEDQPLPGVPTWYTDGSSFITEGKRRAGAPIVDGKRTVWASSLPEGTSAQKAELVALTQALRLAEGKNINIYTDSRYAFATAHIHGAIYKQRGLLTSAGKDIKNKEEILALLEAIHLPRRVAIIHCPGHQRGSNPVATGNRRADEAAKQAALSTRVLAGTTKPAGKRTADGSEFEKRTADGSEFESPKKKAKVE

SEQ ID NO: 6451 - protein, 2113 aa, synthetic construct
MPAAKRVKLDGGDKKYSIGLDIGTNSVGWAVITDEYKVPSKKFKVLGNTDRHSIKKNLIGALLFDSGETAEATRLKRTARRRYTRRKNRICYLQEIFSNEMAKVDDSFFHRLEESFLVEEDKKHERHPIFGNIVDEVAYHEKYPTIYHLRKKLVDSTDKADLRLIYLALAHMIKFRGHFLIEGDLNPDNSDVDKLFIQLVQTYNQLFEENPINASGVDAKAILSARLSKSRRLENLIAQLPGEKKNGLFGNLIALSLGLTPNFKSNFDLAEDAKLQLSKDTYDDDLDNLLAQIGDQYADLFLAAKNLSDAILLSDILRVNTEITKAPLSASMIKRYDEHHQDLTLLKALVRQQLPEKYKEIFFDQSKNGYAGYIDGGASQEEFYKFIKPILEKMDGTEELLVKLNREDLLRKQRTFDNGSIPHQIHLGELHAILRRQEDFYPFLKDNREKIEKILTFRIPYYVGPLARGNSRFAWMTRKSEETITPWNFEEVVDKGASAQSFIERMTNFDKNLPNEKVLPKHSLLYEYFTVYNELTKVKYVTEGMRKPAFLSGEQKKAIVDLLFKTNRKVTVKQLKEDYFKKIECFDSVEISGVEDRFNASLGTYHDLLKIIKDKDFLDNEENEDILEDIVLTLTLFEDREMIEERLKTYAHLFDDKVMKQLKRRRYTGWGRLSRKLINGIRDKQSGKTILDFLKSDGFANRNFMQLIHDDSLTFKEDIQKAQVSGQGDSLHEHIANLAGSPAIKKGILQTVKVVDELVKVMGRHKPENIVIEMARENQTTQKGQKNSRERMKRIEEGIKELGSQILKEHPVENTQLQNEKLYLYYLQNGRDMYVDQELDINRLSDYDVDHIVPQSFLKDDSIDNKVLTRSDKARGKSDNVPSEEVVKKMKNYWRQLLNAKLITQRKFDNLTKAERGGLSELDKAGFIKRQLVETRQITKHVAQILDSRMNTKYDENDKLIREVKVITLKSKLVSDFRKDFQFYKVREINNYHHAHDAYLNAVVGTALIKKYPKLESEFVYGDYKVYDVRKMIAKSEQEIGKATAKYFFYSNIMNFFKTEITLANGEIRKRPLIETNGETGEIVWDKGRDFATVRKVLSMPQVNIVKKTEVQTGGFSKESILPKRNSDKLIARKKDWDPKKYGGFDSPTVAYSVLVVAKVEKGKSKKLKSVKELLGITIMERSSFEKNPIDFLEAKGYKEVKKDLIIKLPKYSLFELENGRKRMLASAGELQKGNELALPSKYVNFLYLASHYEKLKGSPEDNEQKQLFVEQHKHYLDEIIEQISEFSKRVILADANLDKVLSAYNKHRDKPIREQAENIIHLFTLTNLGAPAAFKYFDTTIDRKRYTSTKEVLDATLIHQSITGLYETRIDLSQLGGDGGEAAAKEAAAKEAAAKEAAAKEAAAKEAAAKGGVLNLEEEYRLHEKPVPSSIDPSWLQLFPTVWAERAGMGLANQVPPVVVELRSGASPVAVRQYPMSKEAREGIRPHIQKFLDLGVLVPCRSPWNTPLLPVKKPGTNDYRPVQDLREINKRVQDIHPTVPNPYNLLSSLPPSYTWYSVLDLKDAFFCLRLHPNSQPLFAFEWKDPEKGNTGQLTWTRLPQGFKNSPTLFNEALHRDLAPFRALNPQVVLLQYVDDLLVAAPTYEDCKKGTQKLLQELSKLGYRVSAKKAQLCQREVTYLGYLLKEGKRWLTPARKATVMKIPVPTTPRQVREFLGTAGFCRLWIPGFASLAAPLYPLTKPSIPFIWTEEHQQAFDHIKKALLSAPALALPDLTKPFTLYIDERAGVARGVLTQTLGPWRRPVAYLSKKLDPVASGWPTCLKAVAAVALLLKDADKLTLGQNVTVIASHSLESIVRQPPDRWMTNARMTHYQSLLLNERVSFAPPAVLNPATLLPVESEATPVHRCSEILAEETGTRRDLEDQPLPGVPTWYTDGSSFITEGKRRAGAPIVDGKRTVWASSLPEGTSAQKAELVALTQALRLAEGKNINIYTDSRYAFATAHIHGAIYKQRGWLTSAGKDIKNKEEILALLEAIHLPRRVAIIHCPGHQRGSNPVATGNRRADEAAKQAALSTRVLAGTTKPAGKRTADGSEFEKRTADGSEFESPKKKAKVE

SEQ ID NO: 6452 - protein, 2237 aa, synthetic construct
MPAAKRVKLDGGDKKYSIGLDIGTNSVGWAVITDEYKVPSKKFKVLGNTDRHSIKKNLIGALLFDSGETAEATRLKRTARRRYTRRKNRICYLQEIFSNEMAKVDDSFFHRLEESFLVEEDKKHERHPIFGNIVDEVAYHEKYPTIYHLRKKLVDSTDKADLRLIYLALAHMIKFRGHFLIEGDLNPDNSDVDKLFIQLVQTYNQLFEENPINASGVDAKAILSARLSKSRRLENLIAQLPGEKKNGLFGNLIALSLGLTPNFKSNFDLAEDAKLQLSKDTYDDDLDNLLAQIGDQYADLFLAAKNLSDAILLSDILRVNTEITKAPLSASMIKRYDEHHQDLTLLKALVRQQLPEKYKEIFFDQSKNGYAGYIDGGASQEEFYKFIKPILEKMDGTEELLVKLNREDLLRKQRTFDNGSIPHQIHLGELHAILRRQEDFYPFLKDNREKIEKILTFRIPYYVGPLARGNSRFAWMTRKSEETITPWNFEEVVDKGASAQSFIERMTNFDKNLPNEKVLPKHSLLYEYFTVYNELTKVKYVTEGMRKPAFLSGEQKKAIVDLLFKTNRKVTVKQLKEDYFKKIECFDSVEISGVEDRFNASLGTYHDLLKIIKDKDFLDNEENEDILEDIVLTLTLFEDREMIEERLKTYAHLFDDKVMKQLKRRRYTGWGRLSRKLINGIRDKQSGKTILDFLKSDGFANRNFMQLIHDDSLTFKEDIQKAQVSGQGDSLHEHIANLAGSPAIKKGILQTVKVVDELVKVMGRHKPENIVIEMARENQTTQKGQKNSRERMKRIEEGIKELGSQILKEHPVENTQLQNEKLYLYYLQNGRDMYVDQELDINRLSDYDVDHIVPQSFLKDDSIDNKVLTRSDKARGKSDNVPSEEVVKKMKNYWRQLLNAKLITQRKFDNLTKAERGGLSELDKAGFIKRQLVETRQITKHVAQILDSRMNTKYDENDKLIREVKVITLKSKLVSDFRKDFQFYKVREINNYHHAHDAYLNAVVGTALIKKYPKLESEFVYGDYKVYDVRKMIAKSEQEIGKATAKYFFYSNIMNFFKTEITLANGEIRKRPLIETNGETGEIVWDKGRDFATVRKVLSMPQVNIVKKTEVQTGGFSKESILPKRNSDKLIARKKDWDPKKYGGFDSPTVAYSVLVVAKVEKGKSKKLKSVKELLGITIMERSSFEKNPIDFLEAKGYKEVKKDLIIKLPKYSLFELENGRKRMLASAGELQKGNELALPSKYVNFLYLASHYEKLKGSPEDNEQKQLFVEQHKHYLDEIIEQISEFSKRVILADANLDKVLSAYNKHRDKPIREQAENIIHLFTLTNLGAPAAFKYFDTTIDRKRYTSTKEVLDATLIHQSITGLYETRIDLSQLGGDGGEAAAKEAAAKEAAAKEAAAKEAAAKEAAAKGGTLGDQGSRGSDPLPEPRVTLTVEGIPTEFLVNTGAEHSVLTKPMGKMGSKRTVVAGATGSKVYPWTTKRLLKIGQKQVTHSFLVIPECPAPLLGRDLLTKLKAQIQFSTEGPQVTWEDRPAMCLVLNLEEEYRLHEKPVPPSIDPSWLQLFPMVWAEKAGMGLANQVPPVVVELKSDASPVAVRQYPMSKEAREGIRPHIQRFLDLGILVPCQSPWNTPLLPVKKPGTNDYRPVQDLREVNKRVQDIHPTVPNPYNLLSSLPPSHTWYSVLDLKDAFFCLKLHPNSQPLFAFEWRDPEKGNTGQLTWTRLPQGFKNSPTLFDEALHRDLASFRALNPQVVMLQYVDDLLVAAPTYRDCKEGTRRLLQELSKLGYRVSAKKAQLCREEVTYLGYLLKGGKRWLTPARKATVMKIPTPTTPRQVREFLGTAGFCRLWIPGFASLAAPLYPLTREKVPFTWTEAHQEAFGRIKEALLSAPALALPDLTKPFALYVDEKEGVARGVLTQTLGPWRRPVAYLSKKLDPVASGWPTCLKAIAAVALLLKDADKLTLGQNVLVIAPHNLESIVRQPPDRWMTNARMTHYQSLLLNERVSFAPPAILNPATLLPVESDDTPIHICSEILAEETGTRPDLRDQPLPGVPAWYTDGSSFIMDGRRQAGAAIVDNKRTVWASNLPEGTSAQKAELIALTQALRLAEGKSINIYTDSRYAFATAHVHGAIYKQRGLLTSAGKDIKNKEEILALLEAIHLPKRVAIIHCPGHQRGTDPVATGNRKADEAAKQAAQSTRILTETTKNAGKRTADGSEFEKRTADGSEFESPKKKAKVE

SEQ ID NO: 6453 - protein, 2237 aa, synthetic construct
MPAAKRVKLDGGDKKYSIGLDIGTNSVGWAVITDEYKVPSKKFKVLGNTDRHSIKKNLIGALLFDSGETAEATRLKRTARRRYTRRKNRICYLQEIFSNEMAKVDDSFFHRLEESFLVEEDKKHERHPIFGNIVDEVAYHEKYPTIYHLRKKLVDSTDKADLRLIYLALAHMIKFRGHFLIEGDLNPDNSDVDKLFIQLVQTYNQLFEENPINASGVDAKAILSARLSKSRRLENLIAQLPGEKKNGLFGNLIALSLGLTPNFKSNFDLAEDAKLQLSKDTYDDDLDNLLAQIGDQYADLFLAAKNLSDAILLSDILRVNTEITKAPLSASMIKRYDEHHQDLTLLKALVRQQLPEKYKEIFFDQSKNGYAGYIDGGASQEEFYKFIKPILEKMDGTEELLVKLNREDLLRKQRTFDNGSIPHQIHLGELHAILRRQEDFYPFLKDNREKIEKILTFRIPYYVGPLARGNSRFAWMTRKSEETITPWNFEEVVDKGASAQSFIERMTNFDKNLPNEKVLPKHSLLYEYFTVYNELTKVKYVTEGMRKPAFLSGEQKKAIVDLLFKTNRKVTVKQLKEDYFKKIECFDSVEISGVEDRFNASLGTYHDLLKIIKDKDFLDNEENEDILEDIVLTLTLFEDREMIEERLKTYAHLFDDKVMKQLKRRRYTGWGRLSRKLINGIRDKQSGKTILDFLKSDGFANRNFMQLIHDDSLTFKEDIQKAQVSGQGDSLHEHIANLAGSPAIKKGILQTVKVVDELVKVMGRHKPENIVIEMARENQTTQKGQKNSRERMKRIEEGIKELGSQILKEHPVENTQLQNEKLYLYYLQNGRDMYVDQELDINRLSDYDVDHIVPQSFLKDDSIDNKVLTRSDKARGKSDNVPSEEVVKKMKNYWRQLLNAKLITQRKFDNLTKAERGGLSELDKAGFIKRQLVETRQITKHVAQILDSRMNTKYDENDKLIREVKVITLKSKLVSDFRKDFQFYKVREINNYHHAHDAYLNAVVGTALIKKYPKLESEFVYGDYKVYDVRKMIAKSEQEIGKATAKYFFYSNIMNFFKTEITLANGEIRKRPLIETNGETGEIVWDKGRDFATVRKVLSMPQVNIVKKTEVQTGGFSKESILPKRNSDKLIARKKDWDPKKYGGFDSPTVAYSVLVVAKVEKGKSKKLKSVKELLGITIMERSSFEKNPIDFLEAKGYKEVKKDLIIKLPKYSLFELENGRKRMLASAGELQKGNELALPSKYVNFLYLASHYEKLKGSPEDNEQKQLFVEQHKHYLDEIIEQISEFSKRVILADANLDKVLSAYNKHRDKPIREQAENIIHLFTLTNLGAPAAFKYFDTTIDRKRYTSTKEVLDATLIHQSITGLYETRIDLSQLGGDGGEAAAKEAAAKEAAAKEAAAKEAAAKEAAAKGGTLGDQGSRGSDPLPEPRVTLTVEGIPTEFLVNTGAEHSVLTKPMGKMGSKRTVVAGATGSKVYPWTTKRLLKIGQKQVTHSFLVIPECPAPLLGRDLLTKLKAQIQFSTEGPQVTWEDRPAMCLVLNLEEEYRLHEKPVPPSIDPSWLQLFPMVWAEKAGMGLANQVPPVVVELKSDASPVAVRQYPMSKEAREGIRPHIQRFLDLGILVPCQSPWNTPLLPVKKPGTNDYRPVQDLREVNKRVQDIHPTVPNPYNLLSSLPPSHTWYSVLDLKDAFFCLKLHPNSQPLFAFEWRDPEKGNTGQLTWTRLPQGFKNSPTLFNEALHRDLASFRALNPQVVMLQYVDDLLVAAPTYRDCKEGTRRLLQELSKLGYRVSAKKAQLCREEVTYLGYLLKGGKRWLTPARKATVMKIPTPTTPRQVREFLGTAGFCRLWIPGFASLAAPLYPLTRPKVPFTWTEAHQEAFGRIKEALLSAPALALPDLTKPFALYVDEKEGVARGVLTQTLGPWRRPVAYLSKKLDPVASGWPTCLKAIAAVALLLKDADKLTLGQNVLVIAPHNLESIVRQPPDRWMTNARMTHYQSLLLNERVSFAPPAILNPATLLPVESDDTPIHICSEILAEETGTRPDLRDQPLPGVPAWYTDGSSFIMDGRRQAGAAIVDNKRTVWASNLPEGTSAQKAELIALTQALRLAEGKSINIYTDSRYAFATAHVHGAIYKQRGWLTSAGKDIKNKEEILALLEAIHLPKRVAIIHCPGHQRGTDPVATGNRKADEAAKQAAQSTRILTETTKNAGKRTADGSEFEKRTADGSEFESPKKKAKVE

SEQ ID NO: 6454 - protein, 2115 aa, synthetic construct
MPAAKRVKLDGGDKKYSIGLDIGTNSVGWAVITDEYKVPSKKFKVLGNTDRHSIKKNLIGALLFDSGETAEATRLKRTARRRYTRRKNRICYLQEIFSNEMAKVDDSFFHRLEESFLVEEDKKHERHPIFGNIVDEVAYHEKYPTIYHLRKKLVDSTDKADLRLIYLALAHMIKFRGHFLIEGDLNPDNSDVDKLFIQLVQTYNQLFEENPINASGVDAKAILSARLSKSRRLENLIAQLPGEKKNGLFGNLIALSLGLTPNFKSNFDLAEDAKLQLSKDTYDDDLDNLLAQIGDQYADLFLAAKNLSDAILLSDILRVNTEITKAPLSASMIKRYDEHHQDLTLLKALVRQQLPEKYKEIFFDQSKNGYAGYIDGGASQEEFYKFIKPILEKMDGTEELLVKLNREDLLRKQRTFDNGSIPHQIHLGELHAILRRQEDFYPFLKDNREKIEKILTFRIPYYVGPLARGNSRFAWMTRKSEETITPWNFEEVVDKGASAQSFIERMTNFDKNLPNEKVLPKHSLLYEYFTVYNELTKVKYVTEGMRKPAFLSGEQKKAIVDLLFKTNRKVTVKQLKEDYFKKIECFDSVEISGVEDRFNASLGTYHDLLKIIKDKDFLDNEENEDILEDIVLTLTLFEDREMIEERLKTYAHLFDDKVMKQLKRRRYTGWGRLSRKLINGIRDKQSGKTILDFLKSDGFANRNFMQLIHDDSLTFKEDIQKAQVSGQGDSLHEHIANLAGSPAIKKGILQTVKVVDELVKVMGRHKPENIVIEMARENQTTQKGQKNSRERMKRIEEGIKELGSQILKEHPVENTQLQNEKLYLYYLQNGRDMYVDQELDINRLSDYDVDHIVPQSFLKDDSIDNKVLTRSDKARGKSDNVPSEEVVKKMKNYWRQLLNAKLITQRKFDNLTKAERGGLSELDKAGFIKRQLVETRQITKHVAQILDSRMNTKYDENDKLIREVKVITLKSKLVSDFRKDFQFYKVREINNYHHAHDAYLNAVVGTALIKKYPKLESEFVYGDYKVYDVRKMIAKSEQEIGKATAKYFFYSNIMNFFKTEITLANGEIRKRPLIETNGETGEIVWDKGRDFATVRKVLSMPQVNIVKKTEVQTGGFSKESILPKRNSDKLIARKKDWDPKKYGGFDSPTVAYSVLVVAKVEKGKSKKLKSVKELLGITIMERSSFEKNPIDFLEAKGYKEVKKDLIIKLPKYSLFELENGRKRMLASAGELQKGNELALPSKYVNFLYLASHYEKLKGSPEDNEQKQLFVEQHKHYLDEIIEQISEFSKRVILADANLDKVLSAYNKHRDKPIREQAENIIHLFTLTNLGAPAAFKYFDTTIDRKRYTSTKEVLDATLIHQSITGLYETRIDLSQLGGDGGEAAAKEAAAKEAAAKEAAAKEAAAKEAAAKGGTLNLEDEYRLYETSAEPEVSPGSTWLSDFPQAWAETGGMGLAVRQAPLIIPLKATSTPVSIKQYPMSQEAKLGIKPHIQRLLDQGILVPCQSPWNTPLLPVKKPGTNDYRPVQDLREVNKRVEDIHPTVPNPYNLLSGLPPSHRWYTVLDLKDAFFCLRLHPTSQPLFAFEWRDPGMGISGQLTWTRLPQGFKNSPTLFNEALHRDLADFRIQHPDLILLQYVDDILLAATSELDCQQGTRALLLTLGNLGYRASAKKAQLCQKQVKYLGYLLKEGQRWLTEARKETVMGQPTPKTPRQLREFLGTAGFCRLWIPGFAEMAAPLYPLTKPGTLFNWGPDQQKAYQEIKQALLTAPALGLPDLTKPFELFVDEKQGYAKGVLTQKLGPWRRPVAYLSKKLDPVAAGWPPCLRMVAAIAVLRKDAGKLTMGQPLVILAPHAVEALVKQPPDRWLSNARMTHYQAMLLDTDRVQFGPVVALNPATLLPLPEEGAPHDCLEILAETHGTRPDLTDQPIPDADHTWYTDGSSFLQEGQRKAGAAVTTETEVIWARALPAGTSAQRAELIALTQALKMAEGKRLNVYTDSRYAFATAHIHGEIYRRRGWLTSEGREIKNKSEILALLKALFLPKRLSIIHCLGHQKGDSAEARGNRLADQAAREAAIKTPPDTSTLLAGKRTADGSEFEKRTADGSEFESPKKKAKVE

SEQ ID NO: 6455 - protein, 2115 aa, synthetic construct
MPAAKRVKLDGGDKKYSIGLDIGTNSVGWAVITDEYKVPSKKFKVLGNTDRHSIKKNLIGALLFDSGETAEATRLKRTARRRYTRRKNRICYLQEIFSNEMAKVDDSFFHRLEESFLVEEDKKHERHPIFGNIVDEVAYHEKYPTIYHLRKKLVDSTDKADLRLIYLALAHMIKFRGHFLIEGDLNPDNSDVDKLFIQLVQTYNQLFEENPINASGVDAKAILSARLSKSRRLENLIAQLPGEKKNGLFGNLIALSLGLTPNFKSNFDLAEDAKLQLSKDTYDDDLDNLLAQIGDQYADLFLAAKNLSDAILLSDILRVNTEITKAPLSASMIKRYDEHHQDLTLLKALVRQQLPEKYKEIFFDQSKNGYAGYIDGGASQEEFYKFIKPILEKMDGTEELLVKLNREDLLRKQRTFDNGSIPHQIHLGELHAILRRQEDFYPFLKDNREKIEKILTFRIPYYVGPLARGNSRFAWMTRKSEETITPWNFEEVVDKGASAQSFIERMTNFDKNLPNEKVLPKHSLLYEYFTVYNELTKVKYVTEGMRKPAFLSGEQKKAIVDLLFKTNRKVTVKQLKEDYFKKIECFDSVEISGVEDRFNASLGTYHDLLKIIKDKDFLDNEENEDILEDIVLTLTLFEDREMIEERLKTYAHLFDDKVMKQLKRRRYTGWGRLSRKLINGIRDKQSGKTILDFLKSDGFANRNFMQLIHDDSLTFKEDIQKAQVSGQGDSLHEHIANLAGSPAIKKGILQTVKVVDELVKVMGRHKPENIVIEMARENQTTQKGQKNSRERMKRIEEGIKELGSQILKEHPVENTQLQNEKLYLYYLQNGRDMYVDQELDINRLSDYDVDHIVPQSFLKDDSIDNKVLTRSDKARGKSDNVPSEEVVKKMKNYWRQLLNAKLITQRKFDNLTKAERGGLSELDKAGFIKRQLVETRQITKHVAQILDSRMNTKYDENDKLIREVKVITLKSKLVSDFRKDFQFYKVREINNYHHAHDAYLNAVVGTALIKKYPKLESEFVYGDYKVYDVRKMIAKSEQEIGKATAKYFFYSNIMNFFKTEITLANGEIRKRPLIETNGETGEIVWDKGRDFATVRKVLSMPQVNIVKKTEVQTGGFSKESILPKRNSDKLIARKKDWDPKKYGGFDSPTVAYSVLVVAKVEKGKSKKLKSVKELLGITIMERSSFEKNPIDFLEAKGYKEVKKDLIIKLPKYSLFELENGRKRMLASAGELQKGNELALPSKYVNFLYLASHYEKLKGSPEDNEQKQLFVEQHKHYLDEIIEQISEFSKRVILADANLDKVLSAYNKHRDKPIREQAENIIHLFTLTNLGAPAAFKYFDTTIDRKRYTSTKEVLDATLIHQSITGLYETRIDLSQLGGDGGEAAAKEAAAKEAAAKEAAAKEAAAKEAAAKGGTLGIEDEYRLHETSTEPDVSLGSTWLSDFPQAWAETGGMGLAVRQAPLIIPLKATSTPVSIQQYPMSHEARLGIKPHIQRLLDQGILVPCQSPWNTPLLPVKKPGTNDYRPVQDLREVNKRVEDIHPTVPNPYNLLSGLPPSHQWYTVLDLKDAFFCLRLHPTSQPLFAFEWRDPGMGISGQLTWTRLPQGFKNSPTLFDEALHRDLADFRIQHPDLILLQYVDDILLAATSELDCQQGTRALLQTLGDLGYRASAKKAQICQKQVKYLGYLLREGQRWLTEARKETVMGQPVPKTPRQLREFLGTAGFCRLWIPGFAEMAAPLYPLTKTGTLFSWGPDQQKAYQEIKQALLTAPALGLPDLTKPFELFVDEKQGYAKGVLTQKLGPWRRPVAYLSKKLDPVAAGWPPCLRMVAAIAVLTKDAGKLTMGQPLVILAPHAVEALVKQPPDRWLSNARMTHYQAMLLDTDRVQFGPVVALNPATLLPLPEEGAPHDCLEILAETHGTRPDLTDQPIPDADHTWYTDGSSFLQEGQRKAGAAVTTETEVIWAGALPAGTSAQRAELIALTQALKMAEGKRLNVYTDSRYAFATAHIHGEIYRRRGLLTSEGREIKNKSEILALLKALFLPKRLSIIHCLGHQKGDSAEARGNRLADQAAREAAIKTPPDTSTLLAGKRTADGSEFEKRTADGSEFESPKKKAKVE

SEQ ID NO: 6456 - protein, 2115 aa, synthetic construct; identical to SEQ ID NO: 6455

SEQ ID NO: 6457 - protein, 2115 aa, synthetic construct
MPAAKRVKLDGGDKKYSIGLDIGTNSVGWAVITDEYKVPSKKFKVLGNTDRHSIKKNLIGALLFDSGETAEATRLKRTARRRYTRRKNRICYLQEIFSNEMAKVDDSFFHRLEESFLVEEDKKHERHPIFGNIVDEVAYHEKYPTIYHLRKKLVDSTDKADLRLIYLALAHMIKFRGHFLIEGDLNPDNSDVDKLFIQLVQTYNQLFEENPINASGVDAKAILSARLSKSRRLENLIAQLPGEKKNGLFGNLIALSLGLTPNFKSNFDLAEDAKLQLSKDTYDDDLDNLLAQIGDQYADLFLAAKNLSDAILLSDILRVNTEITKAPLSASMIKRYDEHHQDLTLLKALVRQQLPEKYKEIFFDQSKNGYAGYIDGGASQEEFYKFIKPILEKMDGTEELLVKLNREDLLRKQRTFDNGSIPHQIHLGELHAILRRQEDFYPFLKDNREKIEKILTFRIPYYVGPLARGNSRFAWMTRKSEETITPWNFEEVVDKGASAQSFIERMTNFDKNLPNEKVLPKHSLLYEYFTVYNELTKVKYVTEGMRKPAFLSGEQKKAIVDLLFKTNRKVTVKQLKEDYFKKIECFDSVEISGVEDRFNASLGTYHDLLKIIKDKDFLDNEENEDILEDIVLTLTLFEDREMIEERLKTYAHLFDDKVMKQLKRRRYTGWGRLSRKLINGIRDKQSGKTILDFLKSDGFANRNFMQLIHDDSLTFKEDIQKAQVSGQGDSLHEHIANLAGSPAIKKGILQTVKVVDELVKVMGRHKPENIVIEMARENQTTQKGQKNSRERMKRIEEGIKELGSQILKEHPVENTQLQNEKLYLYYLQNGRDMYVDQELDINRLSDYDVDHIVPQSFLKDDSIDNKVLTRSDKARGKSDNVPSEEVVKKMKNYWRQLLNAKLITQRKFDNLTKAERGGLSELDKAGFIKRQLVETRQITKHVAQILDSRMNTKYDENDKLIREVKVITLKSKLVSDFRKDFQFYKVREINNYHHAHDAYLNAVVGTALIKKYPKLESEFVYGDYKVYDVRKMIAKSEQEIGKATAKYFFYSNIMNFFKTEITLANGEIRKRPLIETNGETGEIVWDKGRDFATVRKVLSMPQVNIVKKTEVQTGGFSKESILPKRNSDKLIARKKDWDPKKYGGFDSPTVAYSVLVVAKVEKGKSKKLKSVKELLGITIMERSSFEKNPIDFLEAKGYKEVKKDLIIKLPKYSLFELENGRKRMLASAGELQKGNELALPSKYVNFLYLASHYEKLKGSPEDNEQKQLFVEQHKHYLDEIIEQISEFSKRVILADANLDKVLSAYNKHRDKPIREQAENIIHLFTLTNLGAPAAFKYFDTTIDRKRYTSTKEVLDATLIHQSITGLYETRIDLSQLGGDGGEAAAKEAAAKEAAAKEAAAKEAAAKEAAAKGGTLNIEDEYRLHETSKEPDVSLGSTWLSDFPQAWAETGGMGLAVRQAPLIIPLKATSTPVSIKQYPMSQEARLGIKPHIQRLLDQGILVPCQSPWNTPLLPVKKPGTNDYRPVQDLREVNKRVEDIHPTVPNPYNLLSGLPPSHQWYTVLDLKDAFFCLRLHPTSQPLFAFEWRDPEMGISGQLTWTRLPQGFKNSPTLFDEALHRDLAGFRIQHPDLILLQYVDDLLLAATSELDCQQGTRALLQTLGDLGYRASAKKAQICQKQVKYLGYLLKEGQRWLTEARKETVMGQPIPKTPRQLREFLGTAGFCRLWIPGFAEMAAPLYPLTKTGTLFNWGPDQQKAFQEIKQALLTAPALGLPDLTKPFELFVDEKQGYAKGVLTQKLGPWRRPVAYLSKKLDPVAAGWPPCLRMVAAIAVLTKDAGKLTMGQPLVILAPHAVEALVKQPPDRWLSNARMTHYQALLLDTDRVQFGPVVALNPATLLPLPEEGLQHDCLDILAEAHGTRSDLMDQPLPDADHTWYTDGSSFLQEGQRKAGAAVTTETEVIWARALPAGTSAQRAELIALTQALKMAEGKKLNVYTDSRYAFATAHIHGEIYRRRGLLTSEGKEIKNKDEILALLKALFLPKRLSIIHCPGHQKGNSAEARGNRMADQAAREVATRETPETSTLLAGKRTADGSEFEKRTADGSEFESPKKKAKVE

SEQ ID NO: 6458 - protein, 2115 aa, synthetic construct
MPAAKRVKLDGGDKKYSIGLDIGTNSVGWAVITDEYKVPSKKFKVLGNTDRHSIKKNLIGALLFDSGETAEATRLKRTARRRYTRRKNRICYLQEIFSNEMAKVDDSFFHRLEESFLVEEDKKHERHPIFGNIVDEVAYHEKYPTIYHLRKKLVDSTDKADLRLIYLALAHMIKFRGHFLIEGDLNPDNSDVDKLFIQLVQTYNQLFEENPINASGVDAKAILSARLSKSRRLENLIAQLPGEKKNGLFGNLIALSLGLTPNFKSNFDLAEDAKLQLSKDTYDDDLDNLLAQIGDQYADLFLAAKNLSDAILLSDILRVNTEITKAPLSASMIKRYDEHHQDLTLLKALVRQQLPEKYKEIFFDQSKNGYAGYIDGGASQEEFYKFIKPILEKMDGTEELLVKLNREDLLRKQRTFDNGSIPHQIHLGELHAILRRQEDFYPFLKDNREKIEKILTFRIPYYVGPLARGNSRFAWMTRKSEETITPWNFEEVVDKGASAQSFIERMTNFDKNLPNEKVLPKHSLLYEYFTVYNELTKVKYVTEGMRKPAFLSGEQKKAIVDLLFKTNRKVTVKQLKEDYFKKIECFDSVEISGVEDRFNASLGTYHDLLKIIKDKDFLDNEENEDILEDIVLTLTLFEDREMIEERLKTYAHLFDDKVMKQLKRRRYTGWGRLSRKLINGIRDKQSGKTILDFLKSDGFANRNFMQLIHDDSLTFKEDIQKAQVSGQGDSLHEHIANLAGSPAIKKGILQTVKVVDELVKVMGRHKPENIVIEMARENQTTQKGQKNSRERMKRIEEGIKELGSQILKEHPVENTQLQNEKLYLYYLQNGRDMYVDQELDINRLSDYDVDHIVPQSFLKDDSIDNKVLTRSDKARGKSDNVPSEEVVKKMKNYWRQLLNAKLITQRKFDNLTKAERGGLSELDKAGFIKRQLVETRQITKHVAQILDSRMNTKYDENDKLIREVKVITLKSKLVSDFRKDFQFYKVREINNYHHAHDAYLNAVVGTALIKKYPKLESEFVYGDYKVYDVRKMIAKSEQEIGKATAKYFFYSNIMNFFKTEITLANGEIRKRPLIETNGETGEIVWDKGRDFATVRKVLSMPQVNIVKKTEVQTGGFSKESILPKRNSDKLIARKKDWDPKKYGGFDSPTVAYSVLVVAKVEKGKSKKLKSVKELLGITIMERSSFEKNPIDFLEAKGYKEVKKDLIIKLPKYSLFELENGRKRMLASAGELQKGNELALPSKYVNFLYLASHYEKLKGSPEDNEQKQLFVEQHKHYLDEIIEQISEFSKRVILADANLDKVLSAYNKHRDKPIREQAENIIHLFTLTNLGAPAAFKYFDTTIDRKRYTSTKEVLDATLIHQSITGLYETRIDLSQLGGDGGEAAAKEAAAKEAAAKEAAAKEAAAKEAAAKGGTLNIEDEHRLHETSKEPDVSLGSTWLSDFPQAWAETGGMGLAVRQAPLIIPLKATSTPVSIKQYPMSQEARLGIKPHIQRLLDQGILVPCQSPWNTPLLPVKKPGTNDYRPVQDLREVNKRVEDIHPTVPNPYNLLSGLPPSHQWYTVLDLKDAFFCLRLHPTSQPLFAFEWRDPEMGISGQLTWTRLPQGFKNSPTLFDEALHRDLADFRIQHPDLILLQYVDDLLLAATSELDCQQGTRALLQTLGNLGYRASAKKAQICQKQVKYLGYLLKEGQRWLTEARKETVMGQPTPKTPRQLREFLGTAGFCRLWIPGFAEMAAPLYPLTKTGTLFNWGPDQQKAYQEIKQALLTAPALGLPDLTKPFELFVDEKQGYAKGVLTQKLGPWRRPVAYLSKKLDPVAAGWPPCLRMVAAIAVLTKDAGKLTMGQPLVILAPHAVEALVKQPPDRWLSNARMTHYQALLLDTDRVQFGPVVALNPATLLPLPEEGLQHNCLDILAEAHGTRPDLTDQPLPDADHTWYTDGSSLLQEGQRKAGAAVTTETEVIWAKALPAGTSAQRAELIALTQALKMAEGKKLNVYTDSRYAFATAHIHGEIYRRRGLLTSEGKEIKNKDEILALLKALFLPKRLSIIHCPGHQKGHSAEARGNRMADQAARKAAITETPDTSTLLAGKRTADGSEFEKRTADGSEFESPKKKAKVE

SEQ ID NO: 6459 - protein, 2115 aa, synthetic construct; identical to SEQ ID NO: 6458

SEQ ID NO: 6460 - protein, 2115 aa, synthetic construct
MPAAKRVKLDGGDKKYSIGLDIGTNSVGWAVITDEYKVPSKKFKVLGNTDRHSIKKNLIGALLFDSGETAEATRLKRTARRRYTRRKNRICYLQEIFSNEMAKVDDSFFHRLEESFLVEEDKKHERHPIFGNIVDEVAYHEKYPTIYHLRKKLVDSTDKADLRLIYLALAHMIKFRGHFLIEGDLNPDNSDVDKLFIQLVQTYNQLFEENPINASGVDAKAILSARLSKSRRLENLIAQLPGEKKNGLFGNLIALSLGLTPNFKSNFDLAEDAKLQLSKDTYDDDLDNLLAQIGDQYADLFLAAKNLSDAILLSDILRVNTEITKAPLSASMIKRYDEHHQDLTLLKALVRQQLPEKYKEIFFDQSKNGYAGYIDGGASQEEFYKFIKPILEKMDGTEELLVKLNREDLLRKQRTFDNGSIPHQIHLGELHAILRRQEDFYPFLKDNREKIEKILTFRIPYYVGPLARGNSRFAWMTRKSEETITPWNFEEVVDKGASAQSFIERMTNFDKNLPNEKVLPKHSLLYEYFTVYNELTKVKYVTEGMRKPAFLSGEQKKAIVDLLFKTNRKVTVKQLKEDYFKKIECFDSVEISGVEDRFNASLGTYHDLLKIIKDKDFLDNEENEDILEDIVLTLTLFEDREMIEERLKTYAHLFDDKVMKQLKRRRYTGWGRLSRKLINGIRDKQSGKTILDFLKSDGFANRNFMQLIHDDSLTFKEDIQKAQVSGQGDSLHEHIANLAGSPAIKKGILQTVKVVDELVKVMGRHKPENIVIEMARENQTTQKGQKNSRERMKRIEEGIKELGSQILKEHPVENTQLQNEKLYLYYLQNGRDMYVDQELDINRLSDYDVDHIVPQSFLKDDSIDNKVLTRSDKARGKSDNVPSEEVVKKMKNYWRQLLNAKLITQRKFDNLTKAERGGLSELDKAGFIKRQLVETRQITKHVAQILDSRMNTKYDENDKLIREVKVITLKSKLVSDFRKDFQFYKVREINNYHHAHDAYLNAVVGTALIKKYPKLESEFVYGDYKVYDVRKMIAKSEQEIGKATAKYFFYSNIMNFFKTEITLANGEIRKRPLIETNGETGEIVWDKGRDFATVRKVLSMPQVNIVKKTEVQTGGFSKESILPKRNSDKLIARKKDWDPKKYGGFDSPTVAYSVLVVAKVEKGKSKKLKSVKELLGITIMERSSFEKNPIDFLEAKGYKEVKKDLIIKLPKYSLFELENGRKRMLASAGELQKGNELALPSKYVNFLYLASHYEKLKGSPEDNEQKQLFVEQHKHYLDEIIEQISEFSKRVILADANLDKVLSAYNKHRDKPIREQAENIIHLFTLTNLGAPAAFKYFDTTIDRKRYTSTKEVLDATLIHQSITGLYETRIDLSQLGGDGGEAAAKEAAAKEAAAKEAAAKEAAAKEAAAKGGTLNIEDEYRLHEISTEPDVSPGSTWLSDFPQAWAETGGMGLAVRQAPLIIPLKATSTPVSIKQYPMSQEAKLGIKPHIQRLLDQGILVPCQSPWNTPLLPVKKPGTNDYRPVQGLREVNKRVEDIHPTVPNPYNLLSGLPTSHRWYTVLDLKDAFFCLRLHPTSQPLFASEWRDPGMGISGQLTWTRLPQGFKNSPTLFDEALHRGLADFRIQHPDLILLQYVDDLLLAATSELDCQQGTRALLKTLGNLGYRASAKKAQICQKQVKYLGYLLREGQRWLTEARKETVMGQPTPKTPRQLREFLGTAGFCRLWIPRFAEMAAPLYPLTKTGTLFNWGPDQQKAYHEIKQALLTAPALGLPDLTKPFELFVDEKQGYAKGVLTQKLGPWRRPVAYLSKKLDPVAAGWPPCLRMVAAIAVLTKDAGKLTMGQPLVILAPHAVEALVKQPPDRWLSNARMTHYQAMLLDTDRVQFGPVVALNPATLLPLPEEGAPHDCLEILAETHGTEPDLTDQPIPDADHTWYTDGSSFLQEGQRKAGAAVTTETEVIWARALPAGTSAQRAELIALTQALKMAEGKRLNVYTDSRYAFATAHIHGEIYKRRGLLTSEGREIKNKSEILALLKALFLPKRLSIIHCLGHQKGDSAEARGNRLADQAAREAAIKTPPDTSTLLAGKRTADGSEFEKRTADGSEFESPKKKAKVE

SEQ ID NO: 6461 - protein, 2115 aa, synthetic construct
MPAAKRVKLDGGDKKYSIGLDIGTNSVGWAVITDEYKVPSKKFKVLGNTDRHSIKKNLIGALLFDSGETAEATRLKRTARRRYTRRKNRICYLQEIFSNEMAKVDDSFFHRLEESFLVEEDKKHERHPIFGNIVDEVAYHEKYPTIYHLRKKLVDSTDKADLRLIYLALAHMIKFRGHFLIEGDLNPDNSDVDKLFIQLVQTYNQLFEENPINASGVDAKAILSARLSKSRRLENLIAQLPGEKKNGLFGNLIALSLGLTPNFKSNFDLAEDAKLQLSKDTYDDDLDNLLAQIGDQYADLFLAAKNLSDAILLSDILRVNTEITKAPLSASMIKRYDEHHQDLTLLKALVRQQLPEKYKEIFFDQSKNGYAGYIDGGASQEEFYKFIKPILEKMDGTEELLVKLNREDLLRKQRTFDNGSIPHQIHLGELHAILRRQEDFYPFLKDNREKIEKILTFRIPYYVGPLARGNSRFAWMTRKSEETITPWNFEEVVDKGASAQSFIERMTNFDKNLPNEKVLPKHSLLYEYFTVYNELTKVKYVTEGMRKPAFLSGEQKKAIVDLLFKTNRKVTVKQLKEDYFKKIECFDSVEISGVEDRFNASLGTYHDLLKIIKDKDFLDNEENEDILEDIVLTLTLFEDREMIEERLKTYAHLFDDKVMKQLKRRRYTGWGRLSRKLINGIRDKQSGKTILDFLKSDGFANRNFMQLIHDDSLTFKEDIQKAQVSGQGDSLHEHIANLAGSPAIKKGILQTVKVVDELVKVMGRHKPENIVIEMARENQTTQKGQKNSRERMKRIEEGIKELGSQILKEHPVENTQLQNEKLYLYYLQNGRDMYVDQELDINRLSDYDVDHIVPQSFLKDDSIDNKVLTRSDKARGKSDNVPSEEVVKKMKNYWRQLLNAKLITQRKFDNLTKAERGGLSELDKAGFIKRQLVETRQITKHVAQILDSRMNTKYDENDKLIREVKVITLKSKLVSDFRKDFQFYKVREINNYHHAHDAYLNAVVGTALIKKYPKLESEFVYGDYKVYDVRKMIAKSEQEIGKATAKYFFYSNIMNFFKTEITLANGEIRKRPLIETNGETGEIVWDKGRDFATVRKVLSMPQVNIVKKTEVQTGGFSKESILPKRNSDKLIARKKDWDPKKYGGFDSPTVAYSVLVVAKVEKGKSKKLKSVKELLGITIMERSSFEKNPIDFLEAKGYKEVKKDLIIKLPKYSLFELENGRKRMLASAGELQKGNELALPSKYVNFLYLASHYEKLKGSPEDNEQKQLFVEQHKHYLDEIIEQISEFSKRVILADANLDKVLSAYNKHRDKPIREQAENIIHLFTLTNLGAPAAFKYFDTTIDRKRYTSTKEVLDATLIHQSITGLYETRIDLSQLGGDGGEAAAKEAAAKEAAAKEAAAKEAAAKEAAAKGGTLNIEDEYRLHEISTEPDVSPGSTWLSDFPQAWAETGGMGLAVRQAPLIIPLKATSTPVSIKQYPMSQEAKLGIKPHIQRLLDQGILVPCQSPWNTPLLPVKKPGTNDYRPVQGLREVNKRVEDIHPTVPNPYNLLSGLPTSHRWYTVLDLKDAFFCLRLHPTSQPLFASEWRDPGMGISGQLTWTRLPQGFKNSPTLFNEALHRGLADFRIQHPDLILLQYVDDLLLAATSELDCQQGTRALLKTLGNLGYRASAKKAQICQKQVKYLGYLLREGQRWLTEARKETVMGQPTPKTPRQLREFLGKAGFCRLFIPRFAEMAAPLYPLTKPGTLFNWGPDQQKAYHEIKQALLTAPALGLPDLTKPFELFVDEKQGYAKGVLTQKLGPWRRPVAYLSKKLDPVAAGWPPCLRMVAAIAVLTKDAGKLTMGQPLVILAPHAVEALVKQPPDRWLSNARMTHYQAMLLDTDRVQFGPVVALNPATLLPLPEEGAPHDCLEILAETHGTEPDLTDQPIPDADHTWYTDGSSFLQEGQRKAGAAVTTETEVIWARALPAGTSAQRAELIALTQALKMAEGKRLNVYTDSRYAFATAHIHGEIYKRRGWLTSEGREIKNKSEILALLKALFLPKRLSIIHCLGHQKGDSAEARGNRLADQAAREAAIKTPPDTSTLLAGKRTADGSEFEKRTADGSEFESPKKKAKVE

SEQ ID NO: 6462 - protein, 2195 aa, synthetic construct
MPAAKRVKLDGGDKKYSIGLDIGTNSVGWAVITDEYKVPSKKFKVLGNTDRHSIKKNLIGALLFDSGETAEATRLKRTARRRYTRRKNRICYLQEIFSNEMAKVDDSFFHRLEESFLVEEDKKHERHPIFGNIVDEVAYHEKYPTIYHLRKKLVDSTDKADLRLIYLALAHMIKFRGHFLIEGDLNPDNSDVDKLFIQLVQTYNQLFEENPINASGVDAKAILSARLSKSRRLENLIAQLPGEKKNGLFGNLIALSLGLTPNFKSNFDLAEDAKLQLSKDTYDDDLDNLLAQIGDQYADLFLAAKNLSDAILLSDILRVNTEITKAPLSASMIKRYDEHHQDLTLLKALVRQQLPEKYKEIFFDQSKNGYAGYIDGGASQEEFYKFIKPILEKMDGTEELLVKLNREDLLRKQRTFDNGSIPHQIHLGELHAILRRQEDFYPFLKDNREKIEKILTFRIPYYVGPLARGNSRFAWMTRKSEETITPWNFEEVVDKGASAQSFIERMTNFDKNLPNEKVLPKHSLLYEYFTVYNELTKVKYVTEGMRKPAFLSGEQKKAIVDLLFKTNRKVTVKQLKEDYFKKIECFDSVEISGVEDRFNASLGTYHDLLKIIKDKDFLDNEENEDILEDIVLTLTLFEDREMIEERLKTYAHLFDDKVMKQLKRRRYTGWGRLSRKLINGIRDKQSGKTILDFLKSDGFANRNFMQLIHDDSLTFKEDIQKAQVSGQGDSLHEHIANLAGSPAIKKGILQTVKVVDELVKVMGRHKPENIVIEMARENQTTQKGQKNSRERMKRIEEGIKELGSQILKEHPVENTQLQNEKLYLYYLQNGRDMYVDQELDINRLSDYDVDHIVPQSFLKDDSIDNKVLTRSDKARGKSDNVPSEEVVKKMKNYWRQLLNAKLITQRKFDNLTKAERGGLSELDKAGFIKRQLVETRQITKHVAQILDSRMNTKYDENDKLIREVKVITLKSKLVSDFRKDFQFYKVREINNYHHAHDAYLNAVVGTALIKKYPKLESEFVYGDYKVYDVRKMIAKSEQEIGKATAKYFFYSNIMNFFKTEITLANGEIRKRPLIETNGETGEIVWDKGRDFATVRKVLSMPQVNIVKKTEVQTGGFSKESILPKRNSDKLIARKKDWDPKKYGGFDSPTVAYSVLVVAKVEKGKSKKLKSVKELLGITIMERSSFEKNPIDFLEAKGYKEVKKDLIIKLPKYSLFELENGRKRMLASAGELQKGNELALPSKYVNFLYLASHYEKLKGSPEDNEQKQLFVEQHKHYLDEIIEQISEFSKRVILADANLDKVLSAYNKHRDKPIREQAENIIHLFTLTNLGAPAAFKYFDTTIDRKRYTSTKEVLDATLIHQSITGLYETRIDLSQLGGDGGEAAAKEAAAKEAAAKEAAAKEAAAKEAAAKGGMDPLQLLQPLEAEIKGTKLKAHWNSGATITCVPEAFLEDERPIQTMLIKTIHGEKQQDVYYLTFKVQGRKVEAEVLASPYDYILLNPSDVPWLMKKPLQLTVLVPLHEYQERLLQQTALPKEQKELLQKLFLKYDALWQHWENQVGHRRIKPHNIATGTLAPRPQKQYPINPKAKPSIQIVIDDLLKQGVLIQQNSTMNTPVYPVPKPDGKWRMVLDYREVNKTIPLIAAQNQHSAGILSSIYRGKYKTTLDLTNGFWAHPITPESYWLTAFTWQGKQYCWTRLPQGFLNSPALFTADVVDLLKEIPNVQAYVDDIYISHDDPQEHLEQLEKIFSILLNAGYVVSLKKSEIAQREVEFLGFNITKEGRGLTDTFKQKLLNITPPKDLKQLQSILGLLNFARNFIPNYSELVKPLYTIVANANGKFISWTEDNSNQLQHIISVLNQADNLEERNPETRLIIKVNSSPSAGYIRYYNEGSKRPIMYVNYIFSKAEAKFTQTEKLLTTMHKGLIKAMDLAMGQEILVYSPIVSMTKIQRTPLPERKALPVRWITWMTYLEDPRIQFHYDKSLPELQQIPNVTEDVIAKTKHPSEFAMVFYTDGSAIKHPDVNKSHSAGMGIAQVQFIPEYKIVHQWSIPLGDHTAQLAEIAAVEFACKKALKISGPVLIVTDSFYVAESANKELPYWKSNGFLNNKKKPLRHVSKWKSIAECLQLKPDIIIMHEKGHQQPMTTLHTEGNNLADKLATQGSYVVHAGKRTADGSEFEKRTADGSEFESPKKKAKVE

SEQ ID NO: 6463 - protein, 2106 aa, synthetic construct
MPAAKRVKLDGGDKKYSIGLDIGTNSVGWAVITDEYKVPSKKFKVLGNTDRHSIKKNLIGALLFDSGETAEATRLKRTARRRYTRRKNRICYLQEIFSNEMAKVDDSFFHRLEESFLVEEDKKHERHPIFGNIVDEVAYHEKYPTIYHLRKKLVDSTDKADLRLIYLALAHMIKFRGHFLIEGDLNPDNSDVDKLFIQLVQTYNQLFEENPINASGVDAKAILSARLSKSRRLENLIAQLPGEKKNGLFGNLIALSLGLTPNFKSNFDLAEDAKLQLSKDTYDDDLDNLLAQIGDQYADLFLAAKNLSDAILLSDILRVNTEITKAPLSASMIKRYDEHHQDLTLLKALVRQQLPEKYKEIFFDQSKNGYAGYIDGGASQEEFYKFIKPILEKMDGTEELLVKLNREDLLRKQRTFDNGSIPHQIHLGELHAILRRQEDFYPFLKDNREKIEKILTFRIPYYVGPLARGNSRFAWMTRKSEETITPWNFEEVVDKGASAQSFIERMTNFDKNLPNEKVLPKHSLLYEYFTVYNELTKVKYVTEGMRKPAFLSGEQKKAIVDLLFKTNRKVTVKQLKEDYFKKIECFDSVEISGVEDRFNASLGTYHDLLKIIKDKDFLDNEENEDILEDIVLTLTLFEDREMIEERLKTYAHLFDDKVMKQLKRRRYTGWGRLSRKLINGIRDKQSGKTILDFLKSDGFANRNFMQLIHDDSLTFKEDIQKAQVSGQGDSLHEHIANLAGSPAIKKGILQTVKVVDELVKVMGRHKPENIVIEMARENQTTQKGQKNSRERMKRIEEGIKELGSQILKEHPVENTQLQNEKLYLYYLQNGRDMYVDQELDINRLSDYDVDHIVPQSFLKDDSIDNKVLTRSDKARGKSDNVPSEEVVKKMKNYWRQLLNAKLITQRKFDNLTKAERGGLSELDKAGFIKRQLVETRQITKHVAQILDSRMNTKYDENDKLIREVKVITLKSKLVSDFRKDFQFYKVREINNYHHAHDAYLNAVVGTALIKKYPKLESEFVYGDYKVYDVRKMIAKSEQEIGKATAKYFFYSNIMNFFKTEITLANGEIRKRPLIETNGETGEIVWDKGRDFATVRKVLSMPQVNIVKKTEVQTGGFSKESILPKRNSDKLIARKKDWDPKKYGGFDSPTVAYSVLVVAKVEKGKSKKLKSVKELLGITIMERSSFEKNPIDFLEAKGYKEVKKDLIIKLPKYSLFELENGRKRMLASAGELQKGNELALPSKYVNFLYLASHYEKLKGSPEDNEQKQLFVEQHKHYLDEIIEQISEFSKRVILADANLDKVLSAYNKHRDKPIREQAENIIHLFTLTNLGAPAAFKYFDTTIDRKRYTSTKEVLDATLIHQSITGLYETRIDLSQLGGDGGEAAAKEAAAKEAAAKEAAAKEAAAKEAAAKGGVPWLMKKPLQLTVLVPLHEYQERLLQQTALPKEQKELLQKLFLKYDALWQHWENQVGHRRIKPHNIATGTLAPRPQKQYPINPKAKPSIQIVIDDLLKQGVLIQQNSTMNTPVYPVPKPDGKWRMVLDYREVNKTIPLIAAQNQHSAGILSSIYRGKYKTTLDLTNGFWAHPITPESYWLTAFTWQGKQYCWTRLPQGFLNSPALFTADVVDLLKEIPNVQAYVDDIYISHDDPQEHLEQLEKIFSILLNAGYVVSLKKSEIAQREVEFLGFNITKEGRGLTDTFKQKLLNITPPKDLKQLQSILGLLNFARNFIPNYSELVKPLYTIVANANGKFISWTEDNSNQLQHIISVLNQADNLEERNPETRLIIKVNSSPSAGYIRYYNEGSKRPIMYVNYIFSKAEAKFTQTEKLLTTMHKGLIKAMDLAMGQEILVYSPIVSMTKIQRTPLPERKALPVRWITWMTYLEDPRIQFHYDKSLPELQQIPNVTEDVIAKTKHPSEFAMVFYTDGSAIKHPDVNKSHSAGMGIAQVQFIPEYKIVHQWSIPLGDHTAQLAEIAAVEFACKKALKISGPVLIVTDSFYVAESANKELPYWKSNGFLNNKKKPLRHVSKWKSIAECLQLKPDIIIMHEKGHQQPMTTLHTEGNNLADKLATQGSYVVHAGKRTADGSEFEKRTADGSEFESPKKKAKVE

SEQ ID NO: 6464 - protein, 2106 aa, synthetic construct
MPAAKRVKLDGGDKKYSIGLDIGTNSVGWAVITDEYKVPSKKFKVLGNTDRHSIKKNLIGALLFDSGETAEATRLKRTARRRYTRRKNRICYLQEIFSNEMAKVDDSFFHRLEESFLVEEDKKHERHPIFGNIVDEVAYHEKYPTIYHLRKKLVDSTDKADLRLIYLALAHMIKFRGHFLIEGDLNPDNSDVDKLFIQLVQTYNQLFEENPINASGVDAKAILSARLSKSRRLENLIAQLPGEKKNGLFGNLIALSLGLTPNFKSNFDLAEDAKLQLSKDTYDDDLDNLLAQIGDQYADLFLAAKNLSDAILLSDILRVNTEITKAPLSASMIKRYDEHHQDLTLLKALVRQQLPEKYKEIFFDQSKNGYAGYIDGGASQEEFYKFIKPILEKMDGTEELLVKLNREDLLRKQRTFDNGSIPHQIHLGELHAILRRQEDFYPFLKDNREKIEKILTFRIPYYVGPLARGNSRFAWMTRKSEETITPWNFEEVVDKGASAQSFIERMTNFDKNLPNEKVLPKHSLLYEYFTVYNELTKVKYVTEGMRKPAFLSGEQKKAIVDLLFKTNRKVTVKQLKEDYFKKIECFDSVEISGVEDRFNASLGTYHDLLKIIKDKDFLDNEENEDILEDIVLTLTLFEDREMIEERLKTYAHLFDDKVMKQLKRRRYTGWGRLSRKLINGIRDKQSGKTILDFLKSDGFANRNFMQLIHDDSLTFKEDIQKAQVSGQGDSLHEHIANLAGSPAIKKGILQTVKVVDELVKVMGRHKPENIVIEMARENQTTQKGQKNSRERMKRIEEGIKELGSQILKEHPVENTQLQNEKLYLYYLQNGRDMYVDQELDINRLSDYDVDHIVPQSFLKDDSIDNKVLTRSDKARGKSDNVPSEEVVKKMKNYWRQLLNAKLITQRKFDNLTKAERGGLSELDKAGFIKRQLVETRQITKHVAQILDSRMNTKYDENDKLIREVKVITLKSKLVSDFRKDFQFYKVREINNYHHAHDAYLNAVVGTALIKKYPKLESEFVYGDYKVYDVRKMIAKSEQEIGKATAKYFFYSNIMNFFKTEITLANGEIRKRPLIETNGETGEIVWDKGRDFATVRKVLSMPQVNIVKKTEVQTGGFSKESILPKRNSDKLIARKKDWDPKKYGGFDSPTVAYSVLVVAKVEKGKSKKLKSVKELLGITIMERSSFEKNPIDFLEAKGYKEVKKDLIIKLPKYSLFELENGRKRMLASAGELQKGNELALPSKYVNFLYLASHYEKLKGSPEDNEQKQLFVEQHKHYLDEIIEQISEFSKRVILADANLDKVLSAYNKHRDKPIREQAENIIHLFTLTNLGAPAAFKYFDTTIDRKRYTSTKEVLDATLIHQSITGLYETRIDLSQLGGDGGEAAAKEAAAKEAAAKEAAAKEAAAKEAAAKGGVPWLMKKPLQLTVLVPLHEYQERLLQQTALPKEQKELLQKLFLKYDALWQHWENQVGHRRIKPHNIATGTLAPRPQKQYPINPKAKPSIQIVIDDLLKQGVLIQQNSTMNTPVYPVPKPDGKWRMVLDYREVNKTIPLIAAQNQHSAGILSSIYRGKYKTTLDLTNGFWAHPITPESYWLTAFTWQGKQYCWTRLPQGFLNSPALFNADVVDLLKEIPNVQAYVDDIYISHDDPQEHLEQLEKIFSILLNAGYVVSLKKSEIAQREVEFLGFNITKEGRGLTDTFKQKLLNITPPKDLKQLQSILGKLNFARNFIPNYSELVKPLYTIVAPANGKFISWTEDNSNQLQHIISVLNQADNLEERNPETRLIIKVNSSPSAGYIRYYNEGSKRPIMYVNYIFSKAEAKFTQTEKLLTTMHKGLIKAMDLAMGQEILVYSPIVSMTKIQRTPLPERKALPVRWITWMTYLEDPRIQFHYDKSLPELQQIPNVTEDVIAKTKHPSEFAMVFYTDGSAIKHPDVNKSHSAGMGIAQVQFIPEYKIVHQWSIPLGDHTAQLAEIAAVEFACKKALKISGPVLIVTDSFYVAESANKELPYWKSNGFLNNKKKPLRHVSKWKSIAECLQLKPDIIIMHEKGHQQPMTTLHTEGNNLADKLATQGSYVVHAGKRTADGSEFEKRTADGSEFESPKKKAKVE

SEQ ID NO: 6465 - protein, 2195 aa, synthetic construct
MPAAKRVKLDGGDKKYSIGLDIGTNSVGWAVITDEYKVPSKKFKVLGNTDRHSIKKNLIGALLFDSGETAEATRLKRTARRRYTRRKNRICYLQEIFSNEMAKVDDSFFHRLEESFLVEEDKKHERHPIFGNIVDEVAYHEKYPTIYHLRKKLVDSTDKADLRLIYLALAHMIKFRGHFLIEGDLNPDNSDVDKLFIQLVQTYNQLFEENPINASGVDAKAILSARLSKSRRLENLIAQLPGEKKNGLFGNLIALSLGLTPNFKSNFDLAEDAKLQLSKDTYDDDLDNLLAQIGDQYADLFLAAKNLSDAILLSDILRVNTEITKAPLSASMIKRYDEHHQDLTLLKALVRQQLPEKYKEIFFDQSKNGYAGYIDGGASQEEFYKFIKPILEKMDGTEELLVKLNREDLLRKQRTFDNGSIPHQIHLGELHAILRRQEDFYPFLKDNREKIEKILTFRIPYYVGPLARGNSRFAWMTRKSEETITPWNFEEVVDKGASAQSFIERMTNFDKNLPNEKVLPKHSLLYEYFTVYNELTKVKYVTEGMRKPAFLSGEQKKAIVDLLFKTNRKVTVKQLKEDYFKKIECFDSVEISGVEDRFNASLGTYHDLLKIIKDKDFLDNEENEDILEDIVLTLTLFEDREMIEERLKTYAHLFDDKVMKQLKRRRYTGWGRLSRKLINGIRDKQSGKTILDFLKSDGFANRNFMQLIHDDSLTFKEDIQKAQVSGQGDSLHEHIANLAGSPAIKKGILQTVKVVDELVKVMGRHKPENIVIEMARENQTTQKGQKNSRERMKRIEEGIKELGSQILKEHPVENTQLQNEKLYLYYLQNGRDMYVDQELDINRLSDYDVDHIVPQSFLKDDSIDNKVLTRSDKARGKSDNVPSEEVVKKMKNYWRQLLNAKLITQRKFDNLTKAERGGLSELDKAGFIKRQLVETRQITKHVAQILDSRMNTKYDENDKLIREVKVITLKSKLVSDFRKDFQFYKVREINNYHHAHDAYLNAVVGTALIKKYPKLESEFVYGDYKVYDVRKMIAKSEQEIGKATAKYFFYSNIMNFFKTEITLANGEIRKRPLIETNGETGEIVWDKGRDFATVRKVLSMPQVNIVKKTEVQTGGFSKESILPKRNSDKLIARKKDWDPKKYGGFDSPTVAYSVLVVAKVEKGKSKKLKSVKELLGITIMERSSFEKNPIDFLEAKGYKEVKKDLIIKLPKYSLFELENGRKRMLASAGELQKGNELALPSKYVNFLYLASHYEKLKGSPEDNEQKQLFVEQHKHYLDEIIEQISEFSKRVILADANLDKVLSAYNKHRDKPIREQAENIIHLFTLTNLGAPAAFKYFDTTIDRKRYTSTKEVLDATLIHQSITGLYETRIDLSQLGGDGGEAAAKEAAAKEAAAKEAAAKEAAAKEAAAKGGMDPLQLLQPLEAEIKGTKLKAHWNSGATITCVPQAFLEEEVPIKNIWIKTIHGEKEQPVYYLTFKIQGRKVEAEVISSPYDYILVSPSDIPWLMKKPLQLTTLVPLQEYEERLLKQTMLTGSYKEKLQSLFLKYDALWQHWENQVGHRRIKPHHIATGTVNPRPQKQYPINPKAKASIQTVINDLLKQGVLIQQNSIMNTPVYPVPKPDGKWRMVLDYREVNKTIPLIAAQNQHSAGILSSIFRGKYKTTLDLSNGFWAHSITPESYWLTAFTWLGQQYCWTRLPQGFLNSPALFTADVVDLLKEVPNVQVYVDDIYISHDDPREHLEQLEKVFSLLLNAGYVVSLKKSEIAQHEVEFLGFNITKEGRGLTETFKQKLLNITPPRDLKQLQSILGLLNFARNFIPNFSELVKPLYNIIATANGKYITWTTDNSQQLQNIISMLNSAENLEERNPEVRLIMKVNTSPSAGYIRFYNEFAKRPIMYLNYVYTKAEVKFTNTEKLLTTIHKGLIKALDLGMGQEILVYSPIVSMTKIQKTPLPERKALPIRWITWMSYLEDPRIQFHYDKTLPELQQVPTVTDDIIAKIKHPSEFSMVFYTDGSAIKHPNVNKSHNAGMGIAQVQFKPEFTVINTWSIPLGDHTAQLAEVAAVEFACKKALKIDGPVLIVTDSFYVAESVNKELPYWQSNGFFNNKKKPLKHVSKWKSIADCIQLKPDIIIIHEKGHQPTASTFHTEGNNLADKLATQGSYVVNAGKRTADGSEFEKRTADGSEFESPKKKAKVE

SEQ ID NO: 6466 - protein, 2106 aa, synthetic construct
MPAAKRVKLDGGDKKYSIGLDIGTNSVGWAVITDEYKVPSKKFKVLGNTDRHSIKKNLIGALLFDSGETAEATRLKRTARRRYTRRKNRICYLQEIFSNEMAKVDDSFFHRLEESFLVEEDKKHERHPIFGNIVDEVAYHEKYPTIYHLRKKLVDSTDKADLRLIYLALAHMIKFRGHFLIEGDLNPDNSDVDKLFIQLVQTYNQLFEENPINASGVDAKAILSARLSKSRRLENLIAQLPGEKKNGLFGNLIALSLGLTPNFKSNFDLAEDAKLQLSKDTYDDDLDNLLAQIGDQYADLFLAAKNLSDAILLSDILRVNTEITKAPLSASMIKRYDEHHQDLTLLKALVRQQLPEKYKEIFFDQSKNGYAGYIDGGASQEEFYKFIKPILEKMDGTEELLVKLNREDLLRKQRTFDNGSIPHQIHLGELHAILRRQEDFYPFLKDNREKIEKILTFRIPYYVGPLARGNSRFAWMTRKSEETITPWNFEEVVDKGASAQSFIERMTNFDKNLPNEKVLPKHSLLYEYFTVYNELTKVKYVTEGMRKPAFLSGEQKKAIVDLLFKTNRKVTVKQLKEDYFKKIECFDSVEISGVEDRFNASLGTYHDLLKIIKDKDFLDNEENEDILEDIVLTLTLFEDREMIEERLKTYAHLFDDKVMKQLKRRRYTGWGRLSRKLINGIRDKQSGKTILDFLKSDGFANRNFMQLIHDDSLTFKEDIQKAQVSGQGDSLHEHIANLAGSPAIKKGILQTVKVVDELVKVMGRHKPENIVIEMARENQTTQKGQKNSRERMKRIEEGIKELGSQILKEHPVENTQLQNEKLYLYYLQNGRDMYVDQELDINRLSDYDVDHIVPQSFLKDDSIDNKVLTRSDKARGKSDNVPSEEVVKKMKNYWRQLLNAKLITQRKFDNLTKAERGGLSELDKAGFIKRQLVETRQITKHVAQILDSRMNTKYDENDKLIREVKVITLKSKLVSDFRKDFQFYKVREINNYHHAHDAYLNAVVGTALIKKYPKLESEFVYGDYKVYDVRKMIAKSEQEIGKATAKYFFYSNIMNFFKTEITLANGEIRKRPLIETNGETGEIVWDKGRDFATVRKVLSMPQVNIVKKTEVQTGGFSKESILPKRNSDKLIARKKDWDPKKYGGFDSPTVAYSVLVVAKVEKGKSKKLKSVKELLGITIMERSSFEKNPIDFLEAKGYKEVKKDLIIKLPKYSLFELENGRKRMLASAGELQKGNELALPSKYVNFLYLASHYEKLKGSPEDNEQKQLFVEQHKHYLDEIIEQISEFSKRVILADANLDKVLSAYNKHRDKPIREQAENIIHLFTLTNLGAPAAFKYFDTTIDRKRYTSTKEVLDATLIHQSITGLYETRIDLSQLGGDGGEAAAKEAAAKEAAAKEAAAKEAAAKEAAAKGGIPWLMKKPLQLTTLVPLQEYEERLLKQTMLTGSYKEKLQSLFLKYDALWQHWENQVGHRRIKPHHIATGTVNPRPQKQYPINPKAKASIQTVINDLLKQGVLIQQNSIMNTPVYPVPKPDGKWRMVLDYREVNKTIPLIAAQNQHSAGILSSIFRGKYKTTLDLSNGFWAHSITPESYWLTAFTWLGQQYCWTRLPQGFLNSPALFNADVVDLLKEVPNVQVYVDDIYISHDDPREHLEQLEKVFSLLLNAGYVVSLKKSEIAQHEVEFLGFNITKEGRGLTETFKQKLLNITPPRDLKQLQSILGLLNFARNFIPNFSELVKPLYNIIATAPGKYITWTTDNSQQLQNIISMLNSAENLEERNPEVRLIMKVNTSPSAGYIRFYNEFAKRPIMYLNYVYTKAEVKFTNTEKLLTTIHKGLIKALDLGMGQEILVYSPIVSMTKIQKTPLPERKALPIRWITWMSYLEDPRIQFHYDKTLPELQQVPTVTDDIIAKIKHPSEFSMVFYTDGSAIKHPNVNKSHNAGMGIAQVQFKPEFTVINTWSIPLGDHTAQLAEVAAVEFACKKALKIDGPVLIVTDSFYVAESVNKELPYWQSNGFFNNKKKPLKHVSKWKSIADCIQLKPDIIIIHEKGHQPTASTFHTEGNNLADKLATQGSYVVNAGKRTADGSEFEKRTADGSEFESPKKKAKVE

SEQ ID NO: 6467 - protein, 2113 aa, synthetic construct
MPAAKRVKLDGGDKKYSIGLDIGTNSVGWAVITDEYKVPSKKFKVLGNTDRHSIKKNLIGALLFDSGETAEATRLKRTARRRYTRRKNRICYLQEIFSNEMAKVDDSFFHRLEESFLVEEDKKHERHPIFGNIVDEVAYHEKYPTIYHLRKKLVDSTDKADLRLIYLALAHMIKFRGHFLIEGDLNPDNSDVDKLFIQLVQTYNQLFEENPINASGVDAKAILSARLSKSRRLENLIAQLPGEKKNGLFGNLIALSLGLTPNFKSNFDLAEDAKLQLSKDTYDDDLDNLLAQIGDQYADLFLAAKNLSDAILLSDILRVNTEITKAPLSASMIKRYDEHHQDLTLLKALVRQQLPEKYKEIFFDQSKNGYAGYIDGGASQEEFYKFIKPILEKMDGTEELLVKLNREDLLRKQRTFDNGSIPHQIHLGELHAILRRQEDFYPFLKDNREKIEKILTFRIPYYVGPLARGNSRFAWMTRKSEETITPWNFEEVVDKGASAQSFIERMTNFDKNLPNEKVLPKHSLLYEYFTVYNELTKVKYVTEGMRKPAFLSGEQKKAIVDLLFKTNRKVTVKQLKEDYFKKIECFDSVEISGVEDRFNASLGTYHDLLKIIKDKDFLDNEENEDILEDIVLTLTLFEDREMIEERLKTYAHLFDDKVMKQLKRRRYTGWGRLSRKLINGIRDKQSGKTILDFLKSDGFANRNFMQLIHDDSLTFKEDIQKAQVSGQGDSLHEHIANLAGSPAIKKGILQTVKVVDELVKVMGRHKPENIVIEMARENQTTQKGQKNSRERMKRIEEGIKELGSQILKEHPVENTQLQNEKLYLYYLQNGRDMYVDQELDINRLSDYDVDHIVPQSFLKDDSIDNKVLTRSDKARGKSDNVPSEEVVKKMKNYWRQLLNAKLITQRKFDNLTKAERGGLSELDKAGFIKRQLVETRQITKHVAQILDSRMNTKYDENDKLIREVKVITLKSKLVSDFRKDFQFYKVREINNYHHAHDAYLNAVVGTALIKKYPKLESEFVYGDYKVYDVRKMIAKSEQEIGKATAKYFFYSNIMNFFKTEITLANGEIRKRPLIETNGETGEIVWDKGRDFATVRKVLSMPQVNIVKKTEVQTGGFSKESILPKRNSDKLIARKKDWDPKKYGGFDSPTVAYSVLVVAKVEKGKSKKLKSVKELLGITIMERSSFEKNPIDFLEAKGYKEVKKDLIIKLPKYSLFELENGRKRMLASAGELQKGNELALPSKYVNFLYLASHYEKLKGSPEDNEQKQLFVEQHKHYLDEIIEQISEFSKRVILADANLDKVLSAYNKHRDKPIREQAENIIHLFTLTNLGAPAAFKYFDTTIDRKRYTSTKEVLDATLIHQSITGLYETRIDLSQLGGDGGEAAAKEAAAKEAAAKEAAAKEAAAKEAAAKGGVLNLEEEYRLHEKPVPSSIDPSWLQLFPTVWAERAGMGLANQVPPVVVELRSGASPVAVRQYPMSKEAREGIRPHIQRFLDLGVLVPCQSPWNTPLLPVKKPGTNDYRPVQDLREINKRVQDIHPTVPNPYNLLSSLPPSHTWYSVLDLKDAFFCLKLHPNSQPLFAFEWRDPEKGNTGQLTWTRLPQGFKNSPTLFDEALHRDLAPFRALNPQVVLLQYVDDLLVAAPTYRDCKEGTQKLLQELSKLGYRVSAKKAQLCQKEVTYLGYLLKEGKRWLTPARKATVMKIPPPTTPRQVREFLGTAGFCRLWIPGFASLAAPLYPLTKESIPFIWTEEHQKAFDRIKEALLSAPALALPDLTKPFTLYVDERAGVARGVLTQTLGPWRRPVAYLSKKLDPVASGWPTCLKAVAAVALLLKDADKLTLGQNVTVIASHSLESIVRQPPDRWMTNARMTHYQSLLLNERVSFAPPAVLNPATLLPVESEATPVHRCSEILAEETGTRRDLKDQPLPGVPAWYTDGSSFIAEGKRRAGAAIVDGKRTVWASSLPEGTSAQKAELVALTQALRLAEGKDINIYTDSRYAFATAHIHGAIYKQRGLLTSAGKDIKNKEEILALLEAIHLPKRVAIIHCPGHQKGNDPVATGNRRADEAAKQAALSTRVLAETTKPAGKRTADGSEFEKRTADGSEFESPKKKAKVE

SEQ ID NO: 6468 - protein, 2113 aa, synthetic construct
MPAAKRVKLDGGDKKYSIGLDIGTNSVGWAVITDEYKVPSKKFKVLGNTDRHSIKKNLIGALLFDSGETAEATRLKRTARRRYTRRKNRICYLQEIFSNEMAKVDDSFFHRLEESFLVEEDKKHERHPIFGNIVDEVAYHEKYPTIYHLRKKLVDSTDKADLRLIYLALAHMIKFRGHFLIEGDLNPDNSDVDKLFIQLVQTYNQLFEENPINASGVDAKAILSARLSKSRRLENLIAQLPGEKKNGLFGNLIALSLGLTPNFKSNFDLAEDAKLQLSKDTYDDDLDNLLAQIGDQYADLFLAAKNLSDAILLSDILRVNTEITKAPLSASMIKRYDEHHQDLTLLKALVRQQLPEKYKEIFFDQSKNGYAGYIDGGASQEEFYKFIKPILEKMDGTEELLVKLNREDLLRKQRTFDNGSIPHQIHLGELHAILRRQEDFYPFLKDNREKIEKILTFRIPYYVGPLARGNSRFAWMTRKSEETITPWNFEEVVDKGASAQSFIERMTNFDKNLPNEKVLPKHSLLYEYFTVYNELTKVKYVTEGMRKPAFLSGEQKKAIVDLLFKTNRKVTVKQLKEDYFKKIECFDSVEISGVEDRFNASLGTYHDLLKIIKDKDFLDNEENEDILEDIVLTLTLFEDREMIEERLKTYAHLFDDKVMKQLKRRRYTGWGRLSRKLINGIRDKQSGKTILDFLKSDGFANRNFMQLIHDDSLTFKEDIQKAQVSGQGDSLHEHIANLAGSPAIKKGILQTVKVVDELVKVMGRHKPENIVIEMARENQTTQKGQKNSRERMKRIEEGIKELGSQILKEHPVENTQLQNEKLYLYYLQNGRDMYVDQELDINRLSDYDVDHIVPQSFLKDDSIDNKVLTRSDKARGKSDNVPSEEVVKKMKNYWRQLLNAKLITQRKFDNLTKAERGGLSELDKAGFIKRQLVETRQITKHVAQILDSRMNTKYDENDKLIREVKVITLKSKLVSDFRKDFQFYKVREINNYHHAHDAYLNAVVGTALIKKYPKLESEFVYGDYKVYDVRKMIAKSEQEIGKATAKYFFYSNIMNFFKTEITLANGEIRKRPLIETNGETGEIVWDKGRDFATVRKVLSMPQVNIVKKTEVQTGGFSKESILPKRNSDKLIARKKDWDPKKYGGFDSPTVAYSVLVVAKVEKGKSKKLKSVKELLGITIMERSSFEKNPIDFLEAKGYKEVKKDLIIKLPKYSLFELENGRKRMLASAGELQKGNELALPSKYVNFLYLASHYEKLKGSPEDNEQKQLFVEQHKHYLDEIIEQISEFSKRVILADANLDKVLSAYNKHRDKPIREQAENIIHLFTLTNLGAPAAFKYFDTTIDRKRYTSTKEVLDATLIHQSITGLYETRIDLSQLGGDGGEAAAKEAAAKEAAAKEAAAKEAAAKEAAAKGGVLNLEEEYRLHEKPVPSSIDPSWLQLFPTVWAERAGMGLANQVPPVVVELRSGASPVAVRQYPMSKEAREGIRPHIQRFLDLGVLVPCQSPWNTPLLPVKKPGTNDYRPVQDLREINKRVQDIHPTVPNPYNLLSSLPPSHTWYSVLDLKDAFFCLKLHPNSQPLFAFEWRDPEKGNTGQLTWTRLPQGFKNSPTLFNEALHRDLAPFRALNPQVVLLQYVDDLLVAAPTYRDCKEGTQKLLQELSKLGYRVSAKKAQLCQKEVTYLGYLLKEGKRWLTPARKATVMKIPPPTTPRQVREFLGTAGFCRLWIPGFASLAAPLYPLTKPSIPFIWTEEHQKAFDRIKEALLSAPALALPDLTKPFTLYVDERAGVARGVLTQTLGPWRRPVAYLSKKLDPVASGWPTCLKAVAAVALLLKDADKLTLGQNVTVIASHSLESIVRQPPDRWMTNARMTHYQSLLLNERVSFAPPAVLNPATLLPVESEATPVHRCSEILAEETGTRRDLKDQPLPGVPAWYTDGSSFIAEGKRRAGAAIVDGKRTVWASSLPEGTSAQKAELVALTQALRLAEGKDINIYTDSRYAFATAHIHGAIYKQRGWLTSAGKDIKNKEEILALLEAIHLPKRVAIIHCPGHQKGNDPVATGNRRADEAAKQAALSTRVLAETTKPAGKRTADGSEFEKRTADGSEFESPKKKAKVE

SEQ ID NO: 6469 - protein, 2115 aa, synthetic construct
MPAAKRVKLDGGDKKYSIGLDIGTNSVGWAVITDEYKVPSKKFKVLGNTDRHSIKKNLIGALLFDSGETAEATRLKRTARRRYTRRKNRICYLQEIFSNEMAKVDDSFFHRLEESFLVEEDKKHERHPIFGNIVDEVAYHEKYPTIYHLRKKLVDSTDKADLRLIYLALAHMIKFRGHFLIEGDLNPDNSDVDKLFIQLVQTYNQLFEENPINASGVDAKAILSARLSKSRRLENLIAQLPGEKKNGLFGNLIALSLGLTPNFKSNFDLAEDAKLQLSKDTYDDDLDNLLAQIGDQYADLFLAAKNLSDAILLSDILRVNTEITKAPLSASMIKRYDEHHQDLTLLKALVRQQLPEKYKEIFFDQSKNGYAGYIDGGASQEEFYKFIKPILEKMDGTEELLVKLNREDLLRKQRTFDNGSIPHQIHLGELHAILRRQEDFYPFLKDNREKIEKILTFRIPYYVGPLARGNSRFAWMTRKSEETITPWNFEEVVDKGASAQSFIERMTNFDKNLPNEKVLPKHSLLYEYFTVYNELTKVKYVTEGMRKPAFLSGEQKKAIVDLLFKTNRKVTVKQLKEDYFKKIECFDSVEISGVEDRFNASLGTYHDLLKIIKDKDFLDNEENEDILEDIVLTLTLFEDREMIEERLKTYAHLFDDKVMKQLKRRRYTGWGRLSRKLINGIRDKQSGKTILDFLKSDGFANRNFMQLIHDDSLTFKEDIQKAQVSGQGDSLHEHIANLAGSPAIKKGILQTVKVVDELVKVMGRHKPENIVIEMARENQTTQKGQKNSRERMKRIEEGIKELGSQILKEHPVENTQLQNEKLYLYYLQNGRDMYVDQELDINRLSDYDVDHIVPQSFLKDDSIDNKVLTRSDKARGKSDNVPSEEVVKKMKNYWRQLLNAKLITQRKFDNLTKAERGGLSELDKAGFIKRQLVETRQITKHVAQILDSRMNTKYDENDKLIREVKVITLKSKLVSDFRKDFQFYKVREINNYHHAHDAYLNAVVGTALIKKYPKLESEFVYGDYKVYDVRKMIAKSEQEIGKATAKYFFYSNIMNFFKTEITLANGEIRKRPLIETNGETGEIVWDKGRDFATVRKVLSMPQVNIVKKTEVQTGGFSKESILPKRNSDKLIARKKDWDPKKYGGFDSPTVAYSVLVVAKVEKGKSKKLKSVKELLGITIMERSSFEKNPIDFLEAKGYKEVKKDLIIKLPKYSLFELENGRKRMLASAGELQKGNELALPSKYVNFLYLASHYEKLKGSPEDNEQKQLFVEQHKHYLDEIIEQISEFSKRVILADANLDKVLSAYNKHRDKPIREQAENIIHLFTLTNLGAPAAFKYFDTTIDRKRYTSTKEVLDATLIHQSITGLYETRIDLSQLGGDGGEAAAKEAAAKEAAAKEAAAKEAAAKEAAAKGGTLNIEDEYRLHETSKEPDVPLGSTWLSDFPQAWAETGGMGLAVRQAPLIIPLKATSTPVSIKQYPMSQEARLGIKPHIQRLLDQGILVPCQSPWNTPLLPVKKPGTNDYRPVQDLREVNKRVEDIHPTVPNPYNLLSGLPPSHQWYTVLDLKDAFFCLRLHPTSQPLFAFEWRDPEMGISGQLTWTRLPQGFKNSPTLFDEALHRDLADFRIQHPDLILLQYVDDLLLAATSEQDCQRGTRALLQTLGNLGYRASAKKAQICQKQVKYLGYLLKEGQRWLTEARKETVMGQPTPKTPRQLREFLGTAGFCRLWIPGFAEMAAPLYPLTKTGTLFNWGPDQQKAYQEIKQALLTAPALGLPDLTKPFELFVDEKQGYAKGVLTQKLGPWRRPVAYLSKKLDPVAAGWPPCLRMVAAIAVLTKDAGKLTMGQPLVILAPHAVEALVKQPPDRWLSNARMTHYQAMLLDTDRVQFGPVVALNPATLLPLPEKEAPHDCLEILAETHGTRPDLTDQPIPDADYTWYTDGSSFLQEGQRRAGAAVTTETEVIWARALPAGTSAQRAELIALTQALKMAEGKKLNVYTDSRYAFATAHVHGEIYRRRGLLTSEGREIKNKNEILALLKALFLPKRLSIIHCPGHQKGNSAEARGNRMADQAAREAAMKAVLETSTLLAGKRTADGSEFEKRTADGSEFESPKKKAKVE

SEQ ID NO: 6470 - protein, 2115 aa, synthetic construct
MPAAKRVKLDGGDKKYSIGLDIGTNSVGWAVITDEYKVPSKKFKVLGNTDRHSIKKNLIGALLFDSGETAEATRLKRTARRRYTRRKNRICYLQEIFSNEMAKVDDSFFHRLEESFLVEEDKKHERHPIFGNIVDEVAYHEKYPTIYHLRKKLVDSTDKADLRLIYLALAHMIKFRGHFLIEGDLNPDNSDVDKLFIQLVQTYNQLFEENPINASGVDAKAILSARLSKSRRLENLIAQLPGEKKNGLFGNLIALSLGLTPNFKSNFDLAEDAKLQLSKDTYDDDLDNLLAQIGDQYADLFLAAKNLSDAILLSDILRVNTEITKAPLSASMIKRYDEHHQDLTLLKALVRQQLPEKYKEIFFDQSKNGYAGYIDGGASQEEFYKFIKPILEKMDGTEELLVKLNREDLLRKQRTFDNGSIPHQIHLGELHAILRRQEDFYPFLKDNREKIEKILTFRIPYYVGPLARGNSRFAWMTRKSEETITPWNFEEVVDKGASAQSFIERMTNFDKNLPNEKVLPKHSLLYEYFTVYNELTKVKYVTEGMRKPAFLSGEQKKAIVDLLFKTNRKVTVKQLKEDYFKKIECFDSVEISGVEDRFNASLGTYHDLLKIIKDKDFLDNEENEDILEDIVLTLTLFEDREMIEERLKTYAHLFDDKVMKQLKRRRYTGWGRLSRKLINGIRDKQSGKTILDFLKSDGFANRNFMQLIHDDSLTFKEDIQKAQVSGQGDSLHEHIANLAGSPAIKKGILQTVKVVDELVKVMGRHKPENIVIEMARENQTTQKGQKNSRERMKRIEEGIKELGSQILKEHPVENTQLQNEKLYLYYLQNGRDMYVDQELDINRLSDYDVDHIVPQSFLKDDSIDNKVLTRSDKARGKSDNVPSEEVVKKMKNYWRQLLNAKLITQRKFDNLTKAERGGLSELDKAGFIKRQLVETRQITKHVAQILDSRMNTKYDENDKLIREVKVITLKSKLVSDFRKDFQFYKVREINNYHHAHDAYLNAVVGTALIKKYPKLESEFVYGDYKVYDVRKMIAKSEQEIGKATAKYFFYSNIMNFFKTEITLANGEIRKRPLIETNGETGEIVWDKGRDFATVRKVLSMPQVNIVKKTEVQTGGFSKESILPKRNSDKLIARKKDWDPKKYGGFDSPTVAYSVLVVAKVEKGKSKKLKSVKELLGITIMERSSFEKNPIDFLEAKGYKEVKKDLIIKLPKYSLFELENGRKRMLASAGELQKGNELALPSKYVNFLYLASHYEKLKGSPEDNEQKQLFVEQHKHYLDEIIEQISEFSKRVILADANLDKVLSAYNKHRDKPIREQAENIIHLFTLTNLGAPAAFKYFDTTIDRKRYTSTKEVLDATLIHQSITGLYETRIDLSQLGGDGGEAAAKEAAAKEAAAKEAAAKEAAAKEAAAKGGTLNIEDEYRLHETSKEPDVPLGSTWLSDFPQAWAETGGMGLAVRQAPLIIPLKATSTPVSIKQYPMSQEARLGIKPHIQRLLDQGILVPCQSPWNTPLLPVKKPGTNDYRPVQDLREVNKRVEDIHPTVPNPYNLLSGLPPSHQWYTVLDLKDAFFCLRLHPTSQPLFAFEWRDPEMGISGQLTWTRLPQGFKNSPTLFNEALHRDLADFRIQHPDLILLQYVDDLLLAATSEQDCQRGTRALLQTLGNLGYRASAKKAQICQKQVKYLGYLLKEGQRWLTEARKETVMGQPTPKTPRQLREFLGTAGFCRLWIPGFAEMAAPLYPLTKPGTLFNWGPDQQKAYQEIKQALLTAPALGLPDLTKPFELFVDEKQGYAKGVLTQKLGPWRRPVAYLSKKLDPVAAGWPPCLRMVAAIAVLTKDAGKLTMGQPLVILAPHAVEALVKQPPDRWLSNARMTHYQAMLLDTDRVQFGPVVALNPATLLPLPEKEAPHDCLEILAETHGTRPDLTDQPIPDADYTWYTDGSSFLQEGQRRAGAAVTTETEVIWARALPAGTSAQRAELIALTQALKMAEGKKLNVYTDSRYAFATAHVHGEIYRRRGWLTSEGREIKNKNEILALLKALFLPKRLSIIHCPGHQKGNSAEARGNRMADQAAREAAMKAVLETSTLLAGKRTADGSEFEKRTADGSEFESPKKKAKVE

SEQ ID NO: 6471 - protein, 2094 aa, synthetic construct
MPAAKRVKLDGGDKKYSIGLDIGTNSVGWAVITDEYKVPSKKFKVLGNTDRHSIKKNLIGALLFDSGETAEATRLKRTARRRYTRRKNRICYLQEIFSNEMAKVDDSFFHRLEESFLVEEDKKHERHPIFGNIVDEVAYHEKYPTIYHLRKKLVDSTDKADLRLIYLALAHMIKFRGHFLIEGDLNPDNSDVDKLFIQLVQTYNQLFEENPINASGVDAKAILSARLSKSRRLENLIAQLPGEKKNGLFGNLIALSLGLTPNFKSNFDLAEDAKLQLSKDTYDDDLDNLLAQIGDQYADLFLAAKNLSDAILLSDILRVNTEITKAPLSASMIKRYDEHHQDLTLLKALVRQQLPEKYKEIFFDQSKNGYAGYIDGGASQEEFYKFIKPILEKMDGTEELLVKLNREDLLRKQRTFDNGSIPHQIHLGELHAILRRQEDFYPFLKDNREKIEKILTFRIPYYVGPLARGNSRFAWMTRKSEETITPWNFEEVVDKGASAQSFIERMTNFDKNLPNEKVLPKHSLLYEYFTVYNELTKVKYVTEGMRKPAFLSGEQKKAIVDLLFKTNRKVTVKQLKEDYFKKIECFDSVEISGVEDRFNASLGTYHDLLKIIKDKDFLDNEENEDILEDIVLTLTLFEDREMIEERLKTYAHLFDDKVMKQLKRRRYTGWGRLSRKLINGIRDKQSGKTILDFLKSDGFANRNFMQLIHDDSLTFKEDIQKAQVSGQGDSLHEHIANLAGSPAIKKGILQTVKVVDELVKVMGRHKPENIVIEMARENQTTQKGQKNSRERMKRIEEGIKELGSQILKEHPVENTQLQNEKLYLYYLQNGRDMYVDQELDINRLSDYDVDHIVPQSFLKDDSIDNKVLTRSDKARGKSDNVPSEEVVKKMKNYWRQLLNAKLITQRKFDNLTKAERGGLSELDKAGFIKRQLVETRQITKHVAQILDSRMNTKYDENDKLIREVKVITLKSKLVSDFRKDFQFYKVREINNYHHAHDAYLNAVVGTALIKKYPKLESEFVYGDYKVYDVRKMIAKSEQEIGKATAKYFFYSNIMNFFKTEITLANGEIRKRPLIETNGETGEIVWDKGRDFATVRKVLSMPQVNIVKKTEVQTGGFSKESILPKRNSDKLIARKKDWDPKKYGGFDSPTVAYSVLVVAKVEKGKSKKLKSVKELLGITIMERSSFEKNPIDFLEAKGYKEVKKDLIIKLPKYSLFELENGRKRMLASAGELQKGNELALPSKYVNFLYLASHYEKLKGSPEDNEQKQLFVEQHKHYLDEIIEQISEFSKRVILADANLDKVLSAYNKHRDKPIREQAENIIHLFTLTNLGAPAAFKYFDTTIDRKRYTSTKEVLDATLIHQSITGLYETRIDLSQLGGDGGPAPGGTVSLQDEHRLFDIPVTTSLPDVWLQDFPQAWAETGGLGRAKCQAPIIIDLKPTAVPVSIKQYPMSLEAHMGIRQHIIKFLELGVLRPCRSPWNTPLLPVKKPGTQDYRPVQDLREINKRTVDIHPTVPNPYNLLSTLKPDYSWYTVLDLKDAFFCLPLAPQSQELFAFEWKDPERGISGQLTWTRLPQGFKNSPTLFNEALHRDLTDFRTQHPEVTLLQYVDDLLLAAPTKKACTQGTRHLLQELGEKGYRASAKKAQICQTKVTYLGYILSEGKRWLTPGRIETVARIPPPRNPREVREFLGTAGFCRLWIPGFAELAAPLYALTKPSTPFTWQTEHQLAFEALKKALLSAPALGLPDTSKPFTLFLDERQGIAKGVLTQKLGPWKRPVAYLSKKLDPVAAGWPPCLRIMAATAMLVKDSAKLTLGQPLTVITPHTLEAIVRQPPDRWITNARLTHYQALLLDTDRVQFGPPVTLNPATLLPVPENQPSPHDCRQVLAETHGTREDLKDQELPDADHTWYTDGSSYLDSGTRRAGAAVVDGHNTIWAQSLPPGTSAQKAELIALTKALELSKGKKANIYTDSRYAFATAHTHGSIYERRGWLTSEGKEIKNKAEIIALLKALFLPQEVAIIHCPGHQKGQDPVAVGNRQADRVARQAAMAEVLTLATEPDNTSHITAGKRTADGSEFEKRTADGSEFESPKKKAKVE

SEQ ID NO: 6472 - protein, 2088 aa, synthetic construct
MPAAKRVKLDGGDKKYSIGLDIGTNSVGWAVITDEYKVPSKKFKVLGNTDRHSIKKNLIGALLFDSGETAEATRLKRTARRRYTRRKNRICYLQEIFSNEMAKVDDSFFHRLEESFLVEEDKKHERHPIFGNIVDEVAYHEKYPTIYHLRKKLVDSTDKADLRLIYLALAHMIKFRGHFLIEGDLNPDNSDVDKLFIQLVQTYNQLFEENPINASGVDAKAILSARLSKSRRLENLIAQLPGEKKNGLFGNLIALSLGLTPNFKSNFDLAEDAKLQLSKDTYDDDLDNLLAQIGDQYADLFLAAKNLSDAILLSDILRVNTEITKAPLSASMIKRYDEHHQDLTLLKALVRQQLPEKYKEIFFDQSKNGYAGYIDGGASQEEFYKFIKPILEKMDGTEELLVKLNREDLLRKQRTFDNGSIPHQIHLGELHAILRRQEDFYPFLKDNREKIEKILTFRIPYYVGPLARGNSRFAWMTRKSEETITPWNFEEVVDKGASAQSFIERMTNFDKNLPNEKVLPKHSLLYEYFTVYNELTKVKYVTEGMRKPAFLSGEQKKAIVDLLFKTNRKVTVKQLKEDYFKKIECFDSVEISGVEDRFNASLGTYHDLLKIIKDKDFLDNEENEDILEDIVLTLTLFEDREMIEERLKTYAHLFDDKVMKQLKRRRYTGWGRLSRKLINGIRDKQSGKTILDFLKSDGFANRNFMQLIHDDSLTFKEDIQKAQVSGQGDSLHEHIANLAGSPAIKKGILQTVKVVDELVKVMGRHKPENIVIEMARENQTTQKGQKNSRERMKRIEEGIKELGSQILKEHPVENTQLQNEKLYLYYLQNGRDMYVDQELDINRLSDYDVDHIVPQSFLKDDSIDNKVLTRSDKARGKSDNVPSEEVVKKMKNYWRQLLNAKLITQRKFDNLTKAERGGLSELDKAGFIKRQLVETRQITKHVAQILDSRMNTKYDENDKLIREVKVITLKSKLVSDFRKDFQFYKVREINNYHHAHDAYLNAVVGTALIKKYPKLESEFVYGDYKVYDVRKMIAKSEQEIGKATAKYFFYSNIMNFFKTEITLANGEIRKRPLIETNGETGEIVWDKGRDFATVRKVLSMPQVNIVKKTEVQTGGFSKESILPKRNSDKLIARKKDWDPKKYGGFDSPTVAYSVLVVAKVEKGKSKKLKSVKELLGITIMERSSFEKNPIDFLEAKGYKEVKKDLIIKLPKYSLFELENGRKRMLASAGELQKGNELALPSKYVNFLYLASHYEKLKGSPEDNEQKQLFVEQHKHYLDEIIEQISEFSKRVILADANLDKVLSAYNKHRDKPIREQAENIIHLFTLTNLGAPAAFKYFDTTIDRKRYTSTKEVLDATLIHQSITGLYETRIDLSQLGGDGGPAPGGTLNLEDEYRLYETSAEPEVSPGSTWLSDFPQAWAETGGMGLAVRQAPLIIPLKATSTPVSIKQYPMSQEAKLGIKPHIQRLLDQGILVPCQSPWNTPLLPVKKPGTNDYRPVQDLREVNKRVEDIHPTVPNPYNLLSGLPPSHRWYTVLDLKDAFFCLRLHPTSQPLFAFEWRDPGMGISGQLTWTRLPQGFKNSPTLFNEALHRDLADFRIQHPDLILLQYVDDILLAATSELDCQQGTRALLLTLGNLGYRASAKKAQLCQKQVKYLGYLLKEGQRWLTEARKETVMGQPTPKTPRQLREFLGKAGFCRLFIPGFAEMAAPLYPLTKPGTLFNWGPDQQKAYQEIKQALLTAPALGLPDLTKPFELFVDEKQGYAKGVLTQKLGPWRRPVAYLSKKLDPVAAGWPPCLRMVAAIAVLRKDAGKLTMGQPLVILAPHAVEALVKQPPDRWLSNARMTHYQAMLLDTDRVQFGPVVALNPATLLPLPEEGAPHDCLEILAETHGTRPDLTDQPIPDADHTWYTDGSSFLQEGQRKAGAAVTTETEVIWARALPAGTSAQRAELIALTQALKMAEGKRLNVYTDSRYAFATAHIHGEIYRRRGWLTSEGREIKNKSEILALLKALFLPKRLSIIHCLGHQKGDSAEARGNRLADQAAREAAIKTPPDTSTLLAGKRTADGSEFEKRTADGSEFESPKKKAKVE

SEQ ID NO: 6473 - protein, 2088 aa, synthetic construct
MPAAKRVKLDGGDKKYSIGLDIGTNSVGWAVITDEYKVPSKKFKVLGNTDRHSIKKNLIGALLFDSGETAEATRLKRTARRRYTRRKNRICYLQEIFSNEMAKVDDSFFHRLEESFLVEEDKKHERHPIFGNIVDEVAYHEKYPTIYHLRKKLVDSTDKADLRLIYLALAHMIKFRGHFLIEGDLNPDNSDVDKLFIQLVQTYNQLFEENPINASGVDAKAILSARLSKSRRLENLIAQLPGEKKNGLFGNLIALSLGLTPNFKSNFDLAEDAKLQLSKDTYDDDLDNLLAQIGDQYADLFLAAKNLSDAILLSDILRVNTEITKAPLSASMIKRYDEHHQDLTLLKALVRQQLPEKYKEIFFDQSKNGYAGYIDGGASQEEFYKFIKPILEKMDGTEELLVKLNREDLLRKQRTFDNGSIPHQIHLGELHAILRRQEDFYPFLKDNREKIEKILTFRIPYYVGPLARGNSRFAWMTRKSEETITPWNFEEVVDKGASAQSFIERMTNFDKNLPNEKVLPKHSLLYEYFTVYNELTKVKYVTEGMRKPAFLSGEQKKAIVDLLFKTNRKVTVKQLKEDYFKKIECFDSVEISGVEDRFNASLGTYHDLLKIIKDKDFLDNEENEDILEDIVLTLTLFEDREMIEERLKTYAHLFDDKVMKQLKRRRYTGWGRLSRKLINGIRDKQSGKTILDFLKSDGFANRNFMQLIHDDSLTFKEDIQKAQVSGQGDSLHEHIANLAGSPAIKKGILQTVKVVDELVKVMGRHKPENIVIEMARENQTTQKGQKNSRERMKRIEEGIKELGSQILKEHPVENTQLQNEKLYLYYLQNGRDMYVDQELDINRLSDYDVDHIVPQSFLKDDSIDNKVLTRSDKARGKSDNVPSEEVVKKMKNYWRQLLNAKLITQRKFDNLTKAERGGLSELDKAGFIKRQLVETRQITKHVAQILDSRMNTKYDENDKLIREVKVITLKSKLVSDFRKDFQFYKVREINNYHHAHDAYLNAVVGTALIKKYPKLESEFVYGDYKVYDVRKMIAKSEQEIGKATAKYFFYSNIMNFFKTEITLANGEIRKRPLIETNGETGEIVWDKGRDFATVRKVLSMPQVNIVKKTEVQTGGFSKESILPKRNSDKLIARKKDWDPKKYGGFDSPTVAYSVLVVAKVEKGKSKKLKSVKELLGITIMERSSFEKNPIDFLEAKGYKEVKKDLIIKLPKYSLFELENGRKRMLASAGELQKGNELALPSKYVNFLYLASHYEKLKGSPEDNEQKQLFVEQHKHYLDEIIEQISEFSKRVILADANLDKVLSAYNKHRDKPIREQAENIIHLFTLTNLGAPAAFKYFDTTIDRKRYTSTKEVLDATLIHQSITGLYETRIDLSQLGGDGGPAPGGTLGIEDEYRLHETSTEPDVSLGSTWLSDFPQAWAETGGMGLAVRQAPLIIPLKATSTPVSIQQYPMSHEARLGIKPHIQRLLDQGILVPCQSPWNTPLLPVKKPGTNDYRPVQDLREVNKRVEDIHPTVPNPYNLLSGLPPSHQWYTVLDLKDAFFCLRLHPTSQPLFAFEWRDPGMGISGQLTWTRLPQGFKNSPTLFNEALHRDLADFRIQHPDLILLQYVDDILLAATSELDCQQGTRALLQTLGDLGYRASAKKAQICQKQVKYLGYLLREGQRWLTEARKETVMGQPVPKTPRQLREFLGTAGFCRLWIPGFAEMAAPLYPLTKPGTLFSWGPDQQKAYQEIKQALLTAPALGLPDLTKPFELFVDEKQGYAKGVLTQKLGPWRRPVAYLSKKLDPVAAGWPPCLRMVAAIAVLTKDAGKLTMGQPLVILAPHAVEALVKQPPDRWLSNARMTHYQAMLLDTDRVQFGPVVALNPATLLPLPEEGAPHDCLEILAETHGTRPDLTDQPIPDADHTWYTDGSSFLQEGQRKAGAAVTTETEVIWAGALPAGTSAQRAELIALTQALKMAEGKRLNVYTDSRYAFATAHIHGEIYRRRGWLTSEGREIKNKSEILALLKALFLPKRLSIIHCLGHQKGDSAEARGNRLADQAAREAAIKTPPDTSTLLAGKRTADGSEFEKRTADGSEFESPKKKAKVE

SEQ ID NO: 6474 - protein, 2088 aa, synthetic construct
MPAAKRVKLDGGDKKYSIGLDIGTNSVGWAVITDEYKVPSKKFKVLGNTDRHSIKKNLIGALLFDSGETAEATRLKRTARRRYTRRKNRICYLQEIFSNEMAKVDDSFFHRLEESFLVEEDKKHERHPIFGNIVDEVAYHEKYPTIYHLRKKLVDSTDKADLRLIYLALAHMIKFRGHFLIEGDLNPDNSDVDKLFIQLVQTYNQLFEENPINASGVDAKAILSARLSKSRRLENLIAQLPGEKKNGLFGNLIALSLGLTPNFKSNFDLAEDAKLQLSKDTYDDDLDNLLAQIGDQYADLFLAAKNLSDAILLSDILRVNTEITKAPLSASMIKRYDEHHQDLTLLKALVRQQLPEKYKEIFFDQSKNGYAGYIDGGASQEEFYKFIKPILEKMDGTEELLVKLNREDLLRKQRTFDNGSIPHQIHLGELHAILRRQEDFYPFLKDNREKIEKILTFRIPYYVGPLARGNSRFAWMTRKSEETITPWNFEEVVDKGASAQSFIERMTNFDKNLPNEKVLPKHSLLYEYFTVYNELTKVKYVTEGMRKPAFLSGEQKKAIVDLLFKTNRKVTVKQLKEDYFKKIECFDSVEISGVEDRFNASLGTYHDLLKIIKDKDFLDNEENEDILEDIVLTLTLFEDREMIEERLKTYAHLFDDKVMKQLKRRRYTGWGRLSRKLINGIRDKQSGKTILDFLKSDGFANRNFMQLIHDDSLTFKEDIQKAQVSGQGDSLHEHIANLAGSPAIKKGILQTVKVVDELVKVMGRHKPENIVIEMARENQTTQKGQKNSRERMKRIEEGIKELGSQILKEHPVENTQLQNEKLYLYYLQNGRDMYVDQELDINRLSDYDVDHIVPQSFLKDDSIDNKVLTRSDKARGKSDNVPSEEVVKKMKNYWRQLLNAKLITQRKFDNLTKAERGGLSELDKAGFIKRQLVETRQITKHVAQILDSRMNTKYDENDKLIREVKVITLKSKLVSDFRKDFQFYKVREINNYHHAHDAYLNAVVGTALIKKYPKLESEFVYGDYKVYDVRKMIAKSEQEIGKATAKYFFYSNIMNFFKTEITLANGEIRKRPLIETNGETGEIVWDKGRDFATVRKVLSMPQVNIVKKTEVQTGGFSKESILPKRNSDKLIARKKDWDPKKYGGFDSPTVAYSVLVVAKVEKGKSKKLKSVKELLGITIMERSSFEKNPIDFLEAKGYKEVKKDLIIKLPKYSLFELENGRKRMLASAGELQKGNELALPSKYVNFLYLASHYEKLKGSPEDNEQKQLFVEQHKHYLDEIIEQISEFSKRVILADANLDKVLSAYNKHRDKPIREQAENIIHLFTLTNLGAPAAFKYFDTTIDRKRYTSTKEVLDATLIHQSITGLYETRIDLSQLGGDGGPAPGGTLNIEDEYRLHETSKGPDVPLGSTWLSDFPQAWAETGGMGLAVRQAPLIIPLKATSTPVSIKQYPMSQEARLGIKPHIQRLLDQGILVPCQSPWNTPLLPVKKPGTNDYRPVQDLREVNKRVEDIHPTVPNPYNLLSGLPPSHQWYTVLDLKDAFFCLRLHPTSQSLFAFEWRDPEMGISGQLTWTRLPQGFKNSPTLFDEALHRDLADFRIQHPDLILLQYVDDLLLAATSELDCQQGTRALLQTLGDLGYRASAKKAQICQKQVKYLGYLLKEGQRWLTEARKETVMGQPTPKTPRQLREFLGTAGFCRLWIPGFAEMAAPLYPLTKTGTLFEWGPDQQKAYQEIKQALLTAPALGLPDLTKPFELFVDEKQGYAKGVLTQKLGPWRRPVAYLSKKLDPVAAGWPPCLRMVAAIAVLTKDAGKLTMGQPLVILAPHAVEALVKQPPDRWLSNARMTHYQALLLDTDRVQFGPIVALNPATLLPLPEEGLQHDCLDILAEAHGTRPDLTDQPLPDADHTWYTDGSSFLQEGQRKAGAAVTTETEVVWAKALPAGTSAQRAELIALTQALKMAEGKKLNVYTDSRYAFATAHIHGEIYRRRGLLTSEGKEIKNKDEILALLKALFLPKRLSIIHCPGHQKGNRAEARGNRMADQAAREVATRETPETSTLLAGKRTADGSEFEKRTADGSEFESPKKKAKVE

SEQ ID NO: 6475 - protein, 2088 aa, synthetic construct
MPAAKRVKLDGGDKKYSIGLDIGTNSVGWAVITDEYKVPSKKFKVLGNTDRHSIKKNLIGALLFDSGETAEATRLKRTARRRYTRRKNRICYLQEIFSNEMAKVDDSFFHRLEESFLVEEDKKHERHPIFGNIVDEVAYHEKYPTIYHLRKKLVDSTDKADLRLIYLALAHMIKFRGHFLIEGDLNPDNSDVDKLFIQLVQTYNQLFEENPINASGVDAKAILSARLSKSRRLENLIAQLPGEKKNGLFGNLIALSLGLTPNFKSNFDLAEDAKLQLSKDTYDDDLDNLLAQIGDQYADLFLAAKNLSDAILLSDILRVNTEITKAPLSASMIKRYDEHHQDLTLLKALVRQQLPEKYKEIFFDQSKNGYAGYIDGGASQEEFYKFIKPILEKMDGTEELLVKLNREDLLRKQRTFDNGSIPHQIHLGELHAILRRQEDFYPFLKDNREKIEKILTFRIPYYVGPLARGNSRFAWMTRKSEETITPWNFEEVVDKGASAQSFIERMTNFDKNLPNEKVLPKHSLLYEYFTVYNELTKVKYVTEGMRKPAFLSGEQKKAIVDLLFKTNRKVTVKQLKEDYFKKIECFDSVEISGVEDRFNASLGTYHDLLKIIKDKDFLDNEENEDILEDIVLTLTLFEDREMIEERLKTYAHLFDDKVMKQLKRRRYTGWGRLSRKLINGIRDKQSGKTILDFLKSDGFANRNFMQLIHDDSLTFKEDIQKAQVSGQGDSLHEHIANLAGSPAIKKGILQTVKVVDELVKVMGRHKPENIVIEMARENQTTQKGQKNSRERMKRIEEGIKELGSQILKEHPVENTQLQNEKLYLYYLQNGRDMYVDQELDINRLSDYDVDHIVPQSFLKDDSIDNKVLTRSDKARGKSDNVPSEEVVKKMKNYWRQLLNAKLITQRKFDNLTKAERGGLSELDKAGFIKRQLVETRQITKHVAQILDSRMNTKYDENDKLIREVKVITLKSKLVSDFRKDFQFYKVREINNYHHAHDAYLNAVVGTALIKKYPKLESEFVYGDYKVYDVRKMIAKSEQEIGKATAKYFFYSNIMNFFKTEITLANGEIRKRPLIETNGETGEIVWDKGRDFATVRKVLSMPQVNIVKKTEVQTGGFSKESILPKRNSDKLIARKKDWDPKKYGGFDSPTVAYSVLVVAKVEKGKSKKLKSVKELLGITIMERSSFEKNPIDFLEAKGYKEVKKDLIIKLPKYSLFELENGRKRMLASAGELQKGNELALPSKYVNFLYLASHYEKLKGSPEDNEQKQLFVEQHKHYLDEIIEQISEFSKRVILADANLDKVLSAYNKHRDKPIREQAENIIHLFTLTNLGAPAAFKYFDTTIDRKRYTSTKEVLDATLIHQSITGLYETRIDLSQLGGDGGPAPGGTLNIEDEYRLHEISTEPDVSPGSTWLSDFPQAWAETGGMGLAVRQAPLIIPLKATSTPVSIKQYPMSQEAKLGIKPHIQRLLDQGILVPCQSPWNTPLLPVKKPGTNDYRPVQGLREVNKRVEDIHPTVPNPYNLLSGLPTSHRWYTVLDLKDAFFCLRLHPTSQPLFASEWRDPGMGISGQLTWTRLPQGFKNSPTLFNEALHRGLADFRIQHPDLILLQYVDDLLLAATSELDCQQGTRALLKTLGNLGYRASAKKAQICQKQVKYLGYLLREGQRWLTEARKETVMGQPTPKTPRQLREFLGTAGFCRLWIPRFAEMAAPLYPLTKPGTLFNWGPDQQKAYHEIKQALLTAPALGLPDLTKPFELFVDEKQGYAKGVLTQKLGPWRRPVAYLSKKLDPVAAGWPPCLRMVAAIAVLTKDAGKLTMGQPLVILAPHAVEALVKQPPDRWLSNARMTHYQAMLLDTDRVQFGPVVALNPATLLPLPEEGAPHDCLEILAETHGTEPDLTDQPIPDADHTWYTDGSSFLQEGQRKAGAAVTTETEVIWARALPAGTSAQRAELIALTQALKMAEGKRLNVYTDSRYAFATAHIHGEIYKRRGWLTSEGREIKNKSEILALLKALFLPKRLSIIHCLGHQKGDSAEARGNRLADQAAREAAIKTPPDTSTLLAGKRTADGSEFEKRTADGSEFESPKKKAKVE

SEQ ID NO: 6476 - protein, 2082 aa, synthetic construct
MPAAKRVKLDGGDKKYSIGLDIGTNSVGWAVITDEYKVPSKKFKVLGNTDRHSIKKNLIGALLFDSGETAEATRLKRTARRRYTRRKNRICYLQEIFSNEMAKVDDSFFHRLEESFLVEEDKKHERHPIFGNIVDEVAYHEKYPTIYHLRKKLVDSTDKADLRLIYLALAHMIKFRGHFLIEGDLNPDNSDVDKLFIQLVQTYNQLFEENPINASGVDAKAILSARLSKSRRLENLIAQLPGEKKNGLFGNLIALSLGLTPNFKSNFDLAEDAKLQLSKDTYDDDLDNLLAQIGDQYADLFLAAKNLSDAILLSDILRVNTEITKAPLSASMIKRYDEHHQDLTLLKALVRQQLPEKYKEIFFDQSKNGYAGYIDGGASQEEFYKFIKPILEKMDGTEELLVKLNREDLLRKQRTFDNGSIPHQIHLGELHAILRRQEDFYPFLKDNREKIEKILTFRIPYYVGPLARGNSRFAWMTRKSEETITPWNFEEVVDKGASAQSFIERMTNFDKNLPNEKVLPKHSLLYEYFTVYNELTKVKYVTEGMRKPAFLSGEQKKAIVDLLFKTNRKVTVKQLKEDYFKKIECFDSVEISGVEDRFNASLGTYHDLLKIIKDKDFLDNEENEDILEDIVLTLTLFEDREMIEERLKTYAHLFDDKVMKQLKRRRYTGWGRLSRKLINGIRDKQSGKTILDFLKSDGFANRNFMQLIHDDSLTFKEDIQKAQVSGQGDSLHEHIANLAGSPAIKKGILQTVKVVDELVKVMGRHKPENIVIEMARENQTTQKGQKNSRERMKRIEEGIKELGSQILKEHPVENTQLQNEKLYLYYLQNGRDMYVDQELDINRLSDYDVDHIVPQSFLKDDSIDNKVLTRSDKARGKSDNVPSEEVVKKMKNYWRQLLNAKLITQRKFDNLTKAERGGLSELDKAGFIKRQLVETRQITKHVAQILDSRMNTKYDENDKLIREVKVITLKSKLVSDFRKDFQFYKVREINNYHHAHDAYLNAVVGTALIKKYPKLESEFVYGDYKVYDVRKMIAKSEQEIGKATAKYFFYSNIMNFFKTEITLANGEIRKRPLIETNGETGEIVWDKGRDFATVRKVLSMPQVNIVKKTEVQTGGFSKESILPKRNSDKLIARKKDWDPKKYGGFDSPTVAYSVLVVAKVEKGKSKKLKSVKELLGITIMERSSFEKNPIDFLEAKGYKEVKKDLIIKLPKYSLFELENGRKRMLASAGELQKGNELALPSKYVNFLYLASHYEKLKGSPEDNEQKQLFVEQHKHYLDEIIEQISEFSKRVILADANLDKVLSAYNKHRDKPIREQAENIIHLFTLTNLGAPAAFKYFDTTIDRKRYTSTKEVLDATLIHQSITGLYETRIDLSQLGGDGGPAPGGTLQLDDEYRLYSPLVKPDQNIQFWLEQFPQAWAETAGMGLAKQVPPQVIQLKASATPVSVRQYPLSKEAQEGIRPHVQRLIQQGILVPVQSPWNTPLLPVRKPGTNDYRPVQDLREVNKRVQDIHPTVPNPYNLLCALPPQRSWYTVLDLKDAFFCLRLHPTSQPLFAFEWRDPGTGRTGQLTWTRLPQGFKNSPTIFDEALHRDLANFRIQHPQVTLLQYVDDLLLAGATKQDCLEGTKALLLELSDLGYRASAKKAQICRREVTYLGYSLRDGQRWLTEARKKTVVQIPAPTTAKQVREFLGTAGFCRLWIPGFATLAAPLYPLTKEKGEFSWAPEHQKAFDAIKKALLSAPALALPDVTKPFTLYVDERKGVARGVLTQTLGPWRRPVAYLSKKLDPVASGWPVCLKAIAAVAILVKDADKLTLGQNITVIAPHALENIVRQPPDRWMTNARMTHYQSLLLTERVTFAPPAALNPATLLPEETDEPVTHDCHQLLIEETGVRKDLTDIPLTGEVLTWFTDGSSYVVEGKRMAGAAVVDGTRTIWASSLPEGTSAQKAELMALTQALRLAEGKSINIYTDSRYAFATAHVHGAIYKQRGLLTSAGREIKNKEEILSLLEALHLPKRLAIIHCPGHQKAKDPISRGNQMADRVAKQAAQGVNLLAGKRTADGSEFEKRTADGSEFESPKKKAKVE

SEQ ID NO: 6477 - protein, 2168 aa, synthetic construct
MPAAKRVKLDGGDKKYSIGLDIGTNSVGWAVITDEYKVPSKKFKVLGNTDRHSIKKNLIGALLFDSGETAEATRLKRTARRRYTRRKNRICYLQEIFSNEMAKVDDSFFHRLEESFLVEEDKKHERHPIFGNIVDEVAYHEKYPTIYHLRKKLVDSTDKADLRLIYLALAHMIKFRGHFLIEGDLNPDNSDVDKLFIQLVQTYNQLFEENPINASGVDAKAILSARLSKSRRLENLIAQLPGEKKNGLFGNLIALSLGLTPNFKSNFDLAEDAKLQLSKDTYDDDLDNLLAQIGDQYADLFLAAKNLSDAILLSDILRVNTEITKAPLSASMIKRYDEHHQDLTLLKALVRQQLPEKYKEIFFDQSKNGYAGYIDGGASQEEFYKFIKPILEKMDGTEELLVKLNREDLLRKQRTFDNGSIPHQIHLGELHAILRRQEDFYPFLKDNREKIEKILTFRIPYYVGPLARGNSRFAWMTRKSEETITPWNFEEVVDKGASAQSFIERMTNFDKNLPNEKVLPKHSLLYEYFTVYNELTKVKYVTEGMRKPAFLSGEQKKAIVDLLFKTNRKVTVKQLKEDYFKKIECFDSVEISGVEDRFNASLGTYHDLLKIIKDKDFLDNEENEDILEDIVLTLTLFEDREMIEERLKTYAHLFDDKVMKQLKRRRYTGWGRLSRKLINGIRDKQSGKTILDFLKSDGFANRNFMQLIHDDSLTFKEDIQKAQVSGQGDSLHEHIANLAGSPAIKKGILQTVKVVDELVKVMGRHKPENIVIEMARENQTTQKGQKNSRERMKRIEEGIKELGSQILKEHPVENTQLQNEKLYLYYLQNGRDMYVDQELDINRLSDYDVDHIVPQSFLKDDSIDNKVLTRSDKARGKSDNVPSEEVVKKMKNYWRQLLNAKLITQRKFDNLTKAERGGLSELDKAGFIKRQLVETRQITKHVAQILDSRMNTKYDENDKLIREVKVITLKSKLVSDFRKDFQFYKVREINNYHHAHDAYLNAVVGTALIKKYPKLESEFVYGDYKVYDVRKMIAKSEQEIGKATAKYFFYSNIMNFFKTEITLANGEIRKRPLIETNGETGEIVWDKGRDFATVRKVLSMPQVNIVKKTEVQTGGFSKESILPKRNSDKLIARKKDWDPKKYGGFDSPTVAYSVLVVAKVEKGKSKKLKSVKELLGITIMERSSFEKNPIDFLEAKGYKEVKKDLIIKLPKYSLFELENGRKRMLASAGELQKGNELALPSKYVNFLYLASHYEKLKGSPEDNEQKQLFVEQHKHYLDEIIEQISEFSKRVILADANLDKVLSAYNKHRDKPIREQAENIIHLFTLTNLGAPAAFKYFDTTIDRKRYTSTKEVLDATLIHQSITGLYETRIDLSQLGGDGGPAPGGMDPLQLLQPLEAEIKGTKLKAHWNSGATITCVPQAFLEEEVPIKNIWIKTIHGEKEQPVYYLTFKIQGRKVEAEVISSPYDYILVSPSDIPWLMKKPLQLTTLVPLQEYEERLLKQTMLTGSYKEKLQSLFLKYDALWQHWENQVGHRRIKPHHIATGTVNPRPQKQYPINPKAKASIQTVINDLLKQGVLIQQNSIMNTPVYPVPKPDGKWRMVLDYREVNKTIPLIAAQNQHSAGILSSIFRGKYKTTLDLSNGFWAHSITPESYWLTAFTWLGQQYCWTRLPQGFLNSPALFNADVVDLLKEVPNVQVYVDDIYISHDDPREHLEQLEKVFSLLLNAGYVVSLKKSEIAQHEVEFLGFNITKEGRGLTETFKQKLLNITPPRDLKQLQSILGKLNFARNFIPNFSELVKPLYNIIATAPGKYITWTTDNSQQLQNIISMLNSAENLEERNPEVRLIMKVNTSPSAGYIRFYNEFAKRPIMYLNYVYTKAEVKFTNTEKLLTTIHKGLIKALDLGMGQEILVYSPIVSMTKIQKTPLPERKALPIRWITWMSYLEDPRIQFHYDKTLPELQQVPTVTDDIIAKIKHPSEFSMVFYTDGSAIKHPNVNKSHNAGMGIAQVQFKPEFTVINTWSIPLGDHTAQLAEVAAVEFACKKALKIDGPVLIVTDSFYVAESVNKELPYWQSNGFFNNKKKPLKHVSKWKSIADCIQLKPDIIIIHEKGHQPTASTFHTEGNNLADKLATQGSYVVNAGKRTADGSEFEKRTADGSEFESPKKKAKVE

SEQ ID NO: 6478 - protein, 2086 aa, synthetic construct
MPAAKRVKLDGGDKKYSIGLDIGTNSVGWAVITDEYKVPSKKFKVLGNTDRHSIKKNLIGALLFDSGETAEATRLKRTARRRYTRRKNRICYLQEIFSNEMAKVDDSFFHRLEESFLVEEDKKHERHPIFGNIVDEVAYHEKYPTIYHLRKKLVDSTDKADLRLIYLALAHMIKFRGHFLIEGDLNPDNSDVDKLFIQLVQTYNQLFEENPINASGVDAKAILSARLSKSRRLENLIAQLPGEKKNGLFGNLIALSLGLTPNFKSNFDLAEDAKLQLSKDTYDDDLDNLLAQIGDQYADLFLAAKNLSDAILLSDILRVNTEITKAPLSASMIKRYDEHHQDLTLLKALVRQQLPEKYKEIFFDQSKNGYAGYIDGGASQEEFYKFIKPILEKMDGTEELLVKLNREDLLRKQRTFDNGSIPHQIHLGELHAILRRQEDFYPFLKDNREKIEKILTFRIPYYVGPLARGNSRFAWMTRKSEETITPWNFEEVVDKGASAQSFIERMTNFDKNLPNEKVLPKHSLLYEYFTVYNELTKVKYVTEGMRKPAFLSGEQKKAIVDLLFKTNRKVTVKQLKEDYFKKIECFDSVEISGVEDRFNASLGTYHDLLKIIKDKDFLDNEENEDILEDIVLTLTLFEDREMIEERLKTYAHLFDDKVMKQLKRRRYTGWGRLSRKLINGIRDKQSGKTILDFLKSDGFANRNFMQLIHDDSLTFKEDIQKAQVSGQGDSLHEHIANLAGSPAIKKGILQTVKVVDELVKVMGRHKPENIVIEMARENQTTQKGQKNSRERMKRIEEGIKELGSQILKEHPVENTQLQNEKLYLYYLQNGRDMYVDQELDINRLSDYDVDHIVPQSFLKDDSIDNKVLTRSDKARGKSDNVPSEEVVKKMKNYWRQLLNAKLITQRKFDNLTKAERGGLSELDKAGFIKRQLVETRQITKHVAQILDSRMNTKYDENDKLIREVKVITLKSKLVSDFRKDFQFYKVREINNYHHAHDAYLNAVVGTALIKKYPKLESEFVYGDYKVYDVRKMIAKSEQEIGKATAKYFFYSNIMNFFKTEITLANGEIRKRPLIETNGETGEIVWDKGRDFATVRKVLSMPQVNIVKKTEVQTGGFSKESILPKRNSDKLIARKKDWDPKKYGGFDSPTVAYSVLVVAKVEKGKSKKLKSVKELLGITIMERSSFEKNPIDFLEAKGYKEVKKDLIIKLPKYSLFELENGRKRMLASAGELQKGNELALPSKYVNFLYLASHYEKLKGSPEDNEQKQLFVEQHKHYLDEIIEQISEFSKRVILADANLDKVLSAYNKHRDKPIREQAENIIHLFTLTNLGAPAAFKYFDTTIDRKRYTSTKEVLDATLIHQSITGLYETRIDLSQLGGDGGPAPGGVLNLEEEYRLHEKPVPSSIDPSWLQLFPTVWAERAGMGLANQVPPVVVELRSGASPVAVRQYPMSKEAREGIRPHIQRFLDLGVLVPCQSPWNTPLLPVKKPGTNDYRPVQDLREINKRVQDIHPTVPNPYNLLSSLPPSHTWYSVLDLKDAFFCLKLHPNSQPLFAFEWRDPEKGNTGQLTWTRLPQGFKNSPTLFNEALHRDLAPFRALNPQVVLLQYVDDLLVAAPTYRDCKEGTQKLLQELSKLGYRVSAKKAQLCQKEVTYLGYLLKEGKRWLTPARKATVMKIPPPTTPRQVREFLGTAGFCRLWIPGFASLAAPLYPLTKPSIPFIWTEEHQKAFDRIKEALLSAPALALPDLTKPFTLYVDERAGVARGVLTQTLGPWRRPVAYLSKKLDPVASGWPTCLKAVAAVALLLKDADKLTLGQNVTVIASHSLESIVRQPPDRWMTNARMTHYQSLLLNERVSFAPPAVLNPATLLPVESEATPVHRCSEILAEETGTRRDLKDQPLPGVPAWYTDGSSFIAEGKRRAGAAIVDGKRTVWASSLPEGTSAQKAELVALTQALRLAEGKDINIYTDSRYAFATAHIHGAIYKQRGWLTSAGKDIKNKEEILALLEAIHLPKRVAIIHCPGHQKGNDPVATGNRRADEAAKQAALSTRVLAETTKPAGKRTADGSEFEKRTADGSEFESPKKKAKVE

SEQ ID NO: 6479 - protein, 2086 aa, synthetic construct
MPAAKRVKLDGGDKKYSIGLDIGTNSVGWAVITDEYKVPSKKFKVLGNTDRHSIKKNLIGALLFDSGETAEATRLKRTARRRYTRRKNRICYLQEIFSNEMAKVDDSFFHRLEESFLVEEDKKHERHPIFGNIVDEVAYHEKYPTIYHLRKKLVDSTDKADLRLIYLALAHMIKFRGHFLIEGDLNPDNSDVDKLFIQLVQTYNQLFEENPINASGVDAKAILSARLSKSRRLENLIAQLPGEKKNGLFGNLIALSLGLTPNFKSNFDLAEDAKLQLSKDTYDDDLDNLLAQIGDQYADLFLAAKNLSDAILLSDILRVNTEITKAPLSASMIKRYDEHHQDLTLLKALVRQQLPEKYKEIFFDQSKNGYAGYIDGGASQEEFYKFIKPILEKMDGTEELLVKLNREDLLRKQRTFDNGSIPHQIHLGELHAILRRQEDFYPFLKDNREKIEKILTFRIPYYVGPLARGNSRFAWMTRKSEETITPWNFEEVVDKGASAQSFIERMTNFDKNLPNEKVLPKHSLLYEYFTVYNELTKVKYVTEGMRKPAFLSGEQKKAIVDLLFKTNRKVTVKQLKEDYFKKIECFDSVEISGVEDRFNASLGTYHDLLKIIKDKDFLDNEENEDILEDIVLTLTLFEDREMIEERLKTYAHLFDDKVMKQLKRRRYTGWGRLSRKLINGIRDKQSGKTILDFLKSDGFANRNFMQLIHDDSLTFKEDIQKAQVSGQGDSLHEHIANLAGSPAIKKGILQTVKVVDELVKVMGRHKPENIVIEMARENQTTQKGQKNSRERMKRIEEGIKELGSQILKEHPVENTQLQNEKLYLYYLQNGRDMYVDQELDINRLSDYDVDHIVPQSFLKDDSIDNKVLTRSDKARGKSDNVPSEEVVKKMKNYWRQLLNAKLITQRKFDNLTKAERGGLSELDKAGFIKRQLVETRQITKHVAQILDSRMNTKYDENDKLIREVKVITLKSKLVSDFRKDFQFYKVREINNYHHAHDAYLNAVVGTALIKKYPKLESEFVYGDYKVYDVRKMIAKSEQEIGKATAKYFFYSNIMNFFKTEITLANGEIRKRPLIETNGETGEIVWDKGRDFATVRKVLSMPQVNIVKKTEVQTGGFSKESILPKRNSDKLIARKKDWDPKKYGGFDSPTVAYSVLVVAKVEKGKSKKLKSVKELLGITIMERSSFEKNPIDFLEAKGYKEVKKDLIIKLPKYSLFELENGRKRMLASAGELQKGNELALPSKYVNFLYLASHYEKLKGSPEDNEQKQLFVEQHKHYLDEIIEQISEFSKRVILADANLDKVLSAYNKHRDKPIREQAENIIHLFTLTNLGAPAAFKYFDTTIDRKRYTSTKEVLDATLIHQSITGLYETRIDLSQLGGDGGPAPGGVLNLEEEYRLHEKPVPSSIDPSWLQLFPTVWAERAGMGLANQVPPVVVELRSGASPVAVRQYPMSKEAREGIRPHIQRFLDLGVLVPCQSPWNTPLLPVKKPGTNDYRPVQDLREINKRVQDIHPTVPNPYNLLSSLPPSHTWYSVLDLKDAFFCLKLHPNSQPLFAFEWRDPEKGNTGQLTWTRLPQGFKNSPTLFNEALHRDLAPFRALNPQVVLLQYVDDLLVAAPTYRDCKEGTQKLLQELSKLGYRVSAKKAQLCQKEVTYLGYLLKEGKRWLTPARKATVMKIPPPTTPRQVREFLGKAGFCRLFIPGFASLAAPLYPLTKPSIPFIWTEEHQKAFDRIKEALLSAPALALPDLTKPFTLYVDERAGVARGVLTQTLGPWRRPVAYLSKKLDPVASGWPTCLKAVAAVALLLKDADKLTLGQNVTVIASHSLESIVRQPPDRWMTNARMTHYQSLLLNERVSFAPPAVLNPATLLPVESEATPVHRCSEILAEETGTRRDLKDQPLPGVPAWYTDGSSFIAEGKRRAGAAIVDGKRTVWASSLPEGTSAQKAELVALTQALRLAEGKDINIYTDSRYAFATAHIHGAIYKQRGWLTSAGKDIKNKEEILALLEAIHLPKRVAIIHCPGHQKGNDPVATGNRRADEAAKQAALSTRVLAETTKPAGKRTADGSEFEKRTADGSEFESPKKKAKVE

SEQ ID NO: 6480 - protein, 2088 aa, synthetic construct
MPAAKRVKLDGGDKKYSIGLDIGTNSVGWAVITDEYKVPSKKFKVLGNTDRHSIKKNLIGALLFDSGETAEATRLKRTARRRYTRRKNRICYLQEIFSNEMAKVDDSFFHRLEESFLVEEDKKHERHPIFGNIVDEVAYHEKYPTIYHLRKKLVDSTDKADLRLIYLALAHMIKFRGHFLIEGDLNPDNSDVDKLFIQLVQTYNQLFEENPINASGVDAKAILSARLSKSRRLENLIAQLPGEKKNGLFGNLIALSLGLTPNFKSNFDLAEDAKLQLSKDTYDDDLDNLLAQIGDQYADLFLAAKNLSDAILLSDILRVNTEITKAPLSASMIKRYDEHHQDLTLLKALVRQQLPEKYKEIFFDQSKNGYAGYIDGGASQEEFYKFIKPILEKMDGTEELLVKLNREDLLRKQRTFDNGSIPHQIHLGELHAILRRQEDFYPFLKDNREKIEKILTFRIPYYVGPLARGNSRFAWMTRKSEETITPWNFEEVVDKGASAQSFIERMTNFDKNLPNEKVLPKHSLLYEYFTVYNELTKVKYVTEGMRKPAFLSGEQKKAIVDLLFKTNRKVTVKQLKEDYFKKIECFDSVEISGVEDRFNASLGTYHDLLKIIKDKDFLDNEENEDILEDIVLTLTLFEDREMIEERLKTYAHLFDDKVMKQLKRRRYTGWGRLSRKLINGIRDKQSGKTILDFLKSDGFANRNFMQLIHDDSLTFKEDIQKAQVSGQGDSLHEHIANLAGSPAIKKGILQTVKVVDELVKVMGRHKPENIVIEMARENQTTQKGQKNSRERMKRIEEGIKELGSQILKEHPVENTQLQNEKLYLYYLQNGRDMYVDQELDINRLSDYDVDHIVPQSFLKDDSIDNKVLTRSDKARGKSDNVPSEEVVKKMKNYWRQLLNAKLITQRKFDNLTKAERGGLSELDKAGFIKRQLVETRQITKHVAQILDSRMNTKYDENDKLIREVKVITLKSKLVSDFRKDFQFYKVREINNYHHAHDAYLNAVVGTALIKKYPKLESEFVYGDYKVYDVRKMIAKSEQEIGKATAKYFFYSNIMNFFKTEITLANGEIRKRPLIETNGETGEIVWDKGRDFATVRKVLSMPQVNIVKKTEVQTGGFSKESILPKRNSDKLIARKKDWDPKKYGGFDSPTVAYSVLVVAKVEKGKSKKLKSVKELLGITIMERSSFEKNPIDFLEAKGYKEVKKDLIIKLPKYSLFELENGRKRMLASAGELQKGNELALPSKYVNFLYLASHYEKLKGSPEDNEQKQLFVEQHKHYLDEIIEQISEFSKRVILADANLDKVLSAYNKHRDKPIREQAENIIHLFTLTNLGAPAAFKYFDTTIDRKRYTSTKEVLDATLIHQSITGLYETRIDLSQLGGDGGPAPGGTLNIEDEYRLHETSKEPDVPLGSTWLSDFPQAWAETGGMGLAVRQAPLIIPLKATSTPVSIKQYPMSQEARLGIKPHIQRLLDQGILVPCQSPWNTPLLPVKKPGTNDYRPVQDLREVNKRVEDIHPTVPNPYNLLSGLPPSHQWYTVLDLKDAFFCLRLHPTSQPLFAFEWRDPEMGISGQLTWTRLPQGFKNSPTLFNEALHRDLADFRIQHPDLILLQYVDDLLLAATSEQDCQRGTRALLQTLGNLGYRASAKKAQICQKQVKYLGYLLKEGQRWLTEARKETVMGQPTPKTPRQLREFLGKAGFCRLFIPGFAEMAAPLYPLTKPGTLFNWGPDQQKAYQEIKQALLTAPALGLPDLTKPFELFVDEKQGYAKGVLTQKLGPWRRPVAYLSKKLDPVAAGWPPCLRMVAAIAVLTKDAGKLTMGQPLVILAPHAVEALVKQPPDRWLSNARMTHYQAMLLDTDRVQFGPVVALNPATLLPLPEKEAPHDCLEILAETHGTRPDLTDQPIPDADYTWYTDGSSFLQEGQRRAGAAVTTETEVIWARALPAGTSAQRAELIALTQALKMAEGKKLNVYTDSRYAFATAHVHGEIYRRRGWLTSEGREIKNKNEILALLKALFLPKRLSIIHCPGHQKGNSAEARGNRMADQAAREAAMKAVLETSTLLAGKRTADGSEFEKRTADGSEFESPKKKAKVE

SEQ ID NO: 6481 - protein, 2167 aa, synthetic construct
MPAAKRVKLDGGDKKYSIGLDIGTNSVGWAVITDEYKVPSKKFKVLGNTDRHSIKKNLIGALLFDSGETAEATRLKRTARRRYTRRKNRICYLQEIFSNEMAKVDDSFFHRLEESFLVEEDKKHERHPIFGNIVDEVAYHEKYPTIYHLRKKLVDSTDKADLRLIYLALAHMIKFRGHFLIEGDLNPDNSDVDKLFIQLVQTYNQLFEENPINASGVDAKAILSARLSKSRRLENLIAQLPGEKKNGLFGNLIALSLGLTPNFKSNFDLAEDAKLQLSKDTYDDDLDNLLAQIGDQYADLFLAAKNLSDAILLSDILRVNTEITKAPLSASMIKRYDEHHQDLTLLKALVRQQLPEKYKEIFFDQSKNGYAGYIDGGASQEEFYKFIKPILEKMDGTEELLVKLNREDLLRKQRTFDNGSIPHQIHLGELHAILRRQEDFYPFLKDNREKIEKILTFRIPYYVGPLARGNSRFAWMTRKSEETITPWNFEEVVDKGASAQSFIERMTNFDKNLPNEKVLPKHSLLYEYFTVYNELTKVKYVTEGMRKPAFLSGEQKKAIVDLLFKTNRKVTVKQLKEDYFKKIECFDSVEISGVEDRFNASLGTYHDLLKIIKDKDFLDNEENEDILEDIVLTLTLFEDREMIEERLKTYAHLFDDKVMKQLKRRRYTGWGRLSRKLINGIRDKQSGKTILDFLKSDGFANRNFMQLIHDDSLTFKEDIQKAQVSGQGDSLHEHIANLAGSPAIKKGILQTVKVVDELVKVMGRHKPENIVIEMARENQTTQKGQKNSRERMKRIEEGIKELGSQILKEHPVENTQLQNEKLYLYYLQNGRDMYVDQELDINRLSDYDVDHIVPQSFLKDDSIDNKVLTRSDKARGKSDNVPSEEVVKKMKNYWRQLLNAKLITQRKFDNLTKAERGGLSELDKAGFIKRQLVETRQITKHVAQILDSRMNTKYDENDKLIREVKVITLKSKLVSDFRKDFQFYKVREINNYHHAHDAYLNAVVGTALIKKYPKLESEFVYGDYKVYDVRKMIAKSEQEIGKATAKYFFYSNIMNFFKTEITLANGEIRKRPLIETNGETGEIVWDKGRDFATVRKVLSMPQVNIVKKTEVQTGGFSKESILPKRNSDKLIARKKDWDPKKYGGFDSPTVAYSVLVVAKVEKGKSKKLKSVKELLGITIMERSSFEKNPIDFLEAKGYKEVKKDLIIKLPKYSLFELENGRKRMLASAGELQKGNELALPSKYVNFLYLASHYEKLKGSPEDNEQKQLFVEQHKHYLDEIIEQISEFSKRVILADANLDKVLSAYNKHRDKPIREQAENIIHLFTLTNLGAPAAFKYFDTTIDRKRYTSTKEVLDATLIHQSITGLYETRIDLSQLGGDGGPAPAPGGMDLLKPLTVERKGVKIKGYWNSQADITCVPKDLLQGEEPVRQQNVTTIHGTQEGDVYYVNLKIDGRRINTEVIGTTLDYAIITPGDVPWILKKPLELTIKLDLEEQQGTLLNNSILSKKGKEELKQLFEKYSALWQSWENQVGHRRIRPHKIATGTVKPTPQKQYHINPKAKPDIQIVINDLLKQGVLIQKESTMNTPVYPVPKPNGRWRMVLDYRAVNKVTPLIAVQNQHSYGILGSLFKGRYKTTIDLSNGFWAHPIVPEDYWITAFTWQGKQYCWTVLPQGFLNSPGLFNGDVVDLLQGIPNVEVYVDDVYISHDSEKEHLEYLDILFNRLKEAGYIISLKKSNIANSIVDFLGFQITNEGRGLTDTFKEKLENITAPTTLKQLQSILGLLNFARNFIPDFTELIAPLYALIPKSPKNYVPWQIEHSTTLETLITKLNGAEYLQGRKGDKTLIMKVNASYTTGYIRYYNEGEKKPISYVSIVFSKTELKFTELEKLLTTVHKGLLKALDLSMGQNIHVYSPIVSMQNIQKTPQTAKKALASRWLSWLSYLEDPRIRFFYDPQMPALKDLPAVDTGKDNKKHPSNFQHIFYTDGSAITSPTKEGHLNAGMGIVYFINKDGNLQKQQEWSISLGNHTAQFAEIAAFEFALKKCLPLGGNILVVTDSNYVAKAYNEELDVWASNGFVNNRKKPLKHISKWKSVADLKRLRPDVVVTHEPGHQKLDSSPHAYGNNLADQLATQASFKVHAGKRTADGSEFEKRTADGSEFESPKKKAKVE

SEQ ID NO: 6482 - protein, 2089 aa, synthetic construct
MPAAKRVKLDGGDKKYSIGLDIGTNSVGWAVITDEYKVPSKKFKVLGNTDRHSIKKNLIGALLFDSGETAEATRLKRTARRRYTRRKNRICYLQEIFSNEMAKVDDSFFHRLEESFLVEEDKKHERHPIFGNIVDEVAYHEKYPTIYHLRKKLVDSTDKADLRLIYLALAHMIKFRGHFLIEGDLNPDNSDVDKLFIQLVQTYNQLFEENPINASGVDAKAILSARLSKSRRLENLIAQLPGEKKNGLFGNLIALSLGLTPNFKSNFDLAEDAKLQLSKDTYDDDLDNLLAQIGDQYADLFLAAKNLSDAILLSDILRVNTEITKAPLSASMIKRYDEHHQDLTLLKALVRQQLPEKYKEIFFDQSKNGYAGYIDGGASQEEFYKFIKPILEKMDGTEELLVKLNREDLLRKQRTFDNGSIPHQIHLGELHAILRRQEDFYPFLKDNREKIEKILTFRIPYYVGPLARGNSRFAWMTRKSEETITPWNFEEVVDKGASAQSFIERMTNFDKNLPNEKVLPKHSLLYEYFTVYNELTKVKYVTEGMRKPAFLSGEQKKAIVDLLFKTNRKVTVKQLKEDYFKKIECFDSVEISGVEDRFNASLGTYHDLLKIIKDKDFLDNEENEDILEDIVLTLTLFEDREMIEERLKTYAHLFDDKVMKQLKRRRYTGWGRLSRKLINGIRDKQSGKTILDFLKSDGFANRNFMQLIHDDSLTFKEDIQKAQVSGQGDSLHEHIANLAGSPAIKKGILQTVKVVDELVKVMGRHKPENIVIEMARENQTTQKGQKNSRERMKRIEEGIKELGSQILKEHPVENTQLQNEKLYLYYLQNGRDMYVDQELDINRLSDYDVDHIVPQSFLKDDSIDNKVLTRSDKARGKSDNVPSEEVVKKMKNYWRQLLNAKLITQRKFDNLTKAERGGLSELDKAGFIKRQLVETRQITKHVAQILDSRMNTKYDENDKLIREVKVITLKSKLVSDFRKDFQFYKVREINNYHHAHDAYLNAVVGTALIKKYPKLESEFVYGDYKVYDVRKMIAKSEQEIGKATAKYFFYSNIMNFFKTEITLANGEIRKRPLIETNGETGEIVWDKGRDFATVRKVLSMPQVNIVKKTEVQTGGFSKESILPKRNSDKLIARKKDWDPKKYGGFDSPTVAYSVLVVAKVEKGKSKKLKSVKELLGITIMERSSFEKNPIDFLEAKGYKEVKKDLIIKLPKYSLFELENGRKRMLASAGELQKGNELALPSKYVNFLYLASHYEKLKGSPEDNEQKQLFVEQHKHYLDEIIEQISEFSKRVILADANLDKVLSAYNKHRDKPIREQAENIIHLFTLTNLGAPAAFKYFDTTIDRKRYTSTKEVLDATLIHQSITGLYETRIDLSQLGGDGGPAPAPGGTLQLEEEYRLFEPESTQKQEMDIWLKNFPQAWAETGGMGTAHCQAPVLIQLKATATPISIRQYPMPHEAYQGIKPHIRRMLDQGILKPCQSPWNTPLLPVKKPGTEDYRPVQDLREVNKRVEDIHPTVPNPYNLLSTLPPSHPWYTVLDLKDAFFCLRLHSESQLLFAFEWRDPEIGLSGQLTWTRLPQGFKNSPTLFNEALHSDLADFRVRYPALVLLQYVDDLLLAAATRTECLEGTKALLETLGNKGYRASAKKAQICLQEVTYLGYSLKDGQRWLTKARKEAILSIPVPKNSRQVREFLGTAGYCRLWIPGFAELAAPLYPLTRPGTLFQWGTEQQLAFEDIKKALLSSPALGLPDITKPFELFIDENSGFAKGVLVQKLGPWKRPVAYLSKKLDTVASGWPPCLRMVAAIAILVKDAGKLTLGQPLTILTSHPVEALVRQPPNKWLSNARMTHYQAMLLDAERVHFGPTVSLNPATLLPLPSGGNHHDCLQILAETHGTRPDLTDQPLPDADLTWYTDGSSFIRNGEREAGAAVTTESEVIWAAPLPPGTSAQRAELIALTQALKMAEGKKLTVYTDSRYAFATTHVHGEIYRRRGWLTSEGKEIKNKNEILALLEALFLPKRLSIIHCPGHQKGDSPQAKGNRLADDTAKKAATETHSSLTVLPAGKRTADGSEFEKRTADGSEFESPKKKAKVE

SEQ ID NO: 6483 - protein, 2003 aa, synthetic construct
MPAAKRVKLDGGDKKYSIGLDIGTNSVGWAVITDEYKVPSKKFKVLGNTDRHSIKKNLIGALLFDSGETAEATRLKRTARRRYTRRKNRICYLQEIFSNEMAKVDDSFFHRLEESFLVEEDKKHERHPIFGNIVDEVAYHEKYPTIYHLRKKLVDSTDKADLRLIYLALAHMIKFRGHFLIEGDLNPDNSDVDKLFIQLVQTYNQLFEENPINASGVDAKAILSARLSKSRRLENLIAQLPGEKKNGLFGNLIALSLGLTPNFKSNFDLAEDAKLQLSKDTYDDDLDNLLAQIGDQYADLFLAAKNLSDAILLSDILRVNTEITKAPLSASMIKRYDEHHQDLTLLKALVRQQLPEKYKEIFFDQSKNGYAGYIDGGASQEEFYKFIKPILEKMDGTEELLVKLNREDLLRKQRTFDNGSIPHQIHLGELHAILRRQEDFYPFLKDNREKIEKILTFRIPYYVGPLARGNSRFAWMTRKSEETITPWNFEEVVDKGASAQSFIERMTNFDKNLPNEKVLPKHSLLYEYFTVYNELTKVKYVTEGMRKPAFLSGEQKKAIVDLLFKTNRKVTVKQLKEDYFKKIECFDSVEISGVEDRFNASLGTYHDLLKIIKDKDFLDNEENEDILEDIVLTLTLFEDREMIEERLKTYAHLFDDKVMKQLKRRRYTGWGRLSRKLINGIRDKQSGKTILDFLKSDGFANRNFMQLIHDDSLTFKEDIQKAQVSGQGDSLHEHIANLAGSPAIKKGILQTVKVVDELVKVMGRHKPENIVIEMARENQTTQKGQKNSRERMKRIEEGIKELGSQILKEHPVENTQLQNEKLYLYYLQNGRDMYVDQELDINRLSDYDVDHIVPQSFLKDDSIDNKVLTRSDKARGKSDNVPSEEVVKKMKNYWRQLLNAKLITQRKFDNLTKAERGGLSELDKAGFIKRQLVETRQITKHVAQILDSRMNTKYDENDKLIREVKVITLKSKLVSDFRKDFQFYKVREINNYHHAHDAYLNAVVGTALIKKYPKLESEFVYGDYKVYDVRKMIAKSEQEIGKATAKYFFYSNIMNFFKTEITLANGEIRKRPLIETNGETGEIVWDKGRDFATVRKVLSMPQVNIVKKTEVQTGGFSKESILPKRNSDKLIARKKDWDPKKYGGFDSPTVAYSVLVVAKVEKGKSKKLKSVKELLGITIMERSSFEKNPIDFLEAKGYKEVKKDLIIKLPKYSLFELENGRKRMLASAGELQKGNELALPSKYVNFLYLASHYEKLKGSPEDNEQKQLFVEQHKHYLDEIIEQISEFSKRVILADANLDKVLSAYNKHRDKPIREQAENIIHLFTLTNLGAPAAFKYFDTTIDRKRYTSTKEVLDATLIHQSITGLYETRIDLSQLGGDGGPAPAPGGGLEHLPPPPEVSQFPLNPERLQALTDLVSRALEAKHIEPYQGPGNNPIFPVKKPNGKWRFIHDLRATNSLTRDLASPSPGPPDLTSLPQDLPHLRTIDLTDAFFQIPLPAVFQPYFAFTLPQPNNHGPGTRYSWRVLPQGFKNSPTLFQQQLSHILAPVRKAFPNSLIIQYMDDILLASPALRELTALTDKVTNALTKEGLPMSLEKTQATPGSIHFLGQVISPDCITYETLPSIHVKSIWSLAELQSMLGELQWVSKGTPVLRSSLHQLYLALRGHRDPRDTIELTSTQVQALKTIQKALALNCRSRLVSQLPILALIILRPTGTTAVLFQTKQKWPLVWLHTPHPATSLRPWGQLLANAIITLDKYSLQHYGQICKSFHHNISNQALTYYLHTSDQSSVAILLQHSHRFHNLGAQPSGPWRSLLQVPQIFQNIDVLRPPFIISPVVIDHAPCLFSDGATSKAAFILWDKQVIHQQVLPLPSTCSAQAGELFGLLAGLQKSKPWPALNIFLDSKFLIGHLRRMAWGAFLGPSTQCDLHARLFPLLQGKTVYVHHVRSHTLLQDPISRLNEATDALMLAPLLPLAGKRTADGSEFEKRTADGSEFESPKKKAKVE

SEQ ID NO: 6484 - protein, 2090 aa, synthetic construct
MPAAKRVKLDGGDKKYSIGLDIGTNSVGWAVITDEYKVPSKKFKVLGNTDRHSIKKNLIGALLFDSGETAEATRLKRTARRRYTRRKNRICYLQEIFSNEMAKVDDSFFHRLEESFLVEEDKKHERHPIFGNIVDEVAYHEKYPTIYHLRKKLVDSTDKADLRLIYLALAHMIKFRGHFLIEGDLNPDNSDVDKLFIQLVQTYNQLFEENPINASGVDAKAILSARLSKSRRLENLIAQLPGEKKNGLFGNLIALSLGLTPNFKSNFDLAEDAKLQLSKDTYDDDLDNLLAQIGDQYADLFLAAKNLSDAILLSDILRVNTEITKAPLSASMIKRYDEHHQDLTLLKALVRQQLPEKYKEIFFDQSKNGYAGYIDGGASQEEFYKFIKPILEKMDGTEELLVKLNREDLLRKQRTFDNGSIPHQIHLGELHAILRRQEDFYPFLKDNREKIEKILTFRIPYYVGPLARGNSRFAWMTRKSEETITPWNFEEVVDKGASAQSFIERMTNFDKNLPNEKVLPKHSLLYEYFTVYNELTKVKYVTEGMRKPAFLSGEQKKAIVDLLFKTNRKVTVKQLKEDYFKKIECFDSVEISGVEDRFNASLGTYHDLLKIIKDKDFLDNEENEDILEDIVLTLTLFEDREMIEERLKTYAHLFDDKVMKQLKRRRYTGWGRLSRKLINGIRDKQSGKTILDFLKSDGFANRNFMQLIHDDSLTFKEDIQKAQVSGQGDSLHEHIANLAGSPAIKKGILQTVKVVDELVKVMGRHKPENIVIEMARENQTTQKGQKNSRERMKRIEEGIKELGSQILKEHPVENTQLQNEKLYLYYLQNGRDMYVDQELDINRLSDYDVDHIVPQSFLKDDSIDNKVLTRSDKARGKSDNVPSEEVVKKMKNYWRQLLNAKLITQRKFDNLTKAERGGLSELDKAGFIKRQLVETRQITKHVAQILDSRMNTKYDENDKLIREVKVITLKSKLVSDFRKDFQFYKVREINNYHHAHDAYLNAVVGTALIKKYPKLESEFVYGDYKVYDVRKMIAKSEQEIGKATAKYFFYSNIMNFFKTEITLANGEIRKRPLIETNGETGEIVWDKGRDFATVRKVLSMPQVNIVKKTEVQTGGFSKESILPKRNSDKLIARKKDWDPKKYGGFDSPTVAYSVLVVAKVEKGKSKKLKSVKELLGITIMERSSFEKNPIDFLEAKGYKEVKKDLIIKLPKYSLFELENGRKRMLASAGELQKGNELALPSKYVNFLYLASHYEKLKGSPEDNEQKQLFVEQHKHYLDEIIEQISEFSKRVILADANLDKVLSAYNKHRDKPIREQAENIIHLFTLTNLGAPAAFKYFDTTIDRKRYTSTKEVLDATLIHQSITGLYETRIDLSQLGGDGGPAPAPGGTLNLEDEYRLYETSAEPEVSPGSTWLSDFPQAWAETGGMGLAVRQAPLIIPLKATSTPVSIKQYPMSQEAKLGIKPHIQRLLDQGILVPCQSPWNTPLLPVKKPGTNDYRPVQDLREVNKRVEDIHPTVPNPYNLLSGLPPSHRWYTVLDLKDAFFCLRLHPTSQPLFAFEWRDPGMGISGQLTWTRLPQGFKNSPTLFNEALHRDLADFRIQHPDLILLQYVDDILLAATSELDCQQGTRALLLTLGNLGYRASAKKAQLCQKQVKYLGYLLKEGQRWLTEARKETVMGQPTPKTPRQLREFLGKAGFCRLFIPGFAEMAAPLYPLTKPGTLFNWGPDQQKAYQEIKQALLTAPALGLPDLTKPFELFVDEKQGYAKGVLTQKLGPWRRPVAYLSKKLDPVAAGWPPCLRMVAAIAVLRKDAGKLTMGQPLVILAPHAVEALVKQPPDRWLSNARMTHYQAMLLDTDRVQFGPVVALNPATLLPLPEEGAPHDCLEILAETHGTRPDLTDQPIPDADHTWYTDGSSFLQEGQRKAGAAVTTETEVIWARALPAGTSAQRAELIALTQALKMAEGKRLNVYTDSRYAFATAHIHGEIYRRRGWLTSEGREIKNKSEILALLKALFLPKRLSIIHCLGHQKGDSAEARGNRLADQAAREAAIKTPPDTSTLLAGKRTADGSEFEKRTADGSEFESPKKKAKVE

SEQ ID NO: 6485 - protein, 2110 aa, synthetic construct
MPAAKRVKLDGGDKKYSIGLDIGTNSVGWAVITDEYKVPSKKFKVLGNTDRHSIKKNLIGALLFDSGETAEATRLKRTARRRYTRRKNRICYLQEIFSNEMAKVDDSFFHRLEESFLVEEDKKHERHPIFGNIVDEVAYHEKYPTIYHLRKKLVDSTDKADLRLIYLALAHMIKFRGHFLIEGDLNPDNSDVDKLFIQLVQTYNQLFEENPINASGVDAKAILSARLSKSRRLENLIAQLPGEKKNGLFGNLIALSLGLTPNFKSNFDLAEDAKLQLSKDTYDDDLDNLLAQIGDQYADLFLAAKNLSDAILLSDILRVNTEITKAPLSASMIKRYDEHHQDLTLLKALVRQQLPEKYKEIFFDQSKNGYAGYIDGGASQEEFYKFIKPILEKMDGTEELLVKLNREDLLRKQRTFDNGSIPHQIHLGELHAILRRQEDFYPFLKDNREKIEKILTFRIPYYVGPLARGNSRFAWMTRKSEETITPWNFEEVVDKGASAQSFIERMTNFDKNLPNEKVLPKHSLLYEYFTVYNELTKVKYVTEGMRKPAFLSGEQKKAIVDLLFKTNRKVTVKQLKEDYFKKIECFDSVEISGVEDRFNASLGTYHDLLKIIKDKDFLDNEENEDILEDIVLTLTLFEDREMIEERLKTYAHLFDDKVMKQLKRRRYTGWGRLSRKLINGIRDKQSGKTILDFLKSDGFANRNFMQLIHDDSLTFKEDIQKAQVSGQGDSLHEHIANLAGSPAIKKGILQTVKVVDELVKVMGRHKPENIVIEMARENQTTQKGQKNSRERMKRIEEGIKELGSQILKEHPVENTQLQNEKLYLYYLQNGRDMYVDQELDINRLSDYDVDHIVPQSFLKDDSIDNKVLTRSDKARGKSDNVPSEEVVKKMKNYWRQLLNAKLITQRKFDNLTKAERGGLSELDKAGFIKRQLVETRQITKHVAQILDSRMNTKYDENDKLIREVKVITLKSKLVSDFRKDFQFYKVREINNYHHAHDAYLNAVVGTALIKKYPKLESEFVYGDYKVYDVRKMIAKSEQEIGKATAKYFFYSNIMNFFKTEITLANGEIRKRPLIETNGETGEIVWDKGRDFATVRKVLSMPQVNIVKKTEVQTGGFSKESILPKRNSDKLIARKKDWDPKKYGGFDSPTVAYSVLVVAKVEKGKSKKLKSVKELLGITIMERSSFEKNPIDFLEAKGYKEVKKDLIIKLPKYSLFELENGRKRMLASAGELQKGNELALPSKYVNFLYLASHYEKLKGSPEDNEQKQLFVEQHKHYLDEIIEQISEFSKRVILADANLDKVLSAYNKHRDKPIREQAENIIHLFTLTNLGAPAAFKYFDTTIDRKRYTSTKEVLDATLIHQSITGLYETRIDLSQLGGDGGPAPAPGGTLNIEDEYRLHETSKEPDVSLGSTWLSDFPQAWAETGGMGLAVRQAPLIIPLKATSTPVSIKQYPMSQEARLGIKPHIQRLLDQGILVPCQSPWNTPLLPVKKPGTNDYRPVQDLREVNKRVEDIHPTVPNPYNLLSGLPPSHQWYTVLDLKDAFFCLRLHPTSQPLFAFEWRDPEMGISGQLTWTRLPQGFKNSPTLFNEALHRDLADFRIQHPDLILLQYVDDLLLAATSELDCQQGTRALLQTLGNLGYRASAKKAQICQKQVKYLGYLLKEGQRWLTEARKETVMGQPTPKTPRQLREFLGKAGFCRLFIPGFAEMAAPLYPLTKPGTLFNWGPDQQKAYQEIKQALLTAPALGLPDLTKPFELFVDEKQGYAKGVLTQKLGPWRRPVAYLSKKLDPVAAGWPPCLRMVAAIAVLTKDAGKLTMGQPLVILAPHAVEALVKQPPDRWLSNARMTHYQALLLDTDRVQFGPVVALNPATLLPLPEEGLQHNCLDILAEAHGTRPDLTDQPLPDADHTWYTDGSSLLQEGQRKAGAAVTTETEVIWAKALPAGTSAQRAELIALTQALKMAEGKKLNVYTDSRYAFATAHIHGEIYRRRGWLTSEGKEIKNKDEILALLKALFLPKRLSIIHCPGHQKGHSAEARGNRMADQAARKAAITETPDTSTLLIENSSPSGGSKRTADGSEFEAGKRTADGSEFEKRTADGSEFESPKKKAKVE

SEQ ID NO: 6486 - protein, 2110 aa, synthetic construct; identical to SEQ ID NO: 6485

SEQ ID NO: 6487 - protein, 2110 aa, synthetic construct
MPAAKRVKLDGGDKKYSIGLDIGTNSVGWAVITDEYKVPSKKFKVLGNTDRHSIKKNLIGALLFDSGETAEATRLKRTARRRYTRRKNRICYLQEIFSNEMAKVDDSFFHRLEESFLVEEDKKHERHPIFGNIVDEVAYHEKYPTIYHLRKKLVDSTDKADLRLIYLALAHMIKFRGHFLIEGDLNPDNSDVDKLFIQLVQTYNQLFEENPINASGVDAKAILSARLSKSRRLENLIAQLPGEKKNGLFGNLIALSLGLTPNFKSNFDLAEDAKLQLSKDTYDDDLDNLLAQIGDQYADLFLAAKNLSDAILLSDILRVNTEITKAPLSASMIKRYDEHHQDLTLLKALVRQQLPEKYKEIFFDQSKNGYAGYIDGGASQEEFYKFIKPILEKMDGTEELLVKLNREDLLRKQRTFDNGSIPHQIHLGELHAILRRQEDFYPFLKDNREKIEKILTFRIPYYVGPLARGNSRFAWMTRKSEETITPWNFEEVVDKGASAQSFIERMTNFDKNLPNEKVLPKHSLLYEYFTVYNELTKVKYVTEGMRKPAFLSGEQKKAIVDLLFKTNRKVTVKQLKEDYFKKIECFDSVEISGVEDRFNASLGTYHDLLKIIKDKDFLDNEENEDILEDIVLTLTLFEDREMIEERLKTYAHLFDDKVMKQLKRRRYTGWGRLSRKLINGIRDKQSGKTILDFLKSDGFANRNFMQLIHDDSLTFKEDIQKAQVSGQGDSLHEHIANLAGSPAIKKGILQTVKVVDELVKVMGRHKPENIVIEMARENQTTQKGQKNSRERMKRIEEGIKELGSQILKEHPVENTQLQNEKLYLYYLQNGRDMYVDQELDINRLSDYDVDHIVPQSFLKDDSIDNKVLTRSDKARGKSDNVPSEEVVKKMKNYWRQLLNAKLITQRKFDNLTKAERGGLSELDKAGFIKRQLVETRQITKHVAQILDSRMNTKYDENDKLIREVKVITLKSKLVSDFRKDFQFYKVREINNYHHAHDAYLNAVVGTALIKKYPKLESEFVYGDYKVYDVRKMIAKSEQEIGKATAKYFFYSNIMNFFKTEITLANGEIRKRPLIETNGETGEIVWDKGRDFATVRKVLSMPQVNIVKKTEVQTGGFSKESILPKRNSDKLIARKKDWDPKKYGGFDSPTVAYSVLVVAKVEKGKSKKLKSVKELLGITIMERSSFEKNPIDFLEAKGYKEVKKDLIIKLPKYSLFELENGRKRMLASAGELQKGNELALPSKYVNFLYLASHYEKLKGSPEDNEQKQLFVEQHKHYLDEIIEQISEFSKRVILADANLDKVLSAYNKHRDKPIREQAENIIHLFTLTNLGAPAAFKYFDTTIDRKRYTSTKEVLDATLIHQSITGLYETRIDLSQLGGDGGPAPAPGGVQEISDSRPMLHIYLNGRRFLGLLDTGADKTCIAGRDWPANWPIHQTESSLQGLGMACGVARSSQPLRWQHEDKSGIIHPFVIPTLPFTLWGRDIMKDIKVRLMTDSPDDSQDLMIGAIESNLFADQISWKSDQPVWLNQWPLKQEKLQALQQLVTEQLQLGHLEESNSPWNTPVFVIKKKSGKWRLLQDLRAVNATMHDMGALQPGLPSPVAVPKGWEIIIIDLQDCFFNIKLHPEDCKRFAFSVPSPNFKRPYQRFQWKVLPQGMKNSPTLCQKFVDKAILTVRDKYQDSYIVHYMDDILLAHPSRSIVDEILTSMIQALNKHGLVVSTEKIQKYDNLKYLGTHIQGDSVSYQKLQIRTDKLRTLNDFQKLLGNINWIRPFLKLTTGELKPLFEILNGDSNPISTRKLTPEACKALQLMNERLSTARVKRLDLSQPWSLCILKTEYTPTACLWQDGVVEWIHLPHISPKVITPYDIFCTQLIIKGRHRSKELFSKDPDYIVVPYTKVQFDLLLQEKEDWPISLLGFLGEVHFHLPKDPLLTFTLQTAIIFPHMTSTTPLEKGIVIFTDGSANGRSVTYIQGREPIIKENTQNTAQQAEIVAVITAFEEVSQPFNLYTDSKYVTGLFPEIETATLSPRTKIYTELKHLQRLIHKRQEKFYIGHIRGHTGLPGPLAQGNAYADSLTRILTAAGKRTADGSEFEKRTADGSEFESPKKKAKVE

SEQ ID NO: 6488 - protein, 2084 aa, synthetic construct
MPAAKRVKLDGGDKKYSIGLDIGTNSVGWAVITDEYKVPSKKFKVLGNTDRHSIKKNLIGALLFDSGETAEATRLKRTARRRYTRRKNRICYLQEIFSNEMAKVDDSFFHRLEESFLVEEDKKHERHPIFGNIVDEVAYHEKYPTIYHLRKKLVDSTDKADLRLIYLALAHMIKFRGHFLIEGDLNPDNSDVDKLFIQLVQTYNQLFEENPINASGVDAKAILSARLSKSRRLENLIAQLPGEKKNGLFGNLIALSLGLTPNFKSNFDLAEDAKLQLSKDTYDDDLDNLLAQIGDQYADLFLAAKNLSDAILLSDILRVNTEITKAPLSASMIKRYDEHHQDLTLLKALVRQQLPEKYKEIFFDQSKNGYAGYIDGGASQEEFYKFIKPILEKMDGTEELLVKLNREDLLRKQRTFDNGSIPHQIHLGELHAILRRQEDFYPFLKDNREKIEKILTFRIPYYVGPLARGNSRFAWMTRKSEETITPWNFEEVVDKGASAQSFIERMTNFDKNLPNEKVLPKHSLLYEYFTVYNELTKVKYVTEGMRKPAFLSGEQKKAIVDLLFKTNRKVTVKQLKEDYFKKIECFDSVEISGVEDRFNASLGTYHDLLKIIKDKDFLDNEENEDILEDIVLTLTLFEDREMIEERLKTYAHLFDDKVMKQLKRRRYTGWGRLSRKLINGIRDKQSGKTILDFLKSDGFANRNFMQLIHDDSLTFKEDIQKAQVSGQGDSLHEHIANLAGSPAIKKGILQTVKVVDELVKVMGRHKPENIVIEMARENQTTQKGQKNSRERMKRIEEGIKELGSQILKEHPVENTQLQNEKLYLYYLQNGRDMYVDQELDINRLSDYDVDHIVPQSFLKDDSIDNKVLTRSDKARGKSDNVPSEEVVKKMKNYWRQLLNAKLITQRKFDNLTKAERGGLSELDKAGFIKRQLVETRQITKHVAQILDSRMNTKYDENDKLIREVKVITLKSKLVSDFRKDFQFYKVREINNYHHAHDAYLNAVVGTALIKKYPKLESEFVYGDYKVYDVRKMIAKSEQEIGKATAKYFFYSNIMNFFKTEITLANGEIRKRPLIETNGETGEIVWDKGRDFATVRKVLSMPQVNIVKKTEVQTGGFSKESILPKRNSDKLIARKKDWDPKKYGGFDSPTVAYSVLVVAKVEKGKSKKLKSVKELLGITIMERSSFEKNPIDFLEAKGYKEVKKDLIIKLPKYSLFELENGRKRMLASAGELQKGNELALPSKYVNFLYLASHYEKLKGSPEDNEQKQLFVEQHKHYLDEIIEQISEFSKRVILADANLDKVLSAYNKHRDKPIREQAENIIHLFTLTNLGAPAAFKYFDTTIDRKRYTSTKEVLDATLIHQSITGLYETRIDLSQLGGDGGPAPAPGGTLQLDDEYRLYSPLVKPDQNIQFWLEQFPQAWAETAGMGLAKQVPPQVIQLKASATPVSVRQYPLSKEAQEGIRPHVQRLIQQGILVPVQSPWNTPLLPVRKPGTNDYRPVQDLREVNKRVQDIHPTVPNPYNLLCALPPQRSWYTVLDLKDAFFCLRLHPTSQPLFAFEWRDPGTGRTGQLTWTRLPQGFKNSPTIFDEALHRDLANFRIQHPQVTLLQYVDDLLLAGATKQDCLEGTKALLLELSDLGYRASAKKAQICRREVTYLGYSLRDGQRWLTEARKKTVVQIPAPTTAKQVREFLGTAGFCRLWIPGFATLAAPLYPLTKEKGEFSWAPEHQKAFDAIKKALLSAPALALPDVTKPFTLYVDERKGVARGVLTQTLGPWRRPVAYLSKKLDPVASGWPVCLKAIAAVAILVKDADKLTLGQNITVIAPHALENIVRQPPDRWMTNARMTHYQSLLLTERVTFAPPAALNPATLLPEETDEPVTHDCHQLLIEETGVRKDLTDIPLTGEVLTWFTDGSSYVVEGKRMAGAAVVDGTRTIWASSLPEGTSAQKAELMALTQALRLAEGKSINIYTDSRYAFATAHVHGAIYKQRGLLTSAGREIKNKEEILSLLEALHLPKRLAIIHCPGHQKAKDPISRGNQMADRVAKQAAQGVNLLAGKRTADGSEFEKRTADGSEFESPKKKAKVE

SEQ ID NO: 6489 - protein, 2081 aa, synthetic construct
MPAAKRVKLDGGDKKYSIGLDIGTNSVGWAVITDEYKVPSKKFKVLGNTDRHSIKKNLIGALLFDSGETAEATRLKRTARRRYTRRKNRICYLQEIFSNEMAKVDDSFFHRLEESFLVEEDKKHERHPIFGNIVDEVAYHEKYPTIYHLRKKLVDSTDKADLRLIYLALAHMIKFRGHFLIEGDLNPDNSDVDKLFIQLVQTYNQLFEENPINASGVDAKAILSARLSKSRRLENLIAQLPGEKKNGLFGNLIALSLGLTPNFKSNFDLAEDAKLQLSKDTYDDDLDNLLAQIGDQYADLFLAAKNLSDAILLSDILRVNTEITKAPLSASMIKRYDEHHQDLTLLKALVRQQLPEKYKEIFFDQSKNGYAGYIDGGASQEEFYKFIKPILEKMDGTEELLVKLNREDLLRKQRTFDNGSIPHQIHLGELHAILRRQEDFYPFLKDNREKIEKILTFRIPYYVGPLARGNSRFAWMTRKSEETITPWNFEEVVDKGASAQSFIERMTNFDKNLPNEKVLPKHSLLYEYFTVYNELTKVKYVTEGMRKPAFLSGEQKKAIVDLLFKTNRKVTVKQLKEDYFKKIECFDSVEISGVEDRFNASLGTYHDLLKIIKDKDFLDNEENEDILEDIVLTLTLFEDREMIEERLKTYAHLFDDKVMKQLKRRRYTGWGRLSRKLINGIRDKQSGKTILDFLKSDGFANRNFMQLIHDDSLTFKEDIQKAQVSGQGDSLHEHIANLAGSPAIKKGILQTVKVVDELVKVMGRHKPENIVIEMARENQTTQKGQKNSRERMKRIEEGIKELGSQILKEHPVENTQLQNEKLYLYYLQNGRDMYVDQELDINRLSDYDVDHIVPQSFLKDDSIDNKVLTRSDKARGKSDNVPSEEVVKKMKNYWRQLLNAKLITQRKFDNLTKAERGGLSELDKAGFIKRQLVETRQITKHVAQILDSRMNTKYDENDKLIREVKVITLKSKLVSDFRKDFQFYKVREINNYHHAHDAYLNAVVGTALIKKYPKLESEFVYGDYKVYDVRKMIAKSEQEIGKATAKYFFYSNIMNFFKTEITLANGEIRKRPLIETNGETGEIVWDKGRDFATVRKVLSMPQVNIVKKTEVQTGGFSKESILPKRNSDKLIARKKDWDPKKYGGFDSPTVAYSVLVVAKVEKGKSKKLKSVKELLGITIMERSSFEKNPIDFLEAKGYKEVKKDLIIKLPKYSLFELENGRKRMLASAGELQKGNELALPSKYVNFLYLASHYEKLKGSPEDNEQKQLFVEQHKHYLDEIIEQISEFSKRVILADANLDKVLSAYNKHRDKPIREQAENIIHLFTLTNLGAPAAFKYFDTTIDRKRYTSTKEVLDATLIHQSITGLYETRIDLSQLGGDGGPAPAPGGIPWLMKKPLQLTTLVPLQEYEERLLKQTMLTGSYKEKLQSLFLKYDALWQHWENQVGHRRIKPHHIATGTVNPRPQKQYPINPKAKASIQTVINDLLKQGVLIQQNSIMNTPVYPVPKPDGKWRMVLDYREVNKTIPLIAAQNQHSAGILSSIFRGKYKTTLDLSNGFWAHSITPESYWLTAFTWLGQQYCWTRLPQGFLNSPALFNADVVDLLKEVPNVQVYVDDIYISHDDPREHLEQLEKVFSLLLNAGYVVSLKKSEIAQHEVEFLGFNITKEGRGLTETFKQKLLNITPPRDLKQLQSILGKLNFARNFIPNFSELVKPLYNIIATAPGKYITWTTDNSQQLQNIISMLNSAENLEERNPEVRLIMKVNTSPSAGYIRFYNEFAKRPIMYLNYVYTKAEVKFTNTEKLLTTIHKGLIKALDLGMGQEILVYSPIVSMTKIQKTPLPERKALPIRWITWMSYLEDPRIQFHYDKTLPELQQVPTVTDDIIAKIKHPSEFSMVFYTDGSAIKHPNVNKSHNAGMGIAQVQFKPEFTVINTWSIPLGDHTAQLAEVAAVEFACKKALKIDGPVLIVTDSFYVAESVNKELPYWQSNGFFNNKKKPLKHVSKWKSIADCIQLKPDIIIIHEKGHQPTASTFHTEGNNLADKLATQGSYVVNAGKRTADGSEFEKRTADGSEFESPKKKAKVE

SEQ ID NO: 6490 - protein, 2170 aa, synthetic construct
MPAAKRVKLDGGDKKYSIGLDIGTNSVGWAVITDEYKVPSKKFKVLGNTDRHSIKKNLIGALLFDSGETAEATRLKRTARRRYTRRKNRICYLQEIFSNEMAKVDDSFFHRLEESFLVEEDKKHERHPIFGNIVDEVAYHEKYPTIYHLRKKLVDSTDKADLRLIYLALAHMIKFRGHFLIEGDLNPDNSDVDKLFIQLVQTYNQLFEENPINASGVDAKAILSARLSKSRRLENLIAQLPGEKKNGLFGNLIALSLGLTPNFKSNFDLAEDAKLQLSKDTYDDDLDNLLAQIGDQYADLFLAAKNLSDAILLSDILRVNTEITKAPLSASMIKRYDEHHQDLTLLKALVRQQLPEKYKEIFFDQSKNGYAGYIDGGASQEEFYKFIKPILEKMDGTEELLVKLNREDLLRKQRTFDNGSIPHQIHLGELHAILRRQEDFYPFLKDNREKIEKILTFRIPYYVGPLARGNSRFAWMTRKSEETITPWNFEEVVDKGASAQSFIERMTNFDKNLPNEKVLPKHSLLYEYFTVYNELTKVKYVTEGMRKPAFLSGEQKKAIVDLLFKTNRKVTVKQLKEDYFKKIECFDSVEISGVEDRFNASLGTYHDLLKIIKDKDFLDNEENEDILEDIVLTLTLFEDREMIEERLKTYAHLFDDKVMKQLKRRRYTGWGRLSRKLINGIRDKQSGKTILDFLKSDGFANRNFMQLIHDDSLTFKEDIQKAQVSGQGDSLHEHIANLAGSPAIKKGILQTVKVVDELVKVMGRHKPENIVIEMARENQTTQKGQKNSRERMKRIEEGIKELGSQILKEHPVENTQLQNEKLYLYYLQNGRDMYVDQELDINRLSDYDVDHIVPQSFLKDDSIDNKVLTRSDKARGKSDNVPSEEVVKKMKNYWRQLLNAKLITQRKFDNLTKAERGGLSELDKAGFIKRQLVETRQITKHVAQILDSRMNTKYDENDKLIREVKVITLKSKLVSDFRKDFQFYKVREINNYHHAHDAYLNAVVGTALIKKYPKLESEFVYGDYKVYDVRKMIAKSEQEIGKATAKYFFYSNIMNFFKTEITLANGEIRKRPLIETNGETGEIVWDKGRDFATVRKVLSMPQVNIVKKTEVQTGGFSKESILPKRNSDKLIARKKDWDPKKYGGFDSPTVAYSVLVVAKVEKGKSKKLKSVKELLGITIMERSSFEKNPIDFLEAKGYKEVKKDLIIKLPKYSLFELENGRKRMLASAGELQKGNELALPSKYVNFLYLASHYEKLKGSPEDNEQKQLFVEQHKHYLDEIIEQISEFSKRVILADANLDKVLSAYNKHRDKPIREQAENIIHLFTLTNLGAPAAFKYFDTTIDRKRYTSTKEVLDATLIHQSITGLYETRIDLSQLGGDGGPAPAPGGMDPLQLLQPLEAEIKGTKLKAHWNSGATITCVPQAFLEEEVPIKNIWIKTIHGEKEQPVYYLTFKIQGRKVEAEVISSPYDYILVSPSDIPWLMKKPLQLTTLVPLQEYEERLLKQTMLTGSYKEKLQSLFLKYDALWQHWENQVGHRRIKPHHIATGTVNPRPQKQYPINPKAKASIQTVINDLLKQGVLIQQNSIMNTPVYPVPKPDGKWRMVLDYREVNKTIPLIAAQNQHSAGILSSIFRGKYKTTLDLSNGFWAHSITPESYWLTAFTWLGQQYCWTRLPQGFLNSPALFNADVVDLLKEVPNVQVYVDDIYISHDDPREHLEQLEKVFSLLLNAGYVVSLKKSEIAQHEVEFLGFNITKEGRGLTETFKQKLLNITPPRDLKQLQSILGKLNFARNFIPNFSELVKPLYNIIATAPGKYITWTTDNSQQLQNIISMLNSAENLEERNPEVRLIMKVNTSPSAGYIRFYNEFAKRPIMYLNYVYTKAEVKFTNTEKLLTTIHKGLIKALDLGMGQEILVYSPIVSMTKIQKTPLPERKALPIRWITWMSYLEDPRIQFHYDKTLPELQQVPTVTDDIIAKIKHPSEFSMVFYTDGSAIKHPNVNKSHNAGMGIAQVQFKPEFTVINTWSIPLGDHTAQLAEVAAVEFACKKALKIDGPVLIVTDSFYVAESVNKELPYWQSNGFFNNKKKPLKHVSKWKSIADCIQLKPDIIIIHEKGHQPTASTFHTEGNNLADKLATQGSYVVNAGKRTADGSEFEKRTADGSEFESPKKKAKVE

SEQ ID NO: 6491 - protein, 2090 aa, synthetic construct
MPAAKRVKLDGGDKKYSIGLDIGTNSVGWAVITDEYKVPSKKFKVLGNTDRHSIKKNLIGALLFDSGETAEATRLKRTARRRYTRRKNRICYLQEIFSNEMAKVDDSFFHRLEESFLVEEDKKHERHPIFGNIVDEVAYHEKYPTIYHLRKKLVDSTDKADLRLIYLALAHMIKFRGHFLIEGDLNPDNSDVDKLFIQLVQTYNQLFEENPINASGVDAKAILSARLSKSRRLENLIAQLPGEKKNGLFGNLIALSLGLTPNFKSNFDLAEDAKLQLSKDTYDDDLDNLLAQIGDQYADLFLAAKNLSDAILLSDILRVNTEITKAPLSASMIKRYDEHHQDLTLLKALVRQQLPEKYKEIFFDQSKNGYAGYIDGGASQEEFYKFIKPILEKMDGTEELLVKLNREDLLRKQRTFDNGSIPHQIHLGELHAILRRQEDFYPFLKDNREKIEKILTFRIPYYVGPLARGNSRFAWMTRKSEETITPWNFEEVVDKGASAQSFIERMTNFDKNLPNEKVLPKHSLLYEYFTVYNELTKVKYVTEGMRKPAFLSGEQKKAIVDLLFKTNRKVTVKQLKEDYFKKIECFDSVEISGVEDRFNASLGTYHDLLKIIKDKDFLDNEENEDILEDIVLTLTLFEDREMIEERLKTYAHLFDDKVMKQLKRRRYTGWGRLSRKLINGIRDKQSGKTILDFLKSDGFANRNFMQLIHDDSLTFKEDIQKAQVSGQGDSLHEHIANLAGSPAIKKGILQTVKVVDELVKVMGRHKPENIVIEMARENQTTQKGQKNSRERMKRIEEGIKELGSQILKEHPVENTQLQNEKLYLYYLQNGRDMYVDQELDINRLSDYDVDHIVPQSFLKDDSIDNKVLTRSDKARGKSDNVPSEEVVKKMKNYWRQLLNAKLITQRKFDNLTKAERGGLSELDKAGFIKRQLVETRQITKHVAQILDSRMNTKYDENDKLIREVKVITLKSKLVSDFRKDFQFYKVREINNYHHAHDAYLNAVVGTALIKKYPKLESEFVYGDYKVYDVRKMIAKSEQEIGKATAKYFFYSNIMNFFKTEITLANGEIRKRPLIETNGETGEIVWDKGRDFATVRKVLSMPQVNIVKKTEVQTGGFSKESILPKRNSDKLIARKKDWDPKKYGGFDSPTVAYSVLVVAKVEKGKSKKLKSVKELLGITIMERSSFEKNPIDFLEAKGYKEVKKDLIIKLPKYSLFELENGRKRMLASAGELQKGNELALPSKYVNFLYLASHYEKLKGSPEDNEQKQLFVEQHKHYLDEIIEQISEFSKRVILADANLDKVLSAYNKHRDKPIREQAENIIHLFTLTNLGAPAAFKYFDTTIDRKRYTSTKEVLDATLIHQSITGLYETRIDLSQLGGDGGPAPAPGGTLNIEDEYRLHETSKEPDVPLGSTWLSDFPQAWAETGGMGLAVRQAPLIIPLKATSTPVSIKQYPMSQEARLGIKPHIQRLLDQGILVPCQSPWNTPLLPVKKPGTNDYRPVQDLREVNKRVEDIHPTVPNPYNLLSGLPPSHQWYTVLDLKDAFFCLRLHPTSQPLFAFEWRDPEMGISGQLTWTRLPQGFKNSPTLFNEALHRDLADFRIQHPDLILLQYVDDLLLAATSEQDCQRGTRALLQTLGNLGYRASAKKAQICQKQVKYLGYLLKEGQRWLTEARKETVMGQPTPKTPRQLREFLGKAGFCRLFIPGFAEMAAPLYPLTKPGTLFNWGPDQQKAYQEIKQALLTAPALGLPDLTKPFELFVDEKQGYAKGVLTQKLGPWRRPVAYLSKKLDPVAAGWPPCLRMVAAIAVLTKDAGKLTMGQPLVILAPHAVEALVKQPPDRWLSNARMTHYQAMLLDTDRVQFGPVVALNPATLLPLPEKEAPHDCLEILAETHGTRPDLTDQPIPDADYTWYTDGSSFLQEGQRRAGAAVTTETEVIWARALPAGTSAQRAELIALTQALKMAEGKKLNVYTDSRYAFATAHVHGEIYRRRGWLTSEGREIKNKNEILALLKALFLPKRLSIIHCPGHQKGNSAEARGNRMADQAAREAAMKAVLETSTLLAGKRTADGSEFEKRTADGSEFESPKKKAKVE

SEQ ID NO: 6492 - protein, 2094 aa, synthetic construct
MPAAKRVKLDGGDKKYSIGLDIGTNSVGWAVITDEYKVPSKKFKVLGNTDRHSIKKNLIGALLFDSGETAEATRLKRTARRRYTRRKNRICYLQEIFSNEMAKVDDSFFHRLEESFLVEEDKKHERHPIFGNIVDEVAYHEKYPTIYHLRKKLVDSTDKADLRLIYLALAHMIKFRGHFLIEGDLNPDNSDVDKLFIQLVQTYNQLFEENPINASGVDAKAILSARLSKSRRLENLIAQLPGEKKNGLFGNLIALSLGLTPNFKSNFDLAEDAKLQLSKDTYDDDLDNLLAQIGDQYADLFLAAKNLSDAILLSDILRVNTEITKAPLSASMIKRYDEHHQDLTLLKALVRQQLPEKYKEIFFDQSKNGYAGYIDGGASQEEFYKFIKPILEKMDGTEELLVKLNREDLLRKQRTFDNGSIPHQIHLGELHAILRRQEDFYPFLKDNREKIEKILTFRIPYYVGPLARGNSRFAWMTRKSEETITPWNFEEVVDKGASAQSFIERMTNFDKNLPNEKVLPKHSLLYEYFTVYNELTKVKYVTEGMRKPAFLSGEQKKAIVDLLFKTNRKVTVKQLKEDYFKKIECFDSVEISGVEDRFNASLGTYHDLLKIIKDKDFLDNEENEDILEDIVLTLTLFEDREMIEERLKTYAHLFDDKVMKQLKRRRYTGWGRLSRKLINGIRDKQSGKTILDFLKSDGFANRNFMQLIHDDSLTFKEDIQKAQVSGQGDSLHEHIANLAGSPAIKKGILQTVKVVDELVKVMGRHKPENIVIEMARENQTTQKGQKNSRERMKRIEEGIKELGSQILKEHPVENTQLQNEKLYLYYLQNGRDMYVDQELDINRLSDYDVDHIVPQSFLKDDSIDNKVLTRSDKARGKSDNVPSEEVVKKMKNYWRQLLNAKLITQRKFDNLTKAERGGLSELDKAGFIKRQLVETRQITKHVAQILDSRMNTKYDENDKLIREVKVITLKSKLVSDFRKDFQFYKVREINNYHHAHDAYLNAVVGTALIKKYPKLESEFVYGDYKVYDVRKMIAKSEQEIGKATAKYFFYSNIMNFFKTEITLANGEIRKRPLIETNGETGEIVWDKGRDFATVRKVLSMPQVNIVKKTEVQTGGFSKESILPKRNSDKLIARKKDWDPKKYGGFDSPTVAYSVLVVAKVEKGKSKKLKSVKELLGITIMERSSFEKNPIDFLEAKGYKEVKKDLIIKLPKYSLFELENGRKRMLASAGELQKGNELALPSKYVNFLYLASHYEKLKGSPEDNEQKQLFVEQHKHYLDEIIEQISEFSKRVILADANLDKVLSAYNKHRDKPIREQAENIIHLFTLTNLGAPAAFKYFDTTIDRKRYTSTKEVLDATLIHQSITGLYETRIDLSQLGGDGGPAPAPAPGGTAPLEEEYRLFLEAPIQNVTLLEQWKREIPKVWAEINPPGLASTQAPIHVQLLSTALPVRVRQYPITLEAKRSLRETIRKFRAAGILRPVHSPWNTPLLPVRKSGTSEYRMVQDLREVNKRVETIHPTVPNPYTLLSLLPPDRIWYSVLDLKDAFFCIPLAPESQLIFAFEWADAEEGESGQLTWTRLPQGFKNSPTLFNEALNRDLQGFRLDHPSVSLLQYVDDLLIAADTQAACLSATRDLLMTLAELGYRVSGKKAQLCQEEVTYLGFKIHKGSRSLSNSRTQAILQIPVPKTKRQVREFLGTIGYCRLWIPGFAELAQPLYAATRPGNDPLVWGEKEEEAFQSLKLALTQPPALALPSLDKPFQLFVEETSGAAKGVLTQALGPWKRPVAYLSKRLDPVAAGWPRCLRAIAAAALLTREASKLTFGQDIEITSSHNLESLLRSPPDKWLTNARITQYQVLLLDPPRVRFKQTAALNPATLLPETDDTLPIHHCLDTLDSLTSTRPDLTDQPLAQAEATLFTDGSSYIRDGKRYAGAAVVTLDSVIWAEPLPIGTSAQKAELIALTKALEWSKDKSVNIYTDSRYAFATLHVHGMIYRERGWLTAGGKAIKNAPEILALLTAVWLPKRVAVMHCKGHQKDDAPTSTGNRRADEVAREVAIRPLSTQATISAGKRTADGSEFEKRTADGSEFESPKKKAKVE

SEQ ID NO: 6493 - protein, 2098 aa, synthetic construct
MPAAKRVKLDGGDKKYSIGLDIGTNSVGWAVITDEYKVPSKKFKVLGNTDRHSIKKNLIGALLFDSGETAEATRLKRTARRRYTRRKNRICYLQEIFSNEMAKVDDSFFHRLEESFLVEEDKKHERHPIFGNIVDEVAYHEKYPTIYHLRKKLVDSTDKADLRLIYLALAHMIKFRGHFLIEGDLNPDNSDVDKLFIQLVQTYNQLFEENPINASGVDAKAILSARLSKSRRLENLIAQLPGEKKNGLFGNLIALSLGLTPNFKSNFDLAEDAKLQLSKDTYDDDLDNLLAQIGDQYADLFLAAKNLSDAILLSDILRVNTEITKAPLSASMIKRYDEHHQDLTLLKALVRQQLPEKYKEIFFDQSKNGYAGYIDGGASQEEFYKFIKPILEKMDGTEELLVKLNREDLLRKQRTFDNGSIPHQIHLGELHAILRRQEDFYPFLKDNREKIEKILTFRIPYYVGPLARGNSRFAWMTRKSEETITPWNFEEVVDKGASAQSFIERMTNFDKNLPNEKVLPKHSLLYEYFTVYNELTKVKYVTEGMRKPAFLSGEQKKAIVDLLFKTNRKVTVKQLKEDYFKKIECFDSVEISGVEDRFNASLGTYHDLLKIIKDKDFLDNEENEDILEDIVLTLTLFEDREMIEERLKTYAHLFDDKVMKQLKRRRYTGWGRLSRKLINGIRDKQSGKTILDFLKSDGFANRNFMQLIHDDSLTFKEDIQKAQVSGQGDSLHEHIANLAGSPAIKKGILQTVKVVDELVKVMGRHKPENIVIEMARENQTTQKGQKNSRERMKRIEEGIKELGSQILKEHPVENTQLQNEKLYLYYLQNGRDMYVDQELDINRLSDYDVDHIVPQSFLKDDSIDNKVLTRSDKARGKSDNVPSEEVVKKMKNYWRQLLNAKLITQRKFDNLTKAERGGLSELDKAGFIKRQLVETRQITKHVAQILDSRMNTKYDENDKLIREVKVITLKSKLVSDFRKDFQFYKVREINNYHHAHDAYLNAVVGTALIKKYPKLESEFVYGDYKVYDVRKMIAKSEQEIGKATAKYFFYSNIMNFFKTEITLANGEIRKRPLIETNGETGEIVWDKGRDFATVRKVLSMPQVNIVKKTEVQTGGFSKESILPKRNSDKLIARKKDWDPKKYGGFDSPTVAYSVLVVAKVEKGKSKKLKSVKELLGITIMERSSFEKNPIDFLEAKGYKEVKKDLIIKLPKYSLFELENGRKRMLASAGELQKGNELALPSKYVNFLYLASHYEKLKGSPEDNEQKQLFVEQHKHYLDEIIEQISEFSKRVILADANLDKVLSAYNKHRDKPIREQAENIIHLFTLTNLGAPAAFKYFDTTIDRKRYTSTKEVLDATLIHQSITGLYETRIDLSQLGGDGGPAPAPAPGGTVSLQDEHRLFDIPVTTSLPDVWLQDFPQAWAETGGLGRAKCQAPIIIDLKPTAVPVSIKQYPMSLEAHMGIRQHIIKFLELGVLRPCRSPWNTPLLPVKKPGTQDYRPVQDLREINKRTVDIHPTVPNPYNLLSTLKPDYSWYTVLDLKDAFFCLPLAPQSQELFAFEWKDPERGISGQLTWTRLPQGFKNSPTLFNEALHRDLTDFRTQHPEVTLLQYVDDLLLAAPTKKACTQGTRHLLQELGEKGYRASAKKAQICQTKVTYLGYILSEGKRWLTPGRIETVARIPPPRNPREVREFLGTAGFCRLWIPGFAELAAPLYALTKPSTPFTWQTEHQLAFEALKKALLSAPALGLPDTSKPFTLFLDERQGIAKGVLTQKLGPWKRPVAYLSKKLDPVAAGWPPCLRIMAATAMLVKDSAKLTLGQPLTVITPHTLEAIVRQPPDRWITNARLTHYQALLLDTDRVQFGPPVTLNPATLLPVPENQPSPHDCRQVLAETHGTREDLKDQELPDADHTWYTDGSSYLDSGTRRAGAAVVDGHNTIWAQSLPPGTSAQKAELIALTKALELSKGKKANIYTDSRYAFATAHTHGSIYERRGWLTSEGKEIKNKAEIIALLKALFLPQEVAIIHCPGHQKGQDPVAVGNRQADRVARQAAMAEVLTLATEPDNTSHITAGKRTADGSEFEKRTADGSEFESPKKKAKVE

SEQ ID NO: 6494 - protein, 2169 aa, synthetic construct
MPAAKRVKLDGGDKKYSIGLDIGTNSVGWAVITDEYKVPSKKFKVLGNTDRHSIKKNLIGALLFDSGETAEATRLKRTARRRYTRRKNRICYLQEIFSNEMAKVDDSFFHRLEESFLVEEDKKHERHPIFGNIVDEVAYHEKYPTIYHLRKKLVDSTDKADLRLIYLALAHMIKFRGHFLIEGDLNPDNSDVDKLFIQLVQTYNQLFEENPINASGVDAKAILSARLSKSRRLENLIAQLPGEKKNGLFGNLIALSLGLTPNFKSNFDLAEDAKLQLSKDTYDDDLDNLLAQIGDQYADLFLAAKNLSDAILLSDILRVNTEITKAPLSASMIKRYDEHHQDLTLLKALVRQQLPEKYKEIFFDQSKNGYAGYIDGGASQEEFYKFIKPILEKMDGTEELLVKLNREDLLRKQRTFDNGSIPHQIHLGELHAILRRQEDFYPFLKDNREKIEKILTFRIPYYVGPLARGNSRFAWMTRKSEETITPWNFEEVVDKGASAQSFIERMTNFDKNLPNEKVLPKHSLLYEYFTVYNELTKVKYVTEGMRKPAFLSGEQKKAIVDLLFKTNRKVTVKQLKEDYFKKIECFDSVEISGVEDRFNASLGTYHDLLKIIKDKDFLDNEENEDILEDIVLTLTLFEDREMIEERLKTYAHLFDDKVMKQLKRRRYTGWGRLSRKLINGIRDKQSGKTILDFLKSDGFANRNFMQLIHDDSLTFKEDIQKAQVSGQGDSLHEHIANLAGSPAIKKGILQTVKVVDELVKVMGRHKPENIVIEMARENQTTQKGQKNSRERMKRIEEGIKELGSQILKEHPVENTQLQNEKLYLYYLQNGRDMYVDQELDINRLSDYDVDHIVPQSFLKDDSIDNKVLTRSDKARGKSDNVPSEEVVKKMKNYWRQLLNAKLITQRKFDNLTKAERGGLSELDKAGFIKRQLVETRQITKHVAQILDSRMNTKYDENDKLIREVKVITLKSKLVSDFRKDFQFYKVREINNYHHAHDAYLNAVVGTALIKKYPKLESEFVYGDYKVYDVRKMIAKSEQEIGKATAKYFFYSNIMNFFKTEITLANGEIRKRPLIETNGETGEIVWDKGRDFATVRKVLSMPQVNIVKKTEVQTGGFSKESILPKRNSDKLIARKKDWDPKKYGGFDSPTVAYSVLVVAKVEKGKSKKLKSVKELLGITIMERSSFEKNPIDFLEAKGYKEVKKDLIIKLPKYSLFELENGRKRMLASAGELQKGNELALPSKYVNFLYLASHYEKLKGSPEDNEQKQLFVEQHKHYLDEIIEQISEFSKRVILADANLDKVLSAYNKHRDKPIREQAENIIHLFTLTNLGAPAAFKYFDTTIDRKRYTSTKEVLDATLIHQSITGLYETRIDLSQLGGDGGPAPAPAPGGMDLLKPLTVERKGVKIKGYWNSQADITCVPKDLLQGEEPVRQQNVTTIHGTQEGDVYYVNLKIDGRRINTEVIGTTLDYAIITPGDVPWILKKPLELTIKLDLEEQQGTLLNNSILSKKGKEELKQLFEKYSALWQSWENQVGHRRIRPHKIATGTVKPTPQKQYHINPKAKPDIQIVINDLLKQGVLIQKESTMNTPVYPVPKPNGRWRMVLDYRAVNKVTPLIAVQNQHSYGILGSLFKGRYKTTIDLSNGFWAHPIVPEDYWITAFTWQGKQYCWTVLPQGFLNSPGLFNGDVVDLLQGIPNVEVYVDDVYISHDSEKEHLEYLDILFNRLKEAGYIISLKKSNIANSIVDFLGFQITNEGRGLTDTFKEKLENITAPTTLKQLQSILGLLNFARNFIPDFTELIAPLYALIPKSPKNYVPWQIEHSTTLETLITKLNGAEYLQGRKGDKTLIMKVNASYTTGYIRYYNEGEKKPISYVSIVFSKTELKFTELEKLLTTVHKGLLKALDLSMGQNIHVYSPIVSMQNIQKTPQTAKKALASRWLSWLSYLEDPRIRFFYDPQMPALKDLPAVDTGKDNKKHPSNFQHIFYTDGSAITSPTKEGHLNAGMGIVYFINKDGNLQKQQEWSISLGNHTAQFAEIAAFEFALKKCLPLGGNILVVTDSNYVAKAYNEELDVWASNGFVNNRKKPLKHISKWKSVADLKRLRPDVVVTHEPGHQKLDSSPHAYGNNLADQLATQASFKVHAGKRTADGSEFEKRTADGSEFESPKKKAKVE

SEQ ID NO: 6495 - protein, 2091 aa, synthetic construct
MPAAKRVKLDGGDKKYSIGLDIGTNSVGWAVITDEYKVPSKKFKVLGNTDRHSIKKNLIGALLFDSGETAEATRLKRTARRRYTRRKNRICYLQEIFSNEMAKVDDSFFHRLEESFLVEEDKKHERHPIFGNIVDEVAYHEKYPTIYHLRKKLVDSTDKADLRLIYLALAHMIKFRGHFLIEGDLNPDNSDVDKLFIQLVQTYNQLFEENPINASGVDAKAILSARLSKSRRLENLIAQLPGEKKNGLFGNLIALSLGLTPNFKSNFDLAEDAKLQLSKDTYDDDLDNLLAQIGDQYADLFLAAKNLSDAILLSDILRVNTEITKAPLSASMIKRYDEHHQDLTLLKALVRQQLPEKYKEIFFDQSKNGYAGYIDGGASQEEFYKFIKPILEKMDGTEELLVKLNREDLLRKQRTFDNGSIPHQIHLGELHAILRRQEDFYPFLKDNREKIEKILTFRIPYYVGPLARGNSRFAWMTRKSEETITPWNFEEVVDKGASAQSFIERMTNFDKNLPNEKVLPKHSLLYEYFTVYNELTKVKYVTEGMRKPAFLSGEQKKAIVDLLFKTNRKVTVKQLKEDYFKKIECFDSVEISGVEDRFNASLGTYHDLLKIIKDKDFLDNEENEDILEDIVLTLTLFEDREMIEERLKTYAHLFDDKVMKQLKRRRYTGWGRLSRKLINGIRDKQSGKTILDFLKSDGFANRNFMQLIHDDSLTFKEDIQKAQVSGQGDSLHEHIANLAGSPAIKKGILQTVKVVDELVKVMGRHKPENIVIEMARENQTTQKGQKNSRERMKRIEEGIKELGSQILKEHPVENTQLQNEKLYLYYLQNGRDMYVDQELDINRLSDYDVDHIVPQSFLKDDSIDNKVLTRSDKARGKSDNVPSEEVVKKMKNYWRQLLNAKLITQRKFDNLTKAERGGLSELDKAGFIKRQLVETRQITKHVAQILDSRMNTKYDENDKLIREVKVITLKSKLVSDFRKDFQFYKVREINNYHHAHDAYLNAVVGTALIKKYPKLESEFVYGDYKVYDVRKMIAKSEQEIGKATAKYFFYSNIMNFFKTEITLANGEIRKRPLIETNGETGEIVWDKGRDFATVRKVLSMPQVNIVKKTEVQTGGFSKESILPKRNSDKLIARKKDWDPKKYGGFDSPTVAYSVLVVAKVEKGKSKKLKSVKELLGITIMERSSFEKNPIDFLEAKGYKEVKKDLIIKLPKYSLFELENGRKRMLASAGELQKGNELALPSKYVNFLYLASHYEKLKGSPEDNEQKQLFVEQHKHYLDEIIEQISEFSKRVILADANLDKVLSAYNKHRDKPIREQAENIIHLFTLTNLGAPAAFKYFDTTIDRKRYTSTKEVLDATLIHQSITGLYETRIDLSQLGGDGGPAPAPAPGGTLQLEEEYRLFEPESTQKQEMDIWLKNFPQAWAETGGMGTAHCQAPVLIQLKATATPISIRQYPMPHEAYQGIKPHIRRMLDQGILKPCQSPWNTPLLPVKKPGTEDYRPVQDLREVNKRVEDIHPTVPNPYNLLSTLPPSHPWYTVLDLKDAFFCLRLHSESQLLFAFEWRDPEIGLSGQLTWTRLPQGFKNSPTLFNEALHSDLADFRVRYPALVLLQYVDDLLLAAATRTECLEGTKALLETLGNKGYRASAKKAQICLQEVTYLGYSLKDGQRWLTKARKEAILSIPVPKNSRQVREFLGTAGYCRLWIPGFAELAAPLYPLTRPGTLFQWGTEQQLAFEDIKKALLSSPALGLPDITKPFELFIDENSGFAKGVLVQKLGPWKRPVAYLSKKLDTVASGWPPCLRMVAAIAILVKDAGKLTLGQPLTILTSHPVEALVRQPPNKWLSNARMTHYQAMLLDAERVHFGPTVSLNPATLLPLPSGGNHHDCLQILAETHGTRPDLTDQPLPDADLTWYTDGSSFIRNGEREAGAAVTTESEVIWAAPLPPGTSAQRAELIALTQALKMAEGKKLTVYTDSRYAFATTHVHGEIYRRRGWLTSEGKEIKNKNEILALLEALFLPKRLSIIHCPGHQKGDSPQAKGNRLADDTAKKAATETHSSLTVLPAGKRTADGSEFEKRTADGSEFESPKKKAKVE

SEQ ID NO: 6496 - protein, 2091 aa, synthetic construct
MPAAKRVKLDGGDKKYSIGLDIGTNSVGWAVITDEYKVPSKKFKVLGNTDRHSIKKNLIGALLFDSGETAEATRLKRTARRRYTRRKNRICYLQEIFSNEMAKVDDSFFHRLEESFLVEEDKKHERHPIFGNIVDEVAYHEKYPTIYHLRKKLVDSTDKADLRLIYLALAHMIKFRGHFLIEGDLNPDNSDVDKLFIQLVQTYNQLFEENPINASGVDAKAILSARLSKSRRLENLIAQLPGEKKNGLFGNLIALSLGLTPNFKSNFDLAEDAKLQLSKDTYDDDLDNLLAQIGDQYADLFLAAKNLSDAILLSDILRVNTEITKAPLSASMIKRYDEHHQDLTLLKALVRQQLPEKYKEIFFDQSKNGYAGYIDGGASQEEFYKFIKPILEKMDGTEELLVKLNREDLLRKQRTFDNGSIPHQIHLGELHAILRRQEDFYPFLKDNREKIEKILTFRIPYYVGPLARGNSRFAWMTRKSEETITPWNFEEVVDKGASAQSFIERMTNFDKNLPNEKVLPKHSLLYEYFTVYNELTKVKYVTEGMRKPAFLSGEQKKAIVDLLFKTNRKVTVKQLKEDYFKKIECFDSVEISGVEDRFNASLGTYHDLLKIIKDKDFLDNEENEDILEDIVLTLTLFEDREMIEERLKTYAHLFDDKVMKQLKRRRYTGWGRLSRKLINGIRDKQSGKTILDFLKSDGFANRNFMQLIHDDSLTFKEDIQKAQVSGQGDSLHEHIANLAGSPAIKKGILQTVKVVDELVKVMGRHKPENIVIEMARENQTTQKGQKNSRERMKRIEEGIKELGSQILKEHPVENTQLQNEKLYLYYLQNGRDMYVDQELDINRLSDYDVDHIVPQSFLKDDSIDNKVLTRSDKARGKSDNVPSEEVVKKMKNYWRQLLNAKLITQRKFDNLTKAERGGLSELDKAGFIKRQLVETRQITKHVAQILDSRMNTKYDENDKLIREVKVITLKSKLVSDFRKDFQFYKVREINNYHHAHDAYLNAVVGTALIKKYPKLESEFVYGDYKVYDVRKMIAKSEQEIGKATAKYFFYSNIMNFFKTEITLANGEIRKRPLIETNGETGEIVWDKGRDFATVRKVLSMPQVNIVKKTEVQTGGFSKESILPKRNSDKLIARKKDWDPKKYGGFDSPTVAYSVLVVAKVEKGKSKKLKSVKELLGITIMERSSFEKNPIDFLEAKGYKEVKKDLIIKLPKYSLFELENGRKRMLASAGELQKGNELALPSKYVNFLYLASHYEKLKGSPEDNEQKQLFVEQHKHYLDEIIEQISEFSKRVILADANLDKVLSAYNKHRDKPIREQAENIIHLFTLTNLGAPAAFKYFDTTIDRKRYTSTKEVLDATLIHQSITGLYETRIDLSQLGGDGGPAPAPAPGGTLQLEEEYRLFEPESTQKQEMDIWLKNFPQAWAETGGMGTAHCQAPVLIQLKATATPISIRQYPMPHEAYQGIKPHIRRMLDQGILKPCQSPWNTPLLPVKKPGTEDYRPVQDLREVNKRVEDIHPTVPNPYNLLSTLPPSHPWYTVLDLKDAFFCLRLHSESQLLFAFEWRDPEIGLSGQLTWTRLPQGFKNSPTLFNEALHSDLADFRVRYPALVLLQYVDDLLLAAATRTECLEGTKALLETLGNKGYRASAKKAQICLQEVTYLGYSLKDGQRWLTKARKEAILSIPVPKNSRQVREFLGKAGYCRLFIPGFAELAAPLYPLTRPGTLFQWGTEQQLAFEDIKKALLSSPALGLPDITKPFELFIDENSGFAKGVLVQKLGPWKRPVAYLSKKLDTVASGWPPCLRMVAAIAILVKDAGKLTLGQPLTILTSHPVEALVRQPPNKWLSNARMTHYQAMLLDAERVHFGPTVSLNPATLLPLPSGGNHHDCLQILAETHGTRPDLTDQPLPDADLTWYTDGSSFIRNGEREAGAAVTTESEVIWAAPLPPGTSAQRAELIALTQALKMAEGKKLTVYTDSRYAFATTHVHGEIYRRRGWLTSEGKEIKNKNEILALLEALFLPKRLSIIHCPGHQKGDSPQAKGNRLADDTAKKAATETHSSLTVLPAGKRTADGSEFEKRTADGSEFESPKKKAKVE

SEQ ID NO: 6497 - protein, 2090 aa, synthetic construct
MPAAKRVKLDGGDKKYSIGLDIGTNSVGWAVITDEYKVPSKKFKVLGNTDRHSIKKNLIGALLFDSGETAEATRLKRTARRRYTRRKNRICYLQEIFSNEMAKVDDSFFHRLEESFLVEEDKKHERHPIFGNIVDEVAYHEKYPTIYHLRKKLVDSTDKADLRLIYLALAHMIKFRGHFLIEGDLNPDNSDVDKLFIQLVQTYNQLFEENPINASGVDAKAILSARLSKSRRLENLIAQLPGEKKNGLFGNLIALSLGLTPNFKSNFDLAEDAKLQLSKDTYDDDLDNLLAQIGDQYADLFLAAKNLSDAILLSDILRVNTEITKAPLSASMIKRYDEHHQDLTLLKALVRQQLPEKYKEIFFDQSKNGYAGYIDGGASQEEFYKFIKPILEKMDGTEELLVKLNREDLLRKQRTFDNGSIPHQIHLGELHAILRRQEDFYPFLKDNREKIEKILTFRIPYYVGPLARGNSRFAWMTRKSEETITPWNFEEVVDKGASAQSFIERMTNFDKNLPNEKVLPKHSLLYEYFTVYNELTKVKYVTEGMRKPAFLSGEQKKAIVDLLFKTNRKVTVKQLKEDYFKKIECFDSVEISGVEDRFNASLGTYHDLLKIIKDKDFLDNEENEDILEDIVLTLTLFEDREMIEERLKTYAHLFDDKVMKQLKRRRYTGWGRLSRKLINGIRDKQSGKTILDFLKSDGFANRNFMQLIHDDSLTFKEDIQKAQVSGQGDSLHEHIANLAGSPAIKKGILQTVKVVDELVKVMGRHKPENIVIEMARENQTTQKGQKNSRERMKRIEEGIKELGSQILKEHPVENTQLQNEKLYLYYLQNGRDMYVDQELDINRLSDYDVDHIVPQSFLKDDSIDNKVLTRSDKARGKSDNVPSEEVVKKMKNYWRQLLNAKLITQRKFDNLTKAERGGLSELDKAGFIKRQLVETRQITKHVAQILDSRMNTKYDENDKLIREVKVITLKSKLVSDFRKDFQFYKVREINNYHHAHDAYLNAVVGTALIKKYPKLESEFVYGDYKVYDVRKMIAKSEQEIGKATAKYFFYSNIMNFFKTEITLANGEIRKRPLIETNGETGEIVWDKGRDFATVRKVLSMPQVNIVKKTEVQTGGFSKESILPKRNSDKLIARKKDWDPKKYGGFDSPTVAYSVLVVAKVEKGKSKKLKSVKELLGITIMERSSFEKNPIDFLEAKGYKEVKKDLIIKLPKYSLFELENGRKRMLASAGELQKGNELALPSKYVNFLYLASHYEKLKGSPEDNEQKQLFVEQHKHYLDEIIEQISEFSKRVILADANLDKVLSAYNKHRDKPIREQAENIIHLFTLTNLGAPAAFKYFDTTIDRKRYTSTKEVLDATLIHQSITGLYETRIDLSQLGGDGGPAPAPAPGGVLNLEEEYRLHEKPVPSSIDPSWLQLFPTVWAERAGMGLANQVPPVVVELRSGASPVAVRQYPMSKEAREGIRPHIQKFLDLGVLVPCRSPWNTPLLPVKKPGTNDYRPVQDLREINKRVQDIHPTVPNPYNLLSSLPPSYTWYSVLDLKDAFFCLRLHPNSQPLFAFEWKDPEKGNTGQLTWTRLPQGFKNSPTLFNEALHRDLAPFRALNPQVVLLQYVDDLLVAAPTYEDCKKGTQKLLQELSKLGYRVSAKKAQLCQREVTYLGYLLKEGKRWLTPARKATVMKIPVPTTPRQVREFLGKAGFCRLFIPGFASLAAPLYPLTKPSIPFIWTEEHQQAFDHIKKALLSAPALALPDLTKPFTLYIDERAGVARGVLTQTLGPWRRPVAYLSKKLDPVASGWPTCLKAVAAVALLLKDADKLTLGQNVTVIASHSLESIVRQPPDRWMTNARMTHYQSLLLNERVSFAPPAVLNPATLLPVESEATPVHRCSEILAEETGTRRDLEDQPLPGVPTWYTDGSSFITEGKRRAGAPIVDGKRTVWASSLPEGTSAQKAELVALTQALRLAEGKNINIYTDSRYAFATAHIHGAIYKQRGWLTSAGKDIKNKEEILALLEAIHLPRRVAIIHCPGHQRGSNPVATGNRRADEAAKQAALSTRVLAGTTKPAGKRTADGSEFEKRTADGSEFESPKKKAKVE

SEQ ID NO: 6498 - protein, 2005 aa, synthetic construct
MPAAKRVKLDGGDKKYSIGLDIGTNSVGWAVITDEYKVPSKKFKVLGNTDRHSIKKNLIGALLFDSGETAEATRLKRTARRRYTRRKNRICYLQEIFSNEMAKVDDSFFHRLEESFLVEEDKKHERHPIFGNIVDEVAYHEKYPTIYHLRKKLVDSTDKADLRLIYLALAHMIKFRGHFLIEGDLNPDNSDVDKLFIQLVQTYNQLFEENPINASGVDAKAILSARLSKSRRLENLIAQLPGEKKNGLFGNLIALSLGLTPNFKSNFDLAEDAKLQLSKDTYDDDLDNLLAQIGDQYADLFLAAKNLSDAILLSDILRVNTEITKAPLSASMIKRYDEHHQDLTLLKALVRQQLPEKYKEIFFDQSKNGYAGYIDGGASQEEFYKFIKPILEKMDGTEELLVKLNREDLLRKQRTFDNGSIPHQIHLGELHAILRRQEDFYPFLKDNREKIEKILTFRIPYYVGPLARGNSRFAWMTRKSEETITPWNFEEVVDKGASAQSFIERMTNFDKNLPNEKVLPKHSLLYEYFTVYNELTKVKYVTEGMRKPAFLSGEQKKAIVDLLFKTNRKVTVKQLKEDYFKKIECFDSVEISGVEDRFNASLGTYHDLLKIIKDKDFLDNEENEDILEDIVLTLTLFEDREMIEERLKTYAHLFDDKVMKQLKRRRYTGWGRLSRKLINGIRDKQSGKTILDFLKSDGFANRNFMQLIHDDSLTFKEDIQKAQVSGQGDSLHEHIANLAGSPAIKKGILQTVKVVDELVKVMGRHKPENIVIEMARENQTTQKGQKNSRERMKRIEEGIKELGSQILKEHPVENTQLQNEKLYLYYLQNGRDMYVDQELDINRLSDYDVDHIVPQSFLKDDSIDNKVLTRSDKARGKSDNVPSEEVVKKMKNYWRQLLNAKLITQRKFDNLTKAERGGLSELDKAGFIKRQLVETRQITKHVAQILDSRMNTKYDENDKLIREVKVITLKSKLVSDFRKDFQFYKVREINNYHHAHDAYLNAVVGTALIKKYPKLESEFVYGDYKVYDVRKMIAKSEQEIGKATAKYFFYSNIMNFFKTEITLANGEIRKRPLIETNGETGEIVWDKGRDFATVRKVLSMPQVNIVKKTEVQTGGFSKESILPKRNSDKLIARKKDWDPKKYGGFDSPTVAYSVLVVAKVEKGKSKKLKSVKELLGITIMERSSFEKNPIDFLEAKGYKEVKKDLIIKLPKYSLFELENGRKRMLASAGELQKGNELALPSKYVNFLYLASHYEKLKGSPEDNEQKQLFVEQHKHYLDEIIEQISEFSKRVILADANLDKVLSAYNKHRDKPIREQAENIIHLFTLTNLGAPAAFKYFDTTIDRKRYTSTKEVLDATLIHQSITGLYETRIDLSQLGGDGGPAPAPAPGGHLPPPPQVDQFPLNLPERLQALNDLVSKALEAGHIEPYSGPGNNPVFPVKKPNGKWRFIHDLRATNAITTTLTSPSPGPPDLTSLPTALPHLQTIDLTDAFFQIPLPKQYQPYFAFTIPQPCNYGPGTRYAWTVLPQGFKNSPTLFQQQLAAVLNPMRKMFPTSTIVQYMDDILLASPTNEELQQLSQLTLQALTTHGLPISQEKTQQTPGQIRFLGQVISPNHITYESTPTIPIKSQWTLTELQVILGEIQWVSKGTPILRKHLQSLYSALHPYRDPRACITLTPQQLHALHAIQQALQHNCRGRLNPALPLLGLISLSTSGTTSVIFQPKQNWPLAWLHTPHPPTSLCPWGHLLACTILTLDKYTLQHYGQLCQSFHHNMSKQALCDFLRNSPHPSVGILIHHMGRFHNLGSQPSGPWKTLLHLPTLLQEPRLLRPIFTLSPVVLDTAPCLFSDGSPQKAAYVLWDQTILQQDITPLPSHETHSAQKGELLALICGLRAAKPWPSLNIFLDSKYLIKYLHSLAIGAFLGTSAHQTLQAALPPLLQGKTIYLHHVRSHTNLPDPISTFNEYTDSLILAPLVPLAGKRTADGSEFEKRTADGSEFESPKKKAKVE

SEQ ID NO: 6499 - protein, 2214 aa, synthetic construct
MPAAKRVKLDGGDKKYSIGLDIGTNSVGWAVITDEYKVPSKKFKVLGNTDRHSIKKNLIGALLFDSGETAEATRLKRTARRRYTRRKNRICYLQEIFSNEMAKVDDSFFHRLEESFLVEEDKKHERHPIFGNIVDEVAYHEKYPTIYHLRKKLVDSTDKADLRLIYLALAHMIKFRGHFLIEGDLNPDNSDVDKLFIQLVQTYNQLFEENPINASGVDAKAILSARLSKSRRLENLIAQLPGEKKNGLFGNLIALSLGLTPNFKSNFDLAEDAKLQLSKDTYDDDLDNLLAQIGDQYADLFLAAKNLSDAILLSDILRVNTEITKAPLSASMIKRYDEHHQDLTLLKALVRQQLPEKYKEIFFDQSKNGYAGYIDGGASQEEFYKFIKPILEKMDGTEELLVKLNREDLLRKQRTFDNGSIPHQIHLGELHAILRRQEDFYPFLKDNREKIEKILTFRIPYYVGPLARGNSRFAWMTRKSEETITPWNFEEVVDKGASAQSFIERMTNFDKNLPNEKVLPKHSLLYEYFTVYNELTKVKYVTEGMRKPAFLSGEQKKAIVDLLFKTNRKVTVKQLKEDYFKKIECFDSVEISGVEDRFNASLGTYHDLLKIIKDKDFLDNEENEDILEDIVLTLTLFEDREMIEERLKTYAHLFDDKVMKQLKRRRYTGWGRLSRKLINGIRDKQSGKTILDFLKSDGFANRNFMQLIHDDSLTFKEDIQKAQVSGQGDSLHEHIANLAGSPAIKKGILQTVKVVDELVKVMGRHKPENIVIEMARENQTTQKGQKNSRERMKRIEEGIKELGSQILKEHPVENTQLQNEKLYLYYLQNGRDMYVDQELDINRLSDYDVDHIVPQSFLKDDSIDNKVLTRSDKARGKSDNVPSEEVVKKMKNYWRQLLNAKLITQRKFDNLTKAERGGLSELDKAGFIKRQLVETRQITKHVAQILDSRMNTKYDENDKLIREVKVITLKSKLVSDFRKDFQFYKVREINNYHHAHDAYLNAVVGTALIKKYPKLESEFVYGDYKVYDVRKMIAKSEQEIGKATAKYFFYSNIMNFFKTEITLANGEIRKRPLIETNGETGEIVWDKGRDFATVRKVLSMPQVNIVKKTEVQTGGFSKESILPKRNSDKLIARKKDWDPKKYGGFDSPTVAYSVLVVAKVEKGKSKKLKSVKELLGITIMERSSFEKNPIDFLEAKGYKEVKKDLIIKLPKYSLFELENGRKRMLASAGELQKGNELALPSKYVNFLYLASHYEKLKGSPEDNEQKQLFVEQHKHYLDEIIEQISEFSKRVILADANLDKVLSAYNKHRDKPIREQAENIIHLFTLTNLGAPAAFKYFDTTIDRKRYTSTKEVLDATLIHQSITGLYETRIDLSQLGGDGGPAPAPAPGGTLGDQGSRGSDPLPEPRVTLTVEGIPTEFLVNTGAEHSVLTKPMGKMGSKRTVVAGATGSKVYPWTTKRLLKIGQKQVTHSFLVIPECPAPLLGRDLLTKLKAQIQFSTEGPQVTWEDRPAMCLVLNLEEEYRLHEKPVPPSIDPSWLQLFPMVWAEKAGMGLANQVPPVVVELKSDASPVAVRQYPMSKEAREGIRPHIQRFLDLGILVPCQSPWNTPLLPVKKPGTNDYRPVQDLREVNKRVQDIHPTVPNPYNLLSSLPPSHTWYSVLDLKDAFFCLKLHPNSQPLFAFEWRDPEKGNTGQLTWTRLPQGFKNSPTLFNEALHRDLASFRALNPQVVMLQYVDDLLVAAPTYRDCKEGTRRLLQELSKLGYRVSAKKAQLCREEVTYLGYLLKGGKRWLTPARKATVMKIPTPTTPRQVREFLGKAGFCRLFIPGFASLAAPLYPLTRPKVPFTWTEAHQEAFGRIKEALLSAPALALPDLTKPFALYVDEKEGVARGVLTQTLGPWRRPVAYLSKKLDPVASGWPTCLKAIAAVALLLKDADKLTLGQNVLVIAPHNLESIVRQPPDRWMTNARMTHYQSLLLNERVSFAPPAILNPATLLPVESDDTPIHICSEILAEETGTRPDLRDQPLPGVPAWYTDGSSFIMDGRRQAGAAIVDNKRTVWASNLPEGTSAQKAELIALTQALRLAEGKSINIYTDSRYAFATAHVHGAIYKQRGWLTSAGKDIKNKEEILALLEAIHLPKRVAIIHCPGHQRGTDPVATGNRKADEAAKQAAQSTRILTETTKNAGKRTADGSEFEKRTADGSEFESPKKKAKVE

SEQ ID NO: 6500 - protein, 2092 aa, synthetic construct
MPAAKRVKLDGGDKKYSIGLDIGTNSVGWAVITDEYKVPSKKFKVLGNTDRHSIKKNLIGALLFDSGETAEATRLKRTARRRYTRRKNRICYLQEIFSNEMAKVDDSFFHRLEESFLVEEDKKHERHPIFGNIVDEVAYHEKYPTIYHLRKKLVDSTDKADLRLIYLALAHMIKFRGHFLIEGDLNPDNSDVDKLFIQLVQTYNQLFEENPINASGVDAKAILSARLSKSRRLENLIAQLPGEKKNGLFGNLIALSLGLTPNFKSNFDLAEDAKLQLSKDTYDDDLDNLLAQIGDQYADLFLAAKNLSDAILLSDILRVNTEITKAPLSASMIKRYDEHHQDLTLLKALVRQQLPEKYKEIFFDQSKNGYAGYIDGGASQEEFYKFIKPILEKMDGTEELLVKLNREDLLRKQRTFDNGSIPHQIHLGELHAILRRQEDFYPFLKDNREKIEKILTFRIPYYVGPLARGNSRFAWMTRKSEETITPWNFEEVVDKGASAQSFIERMTNFDKNLPNEKVLPKHSLLYEYFTVYNELTKVKYVTEGMRKPAFLSGEQKKAIVDLLFKTNRKVTVKQLKEDYFKKIECFDSVEISGVEDRFNASLGTYHDLLKIIKDKDFLDNEENEDILEDIVLTLTLFEDREMIEERLKTYAHLFDDKVMKQLKRRRYTGWGRLSRKLINGIRDKQSGKTILDFLKSDGFANRNFMQLIHDDSLTFKEDIQKAQVSGQGDSLHEHIANLAGSPAIKKGILQTVKVVDELVKVMGRHKPENIVIEMARENQTTQKGQKNSRERMKRIEEGIKELGSQILKEHPVENTQLQNEKLYLYYLQNGRDMYVDQELDINRLSDYDVDHIVPQSFLKDDSIDNKVLTRSDKARGKSDNVPSEEVVKKMKNYWRQLLNAKLITQRKFDNLTKAERGGLSELDKAGFIKRQLVETRQITKHVAQILDSRMNTKYDENDKLIREVKVITLKSKLVSDFRKDFQFYKVREINNYHHAHDAYLNAVVGTALIKKYPKLESEFVYGDYKVYDVRKMIAKSEQEIGKATAKYFFYSNIMNFFKTEITLANGEIRKRPLIETNGETGEIVWDKGRDFATVRKVLSMPQVNIVKKTEVQTGGFSKESILPKRNSDKLIARKKDWDPKKYGGFDSPTVAYSVLVVAKVEKGKSKKLKSVKELLGITIMERSSFEKNPIDFLEAKGYKEVKKDLIIKLPKYSLFELENGRKRMLASAGELQKGNELALPSKYVNFLYLASHYEKLKGSPEDNEQKQLFVEQHKHYLDEIIEQISEFSKRVILADANLDKVLSAYNKHRDKPIREQAENIIHLFTLTNLGAPAAFKYFDTTIDRKRYTSTKEVLDATLIHQSITGLYETRIDLSQLGGDGGPAPAPAPGGTLNLEDEYRLYETSAEPEVSPGSTWLSDFPQAWAETGGMGLAVRQAPLIIPLKATSTPVSIKQYPMSQEAKLGIKPHIQRLLDQGILVPCQSPWNTPLLPVKKPGTNDYRPVQDLREVNKRVEDIHPTVPNPYNLLSGLPPSHRWYTVLDLKDAFFCLRLHPTSQPLFAFEWRDPGMGISGQLTWTRLPQGFKNSPTLFNEALHRDLADFRIQHPDLILLQYVDDILLAATSELDCQQGTRALLLTLGNLGYRASAKKAQLCQKQVKYLGYLLKEGQRWLTEARKETVMGQPTPKTPRQLREFLGTAGFCRLWIPGFAEMAAPLYPLTKPGTLFNWGPDQQKAYQEIKQALLTAPALGLPDLTKPFELFVDEKQGYAKGVLTQKLGPWRRPVAYLSKKLDPVAAGWPPCLRMVAAIAVLRKDAGKLTMGQPLVILAPHAVEALVKQPPDRWLSNARMTHYQAMLLDTDRVQFGPVVALNPATLLPLPEEGAPHDCLEILAETHGTRPDLTDQPIPDADHTWYTDGSSFLQEGQRKAGAAVTTETEVIWARALPAGTSAQRAELIALTQALKMAEGKRLNVYTDSRYAFATAHIHGEIYRRRGWLTSEGREIKNKSEILALLKALFLPKRLSIIHCLGHQKGDSAEARGNRLADQAAREAAIKTPPDTSTLLAGKRTADGSEFEKRTADGSEFESPKKKAKVE

SEQ ID NO: 6501 - protein, 2092 aa, synthetic construct
MPAAKRVKLDGGDKKYSIGLDIGTNSVGWAVITDEYKVPSKKFKVLGNTDRHSIKKNLIGALLFDSGETAEATRLKRTARRRYTRRKNRICYLQEIFSNEMAKVDDSFFHRLEESFLVEEDKKHERHPIFGNIVDEVAYHEKYPTIYHLRKKLVDSTDKADLRLIYLALAHMIKFRGHFLIEGDLNPDNSDVDKLFIQLVQTYNQLFEENPINASGVDAKAILSARLSKSRRLENLIAQLPGEKKNGLFGNLIALSLGLTPNFKSNFDLAEDAKLQLSKDTYDDDLDNLLAQIGDQYADLFLAAKNLSDAILLSDILRVNTEITKAPLSASMIKRYDEHHQDLTLLKALVRQQLPEKYKEIFFDQSKNGYAGYIDGGASQEEFYKFIKPILEKMDGTEELLVKLNREDLLRKQRTFDNGSIPHQIHLGELHAILRRQEDFYPFLKDNREKIEKILTFRIPYYVGPLARGNSRFAWMTRKSEETITPWNFEEVVDKGASAQSFIERMTNFDKNLPNEKVLPKHSLLYEYFTVYNELTKVKYVTEGMRKPAFLSGEQKKAIVDLLFKTNRKVTVKQLKEDYFKKIECFDSVEISGVEDRFNASLGTYHDLLKIIKDKDFLDNEENEDILEDIVLTLTLFEDREMIEERLKTYAHLFDDKVMKQLKRRRYTGWGRLSRKLINGIRDKQSGKTILDFLKSDGFANRNFMQLIHDDSLTFKEDIQKAQVSGQGDSLHEHIANLAGSPAIKKGILQTVKVVDELVKVMGRHKPENIVIEMARENQTTQKGQKNSRERMKRIEEGIKELGSQILKEHPVENTQLQNEKLYLYYLQNGRDMYVDQELDINRLSDYDVDHIVPQSFLKDDSIDNKVLTRSDKARGKSDNVPSEEVVKKMKNYWRQLLNAKLITQRKFDNLTKAERGGLSELDKAGFIKRQLVETRQITKHVAQILDSRMNTKYDENDKLIREVKVITLKSKLVSDFRKDFQFYKVREINNYHHAHDAYLNAVVGTALIKKYPKLESEFVYGDYKVYDVRKMIAKSEQEIGKATAKYFFYSNIMNFFKTEITLANGEIRKRPLIETNGETGEIVWDKGRDFATVRKVLSMPQVNIVKKTEVQTGGFSKESILPKRNSDKLIARKKDWDPKKYGGFDSPTVAYSVLVVAKVEKGKSKKLKSVKELLGITIMERSSFEKNPIDFLEAKGYKEVKKDLIIKLPKYSLFELENGRKRMLASAGELQKGNELALPSKYVNFLYLASHYEKLKGSPEDNEQKQLFVEQHKHYLDEIIEQISEFSKRVILADANLDKVLSAYNKHRDKPIREQAENIIHLFTLTNLGAPAAFKYFDTTIDRKRYTSTKEVLDATLIHQSITGLYETRIDLSQLGGDGGPAPAPAPGGTLGIEDEYRLHETSTEPDVSLGSTWLSDFPQAWAETGGMGLAVRQAPLIIPLKATSTPVSIQQYPMSHEARLGIKPHIQRLLDQGILVPCQSPWNTPLLPVKKPGTNDYRPVQDLREVNKRVEDIHPTVPNPYNLLSGLPPSHQWYTVLDLKDAFFCLRLHPTSQPLFAFEWRDPGMGISGQLTWTRLPQGFKNSPTLFNEALHRDLADFRIQHPDLILLQYVDDILLAATSELDCQQGTRALLQTLGDLGYRASAKKAQICQKQVKYLGYLLREGQRWLTEARKETVMGQPVPKTPRQLREFLGTAGFCRLWIPGFAEMAAPLYPLTKPGTLFSWGPDQQKAYQEIKQALLTAPALGLPDLTKPFELFVDEKQGYAKGVLTQKLGPWRRPVAYLSKKLDPVAAGWPPCLRMVAAIAVLTKDAGKLTMGQPLVILAPHAVEALVKQPPDRWLSNARMTHYQAMLLDTDRVQFGPVVALNPATLLPLPEEGAPHDCLEILAETHGTRPDLTDQPIPDADHTWYTDGSSFLQEGQRKAGAAVTTETEVIWAGALPAGTSAQRAELIALTQALKMAEGKRLNVYTDSRYAFATAHIHGEIYRRRGWLTSEGREIKNKSEILALLKALFLPKRLSIIHCLGHQKGDSAEARGNRLADQAAREAAIKTPPDTSTLLAGKRTADGSEFEKRTADGSEFESPKKKAKVE

SEQ ID NO: 6502 - protein, 2092 aa, synthetic construct
MPAAKRVKLDGGDKKYSIGLDIGTNSVGWAVITDEYKVPSKKFKVLGNTDRHSIKKNLIGALLFDSGETAEATRLKRTARRRYTRRKNRICYLQEIFSNEMAKVDDSFFHRLEESFLVEEDKKHERHPIFGNIVDEVAYHEKYPTIYHLRKKLVDSTDKADLRLIYLALAHMIKFRGHFLIEGDLNPDNSDVDKLFIQLVQTYNQLFEENPINASGVDAKAILSARLSKSRRLENLIAQLPGEKKNGLFGNLIALSLGLTPNFKSNFDLAEDAKLQLSKDTYDDDLDNLLAQIGDQYADLFLAAKNLSDAILLSDILRVNTEITKAPLSASMIKRYDEHHQDLTLLKALVRQQLPEKYKEIFFDQSKNGYAGYIDGGASQEEFYKFIKPILEKMDGTEELLVKLNREDLLRKQRTFDNGSIPHQIHLGELHAILRRQEDFYPFLKDNREKIEKILTFRIPYYVGPLARGNSRFAWMTRKSEETITPWNFEEVVDKGASAQSFIERMTNFDKNLPNEKVLPKHSLLYEYFTVYNELTKVKYVTEGMRKPAFLSGEQKKAIVDLLFKTNRKVTVKQLKEDYFKKIECFDSVEISGVEDRFNASLGTYHDLLKIIKDKDFLDNEENEDILEDIVLTLTLFEDREMIEERLKTYAHLFDDKVMKQLKRRRYTGWGRLSRKLINGIRDKQSGKTILDFLKSDGFANRNFMQLIHDDSLTFKEDIQKAQVSGQGDSLHEHIANLAGSPAIKKGILQTVKVVDELVKVMGRHKPENIVIEMARENQTTQKGQKNSRERMKRIEEGIKELGSQILKEHPVENTQLQNEKLYLYYLQNGRDMYVDQELDINRLSDYDVDHIVPQSFLKDDSIDNKVLTRSDKARGKSDNVPSEEVVKKMKNYWRQLLNAKLITQRKFDNLTKAERGGLSELDKAGFIKRQLVETRQITKHVAQILDSRMNTKYDENDKLIREVKVITLKSKLVSDFRKDFQFYKVREINNYHHAHDAYLNAVVGTALIKKYPKLESEFVYGDYKVYDVRKMIAKSEQEIGKATAKYFFYSNIMNFFKTEITLANGEIRKRPLIETNGETGEIVWDKGRDFATVRKVLSMPQVNIVKKTEVQTGGFSKESILPKRNSDKLIARKKDWDPKKYGGFDSPTVAYSVLVVAKVEKGKSKKLKSVKELLGITIMERSSFEKNPIDFLEAKGYKEVKKDLIIKLPKYSLFELENGRKRMLASAGELQKGNELALPSKYVNFLYLASHYEKLKGSPEDNEQKQLFVEQHKHYLDEIIEQISEFSKRVILADANLDKVLSAYNKHRDKPIREQAENIIHLFTLTNLGAPAAFKYFDTTIDRKRYTSTKEVLDATLIHQSITGLYETRIDLSQLGGDGGPAPAPAPGGTLNIEDEYRLHETSKGPDVPLGSTWLSDFPQAWAETGGMGLAVRQAPLIIPLKATSTPVSIKQYPMSQEARLGIKPHIQRLLDQGILVPCQSPWNTPLLPVKKPGTNDYRPVQDLREVNKRVEDIHPTVPNPYNLLSGLPPSHQWYTVLDLKDAFFCLRLHPTSQSLFAFEWRDPEMGISGQLTWTRLPQGFKNSPTLFNEALHRDLADFRIQHPDLILLQYVDDLLLAATSELDCQQGTRALLQTLGDLGYRASAKKAQICQKQVKYLGYLLKEGQRWLTEARKETVMGQPTPKTPRQLREFLGTAGFCRLWIPGFAEMAAPLYPLTKPGTLFEWGPDQQKAYQEIKQALLTAPALGLPDLTKPFELFVDEKQGYAKGVLTQKLGPWRRPVAYLSKKLDPVAAGWPPCLRMVAAIAVLTKDAGKLTMGQPLVILAPHAVEALVKQPPDRWLSNARMTHYQALLLDTDRVQFGPIVALNPATLLPLPEEGLQHDCLDILAEAHGTRPDLTDQPLPDADHTWYTDGSSFLQEGQRKAGAAVTTETEVVWAKALPAGTSAQRAELIALTQALKMAEGKKLNVYTDSRYAFATAHIHGEIYRRRGWLTSEGKEIKNKDEILALLKALFLPKRLSIIHCPGHQKGNRAEARGNRMADQAAREVATRETPETSTLLAGKRTADGSEFEKRTADGSEFESPKKKAKVE

SEQ ID NO: 6503 - protein, 2092 aa, synthetic construct
MPAAKRVKLDGGDKKYSIGLDIGTNSVGWAVITDEYKVPSKKFKVLGNTDRHSIKKNLIGALLFDSGETAEATRLKRTARRRYTRRKNRICYLQEIFSNEMAKVDDSFFHRLEESFLVEEDKKHERHPIFGNIVDEVAYHEKYPTIYHLRKKLVDSTDKADLRLIYLALAHMIKFRGHFLIEGDLNPDNSDVDKLFIQLVQTYNQLFEENPINASGVDAKAILSARLSKSRRLENLIAQLPGEKKNGLFGNLIALSLGLTPNFKSNFDLAEDAKLQLSKDTYDDDLDNLLAQIGDQYADLFLAAKNLSDAILLSDILRVNTEITKAPLSASMIKRYDEHHQDLTLLKALVRQQLPEKYKEIFFDQSKNGYAGYIDGGASQEEFYKFIKPILEKMDGTEELLVKLNREDLLRKQRTFDNGSIPHQIHLGELHAILRRQEDFYPFLKDNREKIEKILTFRIPYYVGPLARGNSRFAWMTRKSEETITPWNFEEVVDKGASAQSFIERMTNFDKNLPNEKVLPKHSLLYEYFTVYNELTKVKYVTEGMRKPAFLSGEQKKAIVDLLFKTNRKVTVKQLKEDYFKKIECFDSVEISGVEDRFNASLGTYHDLLKIIKDKDFLDNEENEDILEDIVLTLTLFEDREMIEERLKTYAHLFDDKVMKQLKRRRYTGWGRLSRKLINGIRDKQSGKTILDFLKSDGFANRNFMQLIHDDSLTFKEDIQKAQVSGQGDSLHEHIANLAGSPAIKKGILQTVKVVDELVKVMGRHKPENIVIEMARENQTTQKGQKNSRERMKRIEEGIKELGSQILKEHPVENTQLQNEKLYLYYLQNGRDMYVDQELDINRLSDYDVDHIVPQSFLKDDSIDNKVLTRSDKARGKSDNVPSEEVVKKMKNYWRQLLNAKLITQRKFDNLTKAERGGLSELDKAGFIKRQLVETRQITKHVAQILDSRMNTKYDENDKLIREVKVITLKSKLVSDFRKDFQFYKVREINNYHHAHDAYLNAVVGTALIKKYPKLESEFVYGDYKVYDVRKMIAKSEQEIGKATAKYFFYSNIMNFFKTEITLANGEIRKRPLIETNGETGEIVWDKGRDFATVRKVLSMPQVNIVKKTEVQTGGFSKESILPKRNSDKLIARKKDWDPKKYGGFDSPTVAYSVLVVAKVEKGKSKKLKSVKELLGITIMERSSFEKNPIDFLEAKGYKEVKKDLIIKLPKYSLFELENGRKRMLASAGELQKGNELALPSKYVNFLYLASHYEKLKGSPEDNEQKQLFVEQHKHYLDEIIEQISEFSKRVILADANLDKVLSAYNKHRDKPIREQAENIIHLFTLTNLGAPAAFKYFDTTIDRKRYTSTKEVLDATLIHQSITGLYETRIDLSQLGGDGGPAPAPAPGGTLNIEDEYRLHETSKGPDVPLGSTWLSDFPQAWAETGGMGLAVRQAPLIIPLKATSTPVSIKQYPMSQEARLGIKPHIQRLLDQGILVPCQSPWNTPLLPVKKPGTNDYRPVQDLREVNKRVEDIHPTVPNPYNLLSGLPPSHQWYTVLDLKDAFFCLRLHPTSQSLFAFEWRDPEMGISGQLTWTRLPQGFKNSPTLFNEALHRDLADFRIQHPDLILLQYVDDLLLAATSELDCQQGTRALLQTLGDLGYRASAKKAQICQKQVKYLGYLLKEGQRWLTEARKETVMGQPTPKTPRQLREFLGKAGFCRLFIPGFAEMAAPLYPLTKPGTLFEWGPDQQKAYQEIKQALLTAPALGLPDLTKPFELFVDEKQGYAKGVLTQKLGPWRRPVAYLSKKLDPVAAGWPPCLRMVAAIAVLTKDAGKLTMGQPLVILAPHAVEALVKQPPDRWLSNARMTHYQALLLDTDRVQFGPIVALNPATLLPLPEEGLQHDCLDILAEAHGTRPDLTDQPLPDADHTWYTDGSSFLQEGQRKAGAAVTTETEVVWAKALPAGTSAQRAELIALTQALKMAEGKKLNVYTDSRYAFATAHIHGEIYRRRGWLTSEGKEIKNKDEILALLKALFLPKRLSIIHCPGHQKGNRAEARGNRMADQAAREVATRETPETSTLLAGKRTADGSEFEKRTADGSEFESPKKKAKVE

SEQ ID NO: 6504 - protein, 2112 aa, synthetic construct; identical to SEQ ID NO: 4508

SEQ ID NO: 6505 - protein, 2112 aa, synthetic construct; identical to SEQ ID NO: 4508

SEQ ID NO: 6506 - protein, 2092 aa, synthetic construct
MPAAKRVKLDGGDKKYSIGLDIGTNSVGWAVITDEYKVPSKKFKVLGNTDRHSIKKNLIGALLFDSGETAEATRLKRTARRRYTRRKNRICYLQEIFSNEMAKVDDSFFHRLEESFLVEEDKKHERHPIFGNIVDEVAYHEKYPTIYHLRKKLVDSTDKADLRLIYLALAHMIKFRGHFLIEGDLNPDNSDVDKLFIQLVQTYNQLFEENPINASGVDAKAILSARLSKSRRLENLIAQLPGEKKNGLFGNLIALSLGLTPNFKSNFDLAEDAKLQLSKDTYDDDLDNLLAQIGDQYADLFLAAKNLSDAILLSDILRVNTEITKAPLSASMIKRYDEHHQDLTLLKALVRQQLPEKYKEIFFDQSKNGYAGYIDGGASQEEFYKFIKPILEKMDGTEELLVKLNREDLLRKQRTFDNGSIPHQIHLGELHAILRRQEDFYPFLKDNREKIEKILTFRIPYYVGPLARGNSRFAWMTRKSEETITPWNFEEVVDKGASAQSFIERMTNFDKNLPNEKVLPKHSLLYEYFTVYNELTKVKYVTEGMRKPAFLSGEQKKAIVDLLFKTNRKVTVKQLKEDYFKKIECFDSVEISGVEDRFNASLGTYHDLLKIIKDKDFLDNEENEDILEDIVLTLTLFEDREMIEERLKTYAHLFDDKVMKQLKRRRYTGWGRLSRKLINGIRDKQSGKTILDFLKSDGFANRNFMQLIHDDSLTFKEDIQKAQVSGQGDSLHEHIANLAGSPAIKKGILQTVKVVDELVKVMGRHKPENIVIEMARENQTTQKGQKNSRERMKRIEEGIKELGSQILKEHPVENTQLQNEKLYLYYLQNGRDMYVDQELDINRLSDYDVDHIVPQSFLKDDSIDNKVLTRSDKARGKSDNVPSEEVVKKMKNYWRQLLNAKLITQRKFDNLTKAERGGLSELDKAGFIKRQLVETRQITKHVAQILDSRMNTKYDENDKLIREVKVITLKSKLVSDFRKDFQFYKVREINNYHHAHDAYLNAVVGTALIKKYPKLESEFVYGDYKVYDVRKMIAKSEQEIGKATAKYFFYSNIMNFFKTEITLANGEIRKRPLIETNGETGEIVWDKGRDFATVRKVLSMPQVNIVKKTEVQTGGFSKESILPKRNSDKLIARKKDWDPKKYGGFDSPTVAYSVLVVAKVEKGKSKKLKSVKELLGITIMERSSFEKNPIDFLEAKGYKEVKKDLIIKLPKYSLFELENGRKRMLASAGELQKGNELALPSKYVNFLYLASHYEKLKGSPEDNEQKQLFVEQHKHYLDEIIEQISEFSKRVILADANLDKVLSAYNKHRDKPIREQAENIIHLFTLTNLGAPAAFKYFDTTIDRKRYTSTKEVLDATLIHQSITGLYETRIDLSQLGGDGGPAPAPAPGGTLNIEDEYRLHEISTEPDVSPGSTWLSDFPQAWAETGGMGLAVRQAPLIIPLKATSTPVSIKQYPMSQEAKLGIKPHIQRLLDQGILVPCQSPWNTPLLPVKKPGTNDYRPVQGLREVNKRVEDIHPTVPNPYNLLSGLPTSHRWYTVLDLKDAFFCLRLHPTSQPLFASEWRDPGMGISGQLTWTRLPQGFKNSPTLFNEALHRGLADFRIQHPDLILLQYVDDLLLAATSELDCQQGTRALLKTLGNLGYRASAKKAQICQKQVKYLGYLLREGQRWLTEARKETVMGQPTPKTPRQLREFLGTAGFCRLWIPRFAEMAAPLYPLTKPGTLFNWGPDQQKAYHEIKQALLTAPALGLPDLTKPFELFVDEKQGYAKGVLTQKLGPWRRPVAYLSKKLDPVAAGWPPCLRMVAAIAVLTKDAGKLTMGQPLVILAPHAVEALVKQPPDRWLSNARMTHYQAMLLDTDRVQFGPVVALNPATLLPLPEEGAPHDCLEILAETHGTEPDLTDQPIPDADHTWYTDGSSFLQEGQRKAGAAVTTETEVIWARALPAGTSAQRAELIALTQALKMAEGKRLNVYTDSRYAFATAHIHGEIYKRRGWLTSEGREIKNKSEILALLKALFLPKRLSIIHCLGHQKGDSAEARGNRLADQAAREAAIKTPPDTSTLLAGKRTADGSEFEKRTADGSEFESPKKKAKVE

SEQ ID NO: 6507 - protein, 2006 aa, synthetic construct
MPAAKRVKLDGGDKKYSIGLDIGTNSVGWAVITDEYKVPSKKFKVLGNTDRHSIKKNLIGALLFDSGETAEATRLKRTARRRYTRRKNRICYLQEIFSNEMAKVDDSFFHRLEESFLVEEDKKHERHPIFGNIVDEVAYHEKYPTIYHLRKKLVDSTDKADLRLIYLALAHMIKFRGHFLIEGDLNPDNSDVDKLFIQLVQTYNQLFEENPINASGVDAKAILSARLSKSRRLENLIAQLPGEKKNGLFGNLIALSLGLTPNFKSNFDLAEDAKLQLSKDTYDDDLDNLLAQIGDQYADLFLAAKNLSDAILLSDILRVNTEITKAPLSASMIKRYDEHHQDLTLLKALVRQQLPEKYKEIFFDQSKNGYAGYIDGGASQEEFYKFIKPILEKMDGTEELLVKLNREDLLRKQRTFDNGSIPHQIHLGELHAILRRQEDFYPFLKDNREKIEKILTFRIPYYVGPLARGNSRFAWMTRKSEETITPWNFEEVVDKGASAQSFIERMTNFDKNLPNEKVLPKHSLLYEYFTVYNELTKVKYVTEGMRKPAFLSGEQKKAIVDLLFKTNRKVTVKQLKEDYFKKIECFDSVEISGVEDRFNASLGTYHDLLKIIKDKDFLDNEENEDILEDIVLTLTLFEDREMIEERLKTYAHLFDDKVMKQLKRRRYTGWGRLSRKLINGIRDKQSGKTILDFLKSDGFANRNFMQLIHDDSLTFKEDIQKAQVSGQGDSLHEHIANLAGSPAIKKGILQTVKVVDELVKVMGRHKPENIVIEMARENQTTQKGQKNSRERMKRIEEGIKELGSQILKEHPVENTQLQNEKLYLYYLQNGRDMYVDQELDINRLSDYDVDHIVPQSFLKDDSIDNKVLTRSDKARGKSDNVPSEEVVKKMKNYWRQLLNAKLITQRKFDNLTKAERGGLSELDKAGFIKRQLVETRQITKHVAQILDSRMNTKYDENDKLIREVKVITLKSKLVSDFRKDFQFYKVREINNYHHAHDAYLNAVVGTALIKKYPKLESEFVYGDYKVYDVRKMIAKSEQEIGKATAKYFFYSNIMNFFKTEITLANGEIRKRPLIETNGETGEIVWDKGRDFATVRKVLSMPQVNIVKKTEVQTGGFSKESILPKRNSDKLIARKKDWDPKKYGGFDSPTVAYSVLVVAKVEKGKSKKLKSVKELLGITIMERSSFEKNPIDFLEAKGYKEVKKDLIIKLPKYSLFELENGRKRMLASAGELQKGNELALPSKYVNFLYLASHYEKLKGSPEDNEQKQLFVEQHKHYLDEIIEQISEFSKRVILADANLDKVLSAYNKHRDKPIREQAENIIHLFTLTNLGAPAAFKYFDTTIDRKRYTSTKEVLDATLIHQSITGLYETRIDLSQLGGDGGPAPAPAPGGLTAAIDILAPQQCAEPITWKSDEPVWVDQWPLTNDKLAAAQQLVQEQLEAGHITESSSPWNTPIFVIKKKSGKWRLLQDLRAVNATMVLMGALQPGLPSPVAIPQGYLKIIIDLKDCFFSIPLHPSDQKRFAFSLPSTNFKEPMQRFQWKVLPQGMANSPTLCQKYVATAIHKVRHAWKQMYIIHYMDDILIAGKDGQQVLQCFDQLKQELTAAGLHIAPEKVQLQDPYTYLGFELNGPKITNQKAVIRKDKLQTLNDFQKLLGDINWLRPYLKLTTGDLKPLFDTLKGDSDPNSHRSLSKEALASLEKVETAIAEQFVTHINYSLPLIFLIFNTALTPTGLFWQDNPIMWIHLPASPKKVLLPYYDAIADLIILGRDHSKKYFGIEPSTIIQPYSKSQIDWLMQNTEMWPIACASFVGILDNHYPPNKLIQFCKLHTFVFPQIISKTPLNNALLVFTDGSSTGMAAYTLTDTTIKFQTNLNSAQLVELQALIAVLSAFPNQPLNIYTDSAYLAHSIPLLETVAQIKHISETAKLFLQCQQLIYNRSIPFYIGHVRAHSGLPGPIAQGNQRADLATKIVASNINTAGKRTADGSEFEKRTADGSEFESPKKKAKVE

SEQ ID NO: 6508 - protein, 2086 aa, synthetic construct
MPAAKRVKLDGGDKKYSIGLDIGTNSVGWAVITDEYKVPSKKFKVLGNTDRHSIKKNLIGALLFDSGETAEATRLKRTARRRYTRRKNRICYLQEIFSNEMAKVDDSFFHRLEESFLVEEDKKHERHPIFGNIVDEVAYHEKYPTIYHLRKKLVDSTDKADLRLIYLALAHMIKFRGHFLIEGDLNPDNSDVDKLFIQLVQTYNQLFEENPINASGVDAKAILSARLSKSRRLENLIAQLPGEKKNGLFGNLIALSLGLTPNFKSNFDLAEDAKLQLSKDTYDDDLDNLLAQIGDQYADLFLAAKNLSDAILLSDILRVNTEITKAPLSASMIKRYDEHHQDLTLLKALVRQQLPEKYKEIFFDQSKNGYAGYIDGGASQEEFYKFIKPILEKMDGTEELLVKLNREDLLRKQRTFDNGSIPHQIHLGELHAILRRQEDFYPFLKDNREKIEKILTFRIPYYVGPLARGNSRFAWMTRKSEETITPWNFEEVVDKGASAQSFIERMTNFDKNLPNEKVLPKHSLLYEYFTVYNELTKVKYVTEGMRKPAFLSGEQKKAIVDLLFKTNRKVTVKQLKEDYFKKIECFDSVEISGVEDRFNASLGTYHDLLKIIKDKDFLDNEENEDILEDIVLTLTLFEDREMIEERLKTYAHLFDDKVMKQLKRRRYTGWGRLSRKLINGIRDKQSGKTILDFLKSDGFANRNFMQLIHDDSLTFKEDIQKAQVSGQGDSLHEHIANLAGSPAIKKGILQTVKVVDELVKVMGRHKPENIVIEMARENQTTQKGQKNSRERMKRIEEGIKELGSQILKEHPVENTQLQNEKLYLYYLQNGRDMYVDQELDINRLSDYDVDHIVPQSFLKDDSIDNKVLTRSDKARGKSDNVPSEEVVKKMKNYWRQLLNAKLITQRKFDNLTKAERGGLSELDKAGFIKRQLVETRQITKHVAQILDSRMNTKYDENDKLIREVKVITLKSKLVSDFRKDFQFYKVREINNYHHAHDAYLNAVVGTALIKKYPKLESEFVYGDYKVYDVRKMIAKSEQEIGKATAKYFFYSNIMNFFKTEITLANGEIRKRPLIETNGETGEIVWDKGRDFATVRKVLSMPQVNIVKKTEVQTGGFSKESILPKRNSDKLIARKKDWDPKKYGGFDSPTVAYSVLVVAKVEKGKSKKLKSVKELLGITIMERSSFEKNPIDFLEAKGYKEVKKDLIIKLPKYSLFELENGRKRMLASAGELQKGNELALPSKYVNFLYLASHYEKLKGSPEDNEQKQLFVEQHKHYLDEIIEQISEFSKRVILADANLDKVLSAYNKHRDKPIREQAENIIHLFTLTNLGAPAAFKYFDTTIDRKRYTSTKEVLDATLIHQSITGLYETRIDLSQLGGDGGPAPAPAPGGTLQLDDEYRLYSPLVKPDQNIQFWLEQFPQAWAETAGMGLAKQVPPQVIQLKASATPVSVRQYPLSKEAQEGIRPHVQRLIQQGILVPVQSPWNTPLLPVRKPGTNDYRPVQDLREVNKRVQDIHPTVPNPYNLLCALPPQRSWYTVLDLKDAFFCLRLHPTSQPLFAFEWRDPGTGRTGQLTWTRLPQGFKNSPTIFNEALHRDLANFRIQHPQVTLLQYVDDLLLAGATKQDCLEGTKALLLELSDLGYRASAKKAQICRREVTYLGYSLRDGQRWLTEARKKTVVQIPAPTTAKQVREFLGTAGFCRLWIPGFATLAAPLYPLTKPKGEFSWAPEHQKAFDAIKKALLSAPALALPDVTKPFTLYVDERKGVARGVLTQTLGPWRRPVAYLSKKLDPVASGWPVCLKAIAAVAILVKDADKLTLGQNITVIAPHALENIVRQPPDRWMTNARMTHYQSLLLTERVTFAPPAALNPATLLPEETDEPVTHDCHQLLIEETGVRKDLTDIPLTGEVLTWFTDGSSYVVEGKRMAGAAVVDGTRTIWASSLPEGTSAQKAELMALTQALRLAEGKSINIYTDSRYAFATAHVHGAIYKQRGWLTSAGREIKNKEEILSLLEALHLPKRLAIIHCPGHQKAKDPISRGNQMADRVAKQAAQGVNLLAGKRTADGSEFEKRTADGSEFESPKKKAKVE

SEQ ID NO: 6509 - protein, 2086 aa, synthetic construct; identical to SEQ ID NO: 6508

SEQ ID NO: 6510 - protein, 2083 aa, synthetic construct
MPAAKRVKLDGGDKKYSIGLDIGTNSVGWAVITDEYKVPSKKFKVLGNTDRHSIKKNLIGALLFDSGETAEATRLKRTARRRYTRRKNRICYLQEIFSNEMAKVDDSFFHRLEESFLVEEDKKHERHPIFGNIVDEVAYHEKYPTIYHLRKKLVDSTDKADLRLIYLALAHMIKFRGHFLIEGDLNPDNSDVDKLFIQLVQTYNQLFEENPINASGVDAKAILSARLSKSRRLENLIAQLPGEKKNGLFGNLIALSLGLTPNFKSNFDLAEDAKLQLSKDTYDDDLDNLLAQIGDQYADLFLAAKNLSDAILLSDILRVNTEITKAPLSASMIKRYDEHHQDLTLLKALVRQQLPEKYKEIFFDQSKNGYAGYIDGGASQEEFYKFIKPILEKMDGTEELLVKLNREDLLRKQRTFDNGSIPHQIHLGELHAILRRQEDFYPFLKDNREKIEKILTFRIPYYVGPLARGNSRFAWMTRKSEETITPWNFEEVVDKGASAQSFIERMTNFDKNLPNEKVLPKHSLLYEYFTVYNELTKVKYVTEGMRKPAFLSGEQKKAIVDLLFKTNRKVTVKQLKEDYFKKIECFDSVEISGVEDRFNASLGTYHDLLKIIKDKDFLDNEENEDILEDIVLTLTLFEDREMIEERLKTYAHLFDDKVMKQLKRRRYTGWGRLSRKLINGIRDKQSGKTILDFLKSDGFANRNFMQLIHDDSLTFKEDIQKAQVSGQGDSLHEHIANLAGSPAIKKGILQTVKVVDELVKVMGRHKPENIVIEMARENQTTQKGQKNSRERMKRIEEGIKELGSQILKEHPVENTQLQNEKLYLYYLQNGRDMYVDQELDINRLSDYDVDHIVPQSFLKDDSIDNKVLTRSDKARGKSDNVPSEEVVKKMKNYWRQLLNAKLITQRKFDNLTKAERGGLSELDKAGFIKRQLVETRQITKHVAQILDSRMNTKYDENDKLIREVKVITLKSKLVSDFRKDFQFYKVREINNYHHAHDAYLNAVVGTALIKKYPKLESEFVYGDYKVYDVRKMIAKSEQEIGKATAKYFFYSNIMNFFKTEITLANGEIRKRPLIETNGETGEIVWDKGRDFATVRKVLSMPQVNIVKKTEVQTGGFSKESILPKRNSDKLIARKKDWDPKKYGGFDSPTVAYSVLVVAKVEKGKSKKLKSVKELLGITIMERSSFEKNPIDFLEAKGYKEVKKDLIIKLPKYSLFELENGRKRMLASAGELQKGNELALPSKYVNFLYLASHYEKLKGSPEDNEQKQLFVEQHKHYLDEIIEQISEFSKRVILADANLDKVLSAYNKHRDKPIREQAENIIHLFTLTNLGAPAAFKYFDTTIDRKRYTSTKEVLDATLIHQSITGLYETRIDLSQLGGDGGPAPAPAPGGVPWLMKKPLQLTVLVPLHEYQERLLQQTALPKEQKELLQKLFLKYDALWQHWENQVGHRRIKPHNIATGTLAPRPQKQYPINPKAKPSIQIVIDDLLKQGVLIQQNSTMNTPVYPVPKPDGKWRMVLDYREVNKTIPLIAAQNQHSAGILSSIYRGKYKTTLDLTNGFWAHPITPESYWLTAFTWQGKQYCWTRLPQGFLNSPALFNADVVDLLKEIPNVQAYVDDIYISHDDPQEHLEQLEKIFSILLNAGYVVSLKKSEIAQREVEFLGFNITKEGRGLTDTFKQKLLNITPPKDLKQLQSILGLLNFARNFIPNYSELVKPLYTIVAPANGKFISWTEDNSNQLQHIISVLNQADNLEERNPETRLIIKVNSSPSAGYIRYYNEGSKRPIMYVNYIFSKAEAKFTQTEKLLTTMHKGLIKAMDLAMGQEILVYSPIVSMTKIQRTPLPERKALPVRWITWMTYLEDPRIQFHYDKSLPELQQIPNVTEDVIAKTKHPSEFAMVFYTDGSAIKHPDVNKSHSAGMGIAQVQFIPEYKIVHQWSIPLGDHTAQLAEIAAVEFACKKALKISGPVLIVTDSFYVAESANKELPYWKSNGFLNNKKKPLRHVSKWKSIAECLQLKPDIIIMHEKGHQQPMTTLHTEGNNLADKLATQGSYVVHAGKRTADGSEFEKRTADGSEFESPKKKAKVE

SEQ ID NO: 6511 - protein, 2172 aa, synthetic construct
MPAAKRVKLDGGDKKYSIGLDIGTNSVGWAVITDEYKVPSKKFKVLGNTDRHSIKKNLIGALLFDSGETAEATRLKRTARRRYTRRKNRICYLQEIFSNEMAKVDDSFFHRLEESFLVEEDKKHERHPIFGNIVDEVAYHEKYPTIYHLRKKLVDSTDKADLRLIYLALAHMIKFRGHFLIEGDLNPDNSDVDKLFIQLVQTYNQLFEENPINASGVDAKAILSARLSKSRRLENLIAQLPGEKKNGLFGNLIALSLGLTPNFKSNFDLAEDAKLQLSKDTYDDDLDNLLAQIGDQYADLFLAAKNLSDAILLSDILRVNTEITKAPLSASMIKRYDEHHQDLTLLKALVRQQLPEKYKEIFFDQSKNGYAGYIDGGASQEEFYKFIKPILEKMDGTEELLVKLNREDLLRKQRTFDNGSIPHQIHLGELHAILRRQEDFYPFLKDNREKIEKILTFRIPYYVGPLARGNSRFAWMTRKSEETITPWNFEEVVDKGASAQSFIERMTNFDKNLPNEKVLPKHSLLYEYFTVYNELTKVKYVTEGMRKPAFLSGEQKKAIVDLLFKTNRKVTVKQLKEDYFKKIECFDSVEISGVEDRFNASLGTYHDLLKIIKDKDFLDNEENEDILEDIVLTLTLFEDREMIEERLKTYAHLFDDKVMKQLKRRRYTGWGRLSRKLINGIRDKQSGKTILDFLKSDGFANRNFMQLIHDDSLTFKEDIQKAQVSGQGDSLHEHIANLAGSPAIKKGILQTVKVVDELVKVMGRHKPENIVIEMARENQTTQKGQKNSRERMKRIEEGIKELGSQILKEHPVENTQLQNEKLYLYYLQNGRDMYVDQELDINRLSDYDVDHIVPQSFLKDDSIDNKVLTRSDKARGKSDNVPSEEVVKKMKNYWRQLLNAKLITQRKFDNLTKAERGGLSELDKAGFIKRQLVETRQITKHVAQILDSRMNTKYDENDKLIREVKVITLKSKLVSDFRKDFQFYKVREINNYHHAHDAYLNAVVGTALIKKYPKLESEFVYGDYKVYDVRKMIAKSEQEIGKATAKYFFYSNIMNFFKTEITLANGEIRKRPLIETNGETGEIVWDKGRDFATVRKVLSMPQVNIVKKTEVQTGGFSKESILPKRNSDKLIARKKDWDPKKYGGFDSPTVAYSVLVVAKVEKGKSKKLKSVKELLGITIMERSSFEKNPIDFLEAKGYKEVKKDLIIKLPKYSLFELENGRKRMLASAGELQKGNELALPSKYVNFLYLASHYEKLKGSPEDNEQKQLFVEQHKHYLDEIIEQISEFSKRVILADANLDKVLSAYNKHRDKPIREQAENIIHLFTLTNLGAPAAFKYFDTTIDRKRYTSTKEVLDATLIHQSITGLYETRIDLSQLGGDGGPAPAPAPGGMDPLQLLQPLEAEIKGTKLKAHWNSGATITCVPQAFLEEEVPIKNIWIKTIHGEKEQPVYYLTFKIQGRKVEAEVISSPYDYILVSPSDIPWLMKKPLQLTTLVPLQEYEERLLKQTMLTGSYKEKLQSLFLKYDALWQHWENQVGHRRIKPHHIATGTVNPRPQKQYPINPKAKASIQTVINDLLKQGVLIQQNSIMNTPVYPVPKPDGKWRMVLDYREVNKTIPLIAAQNQHSAGILSSIFRGKYKTTLDLSNGFWAHSITPESYWLTAFTWLGQQYCWTRLPQGFLNSPALFNADVVDLLKEVPNVQVYVDDIYISHDDPREHLEQLEKVFSLLLNAGYVVSLKKSEIAQHEVEFLGFNITKEGRGLTETFKQKLLNITPPRDLKQLQSILGKLNFARNFIPNFSELVKPLYNIIATAPGKYITWTTDNSQQLQNIISMLNSAENLEERNPEVRLIMKVNTSPSAGYIRFYNEFAKRPIMYLNYVYTKAEVKFTNTEKLLTTIHKGLIKALDLGMGQEILVYSPIVSMTKIQKTPLPERKALPIRWITWMSYLEDPRIQFHYDKTLPELQQVPTVTDDIIAKIKHPSEFSMVFYTDGSAIKHPNVNKSHNAGMGIAQVQFKPEFTVINTWSIPLGDHTAQLAEVAAVEFACKKALKIDGPVLIVTDSFYVAESVNKELPYWQSNGFFNNKKKPLKHVSKWKSIADCIQLKPDIIIIHEKGHQPTASTFHTEGNNLADKLATQGSYVVNAGKRTADGSEFEKRTADGSEFESPKKKAKVE

SEQ ID NO: 6512 - protein, 2092 aa, synthetic construct
MPAAKRVKLDGGDKKYSIGLDIGTNSVGWAVITDEYKVPSKKFKVLGNTDRHSIKKNLIGALLFDSGETAEATRLKRTARRRYTRRKNRICYLQEIFSNEMAKVDDSFFHRLEESFLVEEDKKHERHPIFGNIVDEVAYHEKYPTIYHLRKKLVDSTDKADLRLIYLALAHMIKFRGHFLIEGDLNPDNSDVDKLFIQLVQTYNQLFEENPINASGVDAKAILSARLSKSRRLENLIAQLPGEKKNGLFGNLIALSLGLTPNFKSNFDLAEDAKLQLSKDTYDDDLDNLLAQIGDQYADLFLAAKNLSDAILLSDILRVNTEITKAPLSASMIKRYDEHHQDLTLLKALVRQQLPEKYKEIFFDQSKNGYAGYIDGGASQEEFYKFIKPILEKMDGTEELLVKLNREDLLRKQRTFDNGSIPHQIHLGELHAILRRQEDFYPFLKDNREKIEKILTFRIPYYVGPLARGNSRFAWMTRKSEETITPWNFEEVVDKGASAQSFIERMTNFDKNLPNEKVLPKHSLLYEYFTVYNELTKVKYVTEGMRKPAFLSGEQKKAIVDLLFKTNRKVTVKQLKEDYFKKIECFDSVEISGVEDRFNASLGTYHDLLKIIKDKDFLDNEENEDILEDIVLTLTLFEDREMIEERLKTYAHLFDDKVMKQLKRRRYTGWGRLSRKLINGIRDKQSGKTILDFLKSDGFANRNFMQLIHDDSLTFKEDIQKAQVSGQGDSLHEHIANLAGSPAIKKGILQTVKVVDELVKVMGRHKPENIVIEMARENQTTQKGQKNSRERMKRIEEGIKELGSQILKEHPVENTQLQNEKLYLYYLQNGRDMYVDQELDINRLSDYDVDHIVPQSFLKDDSIDNKVLTRSDKARGKSDNVPSEEVVKKMKNYWRQLLNAKLITQRKFDNLTKAERGGLSELDKAGFIKRQLVETRQITKHVAQILDSRMNTKYDENDKLIREVKVITLKSKLVSDFRKDFQFYKVREINNYHHAHDAYLNAVVGTALIKKYPKLESEFVYGDYKVYDVRKMIAKSEQEIGKATAKYFFYSNIMNFFKTEITLANGEIRKRPLIETNGETGEIVWDKGRDFATVRKVLSMPQVNIVKKTEVQTGGFSKESILPKRNSDKLIARKKDWDPKKYGGFDSPTVAYSVLVVAKVEKGKSKKLKSVKELLGITIMERSSFEKNPIDFLEAKGYKEVKKDLIIKLPKYSLFELENGRKRMLASAGELQKGNELALPSKYVNFLYLASHYEKLKGSPEDNEQKQLFVEQHKHYLDEIIEQISEFSKRVILADANLDKVLSAYNKHRDKPIREQAENIIHLFTLTNLGAPAAFKYFDTTIDRKRYTSTKEVLDATLIHQSITGLYETRIDLSQLGGDGGPAPAPAPGGTLNIEDEYRLHETSKEPDVPLGSTWLSDFPQAWAETGGMGLAVRQAPLIIPLKATSTPVSIKQYPMSQEARLGIKPHIQRLLDQGILVPCQSPWNTPLLPVKKPGTNDYRPVQDLREVNKRVEDIHPTVPNPYNLLSGLPPSHQWYTVLDLKDAFFCLRLHPTSQPLFAFEWRDPEMGISGQLTWTRLPQGFKNSPTLFNEALHRDLADFRIQHPDLILLQYVDDLLLAATSEQDCQRGTRALLQTLGNLGYRASAKKAQICQKQVKYLGYLLKEGQRWLTEARKETVMGQPTPKTPRQLREFLGKAGFCRLFIPGFAEMAAPLYPLTKPGTLFNWGPDQQKAYQEIKQALLTAPALGLPDLTKPFELFVDEKQGYAKGVLTQKLGPWRRPVAYLSKKLDPVAAGWPPCLRMVAAIAVLTKDAGKLTMGQPLVILAPHAVEALVKQPPDRWLSNARMTHYQAMLLDTDRVQFGPVVALNPATLLPLPEKEAPHDCLEILAETHGTRPDLTDQPIPDADYTWYTDGSSFLQEGQRRAGAAVTTETEVIWARALPAGTSAQRAELIALTQALKMAEGKKLNVYTDSRYAFATAHVHGEIYRRRGWLTSEGREIKNKNEILALLKALFLPKRLSIIHCPGHQKGNSAEARGNRMADQAAREAAMKAVLETSTLLAGKRTADGSEFEKRTADGSEFESPKKKAKVE

SEQ ID NO: 6513 - protein, 2096 aa, synthetic construct
MPAAKRVKLDGGDKKYSIGLDIGTNSVGWAVITDEYKVPSKKFKVLGNTDRHSIKKNLIGALLFDSGETAEATRLKRTARRRYTRRKNRICYLQEIFSNEMAKVDDSFFHRLEESFLVEEDKKHERHPIFGNIVDEVAYHEKYPTIYHLRKKLVDSTDKADLRLIYLALAHMIKFRGHFLIEGDLNPDNSDVDKLFIQLVQTYNQLFEENPINASGVDAKAILSARLSKSRRLENLIAQLPGEKKNGLFGNLIALSLGLTPNFKSNFDLAEDAKLQLSKDTYDDDLDNLLAQIGDQYADLFLAAKNLSDAILLSDILRVNTEITKAPLSASMIKRYDEHHQDLTLLKALVRQQLPEKYKEIFFDQSKNGYAGYIDGGASQEEFYKFIKPILEKMDGTEELLVKLNREDLLRKQRTFDNGSIPHQIHLGELHAILRRQEDFYPFLKDNREKIEKILTFRIPYYVGPLARGNSRFAWMTRKSEETITPWNFEEVVDKGASAQSFIERMTNFDKNLPNEKVLPKHSLLYEYFTVYNELTKVKYVTEGMRKPAFLSGEQKKAIVDLLFKTNRKVTVKQLKEDYFKKIECFDSVEISGVEDRFNASLGTYHDLLKIIKDKDFLDNEENEDILEDIVLTLTLFEDREMIEERLKTYAHLFDDKVMKQLKRRRYTGWGRLSRKLINGIRDKQSGKTILDFLKSDGFANRNFMQLIHDDSLTFKEDIQKAQVSGQGDSLHEHIANLAGSPAIKKGILQTVKVVDELVKVMGRHKPENIVIEMARENQTTQKGQKNSRERMKRIEEGIKELGSQILKEHPVENTQLQNEKLYLYYLQNGRDMYVDQELDINRLSDYDVDHIVPQSFLKDDSIDNKVLTRSDKARGKSDNVPSEEVVKKMKNYWRQLLNAKLITQRKFDNLTKAERGGLSELDKAGFIKRQLVETRQITKHVAQILDSRMNTKYDENDKLIREVKVITLKSKLVSDFRKDFQFYKVREINNYHHAHDAYLNAVVGTALIKKYPKLESEFVYGDYKVYDVRKMIAKSEQEIGKATAKYFFYSNIMNFFKTEITLANGEIRKRPLIETNGETGEIVWDKGRDFATVRKVLSMPQVNIVKKTEVQTGGFSKESILPKRNSDKLIARKKDWDPKKYGGFDSPTVAYSVLVVAKVEKGKSKKLKSVKELLGITIMERSSFEKNPIDFLEAKGYKEVKKDLIIKLPKYSLFELENGRKRMLASAGELQKGNELALPSKYVNFLYLASHYEKLKGSPEDNEQKQLFVEQHKHYLDEIIEQISEFSKRVILADANLDKVLSAYNKHRDKPIREQAENIIHLFTLTNLGAPAAFKYFDTTIDRKRYTSTKEVLDATLIHQSITGLYETRIDLSQLGGDGGPAPAPAPAPGGTAPLEEEYRLFLEAPIQNVTLLEQWKREIPKVWAEINPPGLASTQAPIHVQLLSTALPVRVRQYPITLEAKRSLRETIRKFRAAGILRPVHSPWNTPLLPVRKSGTSEYRMVQDLREVNKRVETIHPTVPNPYTLLSLLPPDRIWYSVLDLKDAFFCIPLAPESQLIFAFEWADAEEGESGQLTWTRLPQGFKNSPTLFDEALNRDLQGFRLDHPSVSLLQYVDDLLIAADTQAACLSATRDLLMTLAELGYRVSGKKAQLCQEEVTYLGFKIHKGSRSLSNSRTQAILQIPVPKTKRQVREFLGTIGYCRLWIPGFAELAQPLYAATRGGNDPLVWGEKEEEAFQSLKLALTQPPALALPSLDKPFQLFVEETSGAAKGVLTQALGPWKRPVAYLSKRLDPVAAGWPRCLRAIAAAALLTREASKLTFGQDIEITSSHNLESLLRSPPDKWLTNARITQYQVLLLDPPRVRFKQTAALNPATLLPETDDTLPIHHCLDTLDSLTSTRPDLTDQPLAQAEATLFTDGSSYIRDGKRYAGAAVVTLDSVIWAEPLPIGTSAQKAELIALTKALEWSKDKSVNIYTDSRYAFATLHVHGMIYRERGLLTAGGKAIKNAPEILALLTAVWLPKRVAVMHCKGHQKDDAPTSTGNRRADEVAREVAIRPLSTQATISAGKRTADGSEFEKRTADGSEFESPKKKAKVE

SEQ ID NO: 6514 - protein, 2096 aa, synthetic construct
MPAAKRVKLDGGDKKYSIGLDIGTNSVGWAVITDEYKVPSKKFKVLGNTDRHSIKKNLIGALLFDSGETAEATRLKRTARRRYTRRKNRICYLQEIFSNEMAKVDDSFFHRLEESFLVEEDKKHERHPIFGNIVDEVAYHEKYPTIYHLRKKLVDSTDKADLRLIYLALAHMIKFRGHFLIEGDLNPDNSDVDKLFIQLVQTYNQLFEENPINASGVDAKAILSARLSKSRRLENLIAQLPGEKKNGLFGNLIALSLGLTPNFKSNFDLAEDAKLQLSKDTYDDDLDNLLAQIGDQYADLFLAAKNLSDAILLSDILRVNTEITKAPLSASMIKRYDEHHQDLTLLKALVRQQLPEKYKEIFFDQSKNGYAGYIDGGASQEEFYKFIKPILEKMDGTEELLVKLNREDLLRKQRTFDNGSIPHQIHLGELHAILRRQEDFYPFLKDNREKIEKILTFRIPYYVGPLARGNSRFAWMTRKSEETITPWNFEEVVDKGASAQSFIERMTNFDKNLPNEKVLPKHSLLYEYFTVYNELTKVKYVTEGMRKPAFLSGEQKKAIVDLLFKTNRKVTVKQLKEDYFKKIECFDSVEISGVEDRFNASLGTYHDLLKIIKDKDFLDNEENEDILEDIVLTLTLFEDREMIEERLKTYAHLFDDKVMKQLKRRRYTGWGRLSRKLINGIRDKQSGKTILDFLKSDGFANRNFMQLIHDDSLTFKEDIQKAQVSGQGDSLHEHIANLAGSPAIKKGILQTVKVVDELVKVMGRHKPENIVIEMARENQTTQKGQKNSRERMKRIEEGIKELGSQILKEHPVENTQLQNEKLYLYYLQNGRDMYVDQELDINRLSDYDVDHIVPQSFLKDDSIDNKVLTRSDKARGKSDNVPSEEVVKKMKNYWRQLLNAKLITQRKFDNLTKAERGGLSELDKAGFIKRQLVETRQITKHVAQILDSRMNTKYDENDKLIREVKVITLKSKLVSDFRKDFQFYKVREINNYHHAHDAYLNAVVGTALIKKYPKLESEFVYGDYKVYDVRKMIAKSEQEIGKATAKYFFYSNIMNFFKTEITLANGEIRKRPLIETNGETGEIVWDKGRDFATVRKVLSMPQVNIVKKTEVQTGGFSKESILPKRNSDKLIARKKDWDPKKYGGFDSPTVAYSVLVVAKVEKGKSKKLKSVKELLGITIMERSSFEKNPIDFLEAKGYKEVKKDLIIKLPKYSLFELENGRKRMLASAGELQKGNELALPSKYVNFLYLASHYEKLKGSPEDNEQKQLFVEQHKHYLDEIIEQISEFSKRVILADANLDKVLSAYNKHRDKPIREQAENIIHLFTLTNLGAPAAFKYFDTTIDRKRYTSTKEVLDATLIHQSITGLYETRIDLSQLGGDGGPAPAPAPAPGGTAPLEEEYRLFLEAPIQNVTLLEQWKREIPKVWAEINPPGLASTQAPIHVQLLSTALPVRVRQYPITLEAKRSLRETIRKFRAAGILRPVHSPWNTPLLPVRKSGTSEYRMVQDLREVNKRVETIHPTVPNPYTLLSLLPPDRIWYSVLDLKDAFFCIPLAPESQLIFAFEWADAEEGESGQLTWTRLPQGFKNSPTLFNEALNRDLQGFRLDHPSVSLLQYVDDLLIAADTQAACLSATRDLLMTLAELGYRVSGKKAQLCQEEVTYLGFKIHKGSRSLSNSRTQAILQIPVPKTKRQVREFLGTIGYCRLWIPGFAELAQPLYAATRPGNDPLVWGEKEEEAFQSLKLALTQPPALALPSLDKPFQLFVEETSGAAKGVLTQALGPWKRPVAYLSKRLDPVAAGWPRCLRAIAAAALLTREASKLTFGQDIEITSSHNLESLLRSPPDKWLTNARITQYQVLLLDPPRVRFKQTAALNPATLLPETDDTLPIHHCLDTLDSLTSTRPDLTDQPLAQAEATLFTDGSSYIRDGKRYAGAAVVTLDSVIWAEPLPIGTSAQKAELIALTKALEWSKDKSVNIYTDSRYAFATLHVHGMIYRERGWLTAGGKAIKNAPEILALLTAVWLPKRVAVMHCKGHQKDDAPTSTGNRRADEVAREVAIRPLSTQATISAGKRTADGSEFEKRTADGSEFESPKKKAKVE

SEQ ID NO: 6515 - protein, 2100 aa, synthetic construct
MPAAKRVKLDGGDKKYSIGLDIGTNSVGWAVITDEYKVPSKKFKVLGNTDRHSIKKNLIGALLFDSGETAEATRLKRTARRRYTRRKNRICYLQEIFSNEMAKVDDSFFHRLEESFLVEEDKKHERHPIFGNIVDEVAYHEKYPTIYHLRKKLVDSTDKADLRLIYLALAHMIKFRGHFLIEGDLNPDNSDVDKLFIQLVQTYNQLFEENPINASGVDAKAILSARLSKSRRLENLIAQLPGEKKNGLFGNLIALSLGLTPNFKSNFDLAEDAKLQLSKDTYDDDLDNLLAQIGDQYADLFLAAKNLSDAILLSDILRVNTEITKAPLSASMIKRYDEHHQDLTLLKALVRQQLPEKYKEIFFDQSKNGYAGYIDGGASQEEFYKFIKPILEKMDGTEELLVKLNREDLLRKQRTFDNGSIPHQIHLGELHAILRRQEDFYPFLKDNREKIEKILTFRIPYYVGPLARGNSRFAWMTRKSEETITPWNFEEVVDKGASAQSFIERMTNFDKNLPNEKVLPKHSLLYEYFTVYNELTKVKYVTEGMRKPAFLSGEQKKAIVDLLFKTNRKVTVKQLKEDYFKKIECFDSVEISGVEDRFNASLGTYHDLLKIIKDKDFLDNEENEDILEDIVLTLTLFEDREMIEERLKTYAHLFDDKVMKQLKRRRYTGWGRLSRKLINGIRDKQSGKTILDFLKSDGFANRNFMQLIHDDSLTFKEDIQKAQVSGQGDSLHEHIANLAGSPAIKKGILQTVKVVDELVKVMGRHKPENIVIEMARENQTTQKGQKNSRERMKRIEEGIKELGSQILKEHPVENTQLQNEKLYLYYLQNGRDMYVDQELDINRLSDYDVDHIVPQSFLKDDSIDNKVLTRSDKARGKSDNVPSEEVVKKMKNYWRQLLNAKLITQRKFDNLTKAERGGLSELDKAGFIKRQLVETRQITKHVAQILDSRMNTKYDENDKLIREVKVITLKSKLVSDFRKDFQFYKVREINNYHHAHDAYLNAVVGTALIKKYPKLESEFVYGDYKVYDVRKMIAKSEQEIGKATAKYFFYSNIMNFFKTEITLANGEIRKRPLIETNGETGEIVWDKGRDFATVRKVLSMPQVNIVKKTEVQTGGFSKESILPKRNSDKLIARKKDWDPKKYGGFDSPTVAYSVLVVAKVEKGKSKKLKSVKELLGITIMERSSFEKNPIDFLEAKGYKEVKKDLIIKLPKYSLFELENGRKRMLASAGELQKGNELALPSKYVNFLYLASHYEKLKGSPEDNEQKQLFVEQHKHYLDEIIEQISEFSKRVILADANLDKVLSAYNKHRDKPIREQAENIIHLFTLTNLGAPAAFKYFDTTIDRKRYTSTKEVLDATLIHQSITGLYETRIDLSQLGGDGGPAPAPAPAPGGTVSLQDEHRLFDIPVTTSLPDVWLQDFPQAWAETGGLGRAKCQAPIIIDLKPTAVPVSIKQYPMSLEAHMGIRQHIIKFLELGVLRPCRSPWNTPLLPVKKPGTQDYRPVQDLREINKRTVDIHPTVPNPYNLLSTLKPDYSWYTVLDLKDAFFCLPLAPQSQELFAFEWKDPERGISGQLTWTRLPQGFKNSPTLFNEALHRDLTDFRTQHPEVTLLQYVDDLLLAAPTKKACTQGTRHLLQELGEKGYRASAKKAQICQTKVTYLGYILSEGKRWLTPGRIETVARIPPPRNPREVREFLGTAGFCRLWIPGFAELAAPLYALTKPSTPFTWQTEHQLAFEALKKALLSAPALGLPDTSKPFTLFLDERQGIAKGVLTQKLGPWKRPVAYLSKKLDPVAAGWPPCLRIMAATAMLVKDSAKLTLGQPLTVITPHTLEAIVRQPPDRWITNARLTHYQALLLDTDRVQFGPPVTLNPATLLPVPENQPSPHDCRQVLAETHGTREDLKDQELPDADHTWYTDGSSYLDSGTRRAGAAVVDGHNTIWAQSLPPGTSAQKAELIALTKALELSKGKKANIYTDSRYAFATAHTHGSIYERRGWLTSEGKEIKNKAEIIALLKALFLPQEVAIIHCPGHQKGQDPVAVGNRQADRVARQAAMAEVLTLATEPDNTSHITAGKRTADGSEFEKRTADGSEFESPKKKAKVE

SEQ ID NO: 6516 - protein, 2085 aa, synthetic construct
MPAAKRVKLDGGDKKYSIGLDIGTNSVGWAVITDEYKVPSKKFKVLGNTDRHSIKKNLIGALLFDSGETAEATRLKRTARRRYTRRKNRICYLQEIFSNEMAKVDDSFFHRLEESFLVEEDKKHERHPIFGNIVDEVAYHEKYPTIYHLRKKLVDSTDKADLRLIYLALAHMIKFRGHFLIEGDLNPDNSDVDKLFIQLVQTYNQLFEENPINASGVDAKAILSARLSKSRRLENLIAQLPGEKKNGLFGNLIALSLGLTPNFKSNFDLAEDAKLQLSKDTYDDDLDNLLAQIGDQYADLFLAAKNLSDAILLSDILRVNTEITKAPLSASMIKRYDEHHQDLTLLKALVRQQLPEKYKEIFFDQSKNGYAGYIDGGASQEEFYKFIKPILEKMDGTEELLVKLNREDLLRKQRTFDNGSIPHQIHLGELHAILRRQEDFYPFLKDNREKIEKILTFRIPYYVGPLARGNSRFAWMTRKSEETITPWNFEEVVDKGASAQSFIERMTNFDKNLPNEKVLPKHSLLYEYFTVYNELTKVKYVTEGMRKPAFLSGEQKKAIVDLLFKTNRKVTVKQLKEDYFKKIECFDSVEISGVEDRFNASLGTYHDLLKIIKDKDFLDNEENEDILEDIVLTLTLFEDREMIEERLKTYAHLFDDKVMKQLKRRRYTGWGRLSRKLINGIRDKQSGKTILDFLKSDGFANRNFMQLIHDDSLTFKEDIQKAQVSGQGDSLHEHIANLAGSPAIKKGILQTVKVVDELVKVMGRHKPENIVIEMARENQTTQKGQKNSRERMKRIEEGIKELGSQILKEHPVENTQLQNEKLYLYYLQNGRDMYVDQELDINRLSDYDVDHIVPQSFLKDDSIDNKVLTRSDKARGKSDNVPSEEVVKKMKNYWRQLLNAKLITQRKFDNLTKAERGGLSELDKAGFIKRQLVETRQITKHVAQILDSRMNTKYDENDKLIREVKVITLKSKLVSDFRKDFQFYKVREINNYHHAHDAYLNAVVGTALIKKYPKLESEFVYGDYKVYDVRKMIAKSEQEIGKATAKYFFYSNIMNFFKTEITLANGEIRKRPLIETNGETGEIVWDKGRDFATVRKVLSMPQVNIVKKTEVQTGGFSKESILPKRNSDKLIARKKDWDPKKYGGFDSPTVAYSVLVVAKVEKGKSKKLKSVKELLGITIMERSSFEKNPIDFLEAKGYKEVKKDLIIKLPKYSLFELENGRKRMLASAGELQKGNELALPSKYVNFLYLASHYEKLKGSPEDNEQKQLFVEQHKHYLDEIIEQISEFSKRVILADANLDKVLSAYNKHRDKPIREQAENIIHLFTLTNLGAPAAFKYFDTTIDRKRYTSTKEVLDATLIHQSITGLYETRIDLSQLGGDGGPAPAPAPAPGGVPWILKKPLELTIKLDLEEQQGTLLNNSILSKKGKEELKQLFEKYSALWQSWENQVGHRRIRPHKIATGTVKPTPQKQYHINPKAKPDIQIVINDLLKQGVLIQKESTMNTPVYPVPKPNGRWRMVLDYRAVNKVTPLIAVQNQHSYGILGSLFKGRYKTTIDLSNGFWAHPIVPEDYWITAFTWQGKQYCWTVLPQGFLNSPGLFNGDVVDLLQGIPNVEVYVDDVYISHDSEKEHLEYLDILFNRLKEAGYIISLKKSNIANSIVDFLGFQITNEGRGLTDTFKEKLENITAPTTLKQLQSILGKLNFARNFIPDFTELIAPLYALIPKSPKNYVPWQIEHSTTLETLITKLNGAEYLQGRKGDKTLIMKVNASYTTGYIRYYNEGEKKPISYVSIVFSKTELKFTELEKLLTTVHKGLLKALDLSMGQNIHVYSPIVSMQNIQKTPQTAKKALASRWLSWLSYLEDPRIRFFYDPQMPALKDLPAVDTGKDNKKHPSNFQHIFYTDGSAITSPTKEGHLNAGMGIVYFINKDGNLQKQQEWSISLGNHTAQFAEIAAFEFALKKCLPLGGNILVVTDSNYVAKAYNEELDVWASNGFVNNRKKPLKHISKWKSVADLKRLRPDVVVTHEPGHQKLDSSPHAYGNNLADQLATQASFKVHAGKRTADGSEFEKRTADGSEFESPKKKAKVE

SEQ ID NO: 6517 - protein, 2093 aa, synthetic construct
MPAAKRVKLDGGDKKYSIGLDIGTNSVGWAVITDEYKVPSKKFKVLGNTDRHSIKKNLIGALLFDSGETAEATRLKRTARRRYTRRKNRICYLQEIFSNEMAKVDDSFFHRLEESFLVEEDKKHERHPIFGNIVDEVAYHEKYPTIYHLRKKLVDSTDKADLRLIYLALAHMIKFRGHFLIEGDLNPDNSDVDKLFIQLVQTYNQLFEENPINASGVDAKAILSARLSKSRRLENLIAQLPGEKKNGLFGNLIALSLGLTPNFKSNFDLAEDAKLQLSKDTYDDDLDNLLAQIGDQYADLFLAAKNLSDAILLSDILRVNTEITKAPLSASMIKRYDEHHQDLTLLKALVRQQLPEKYKEIFFDQSKNGYAGYIDGGASQEEFYKFIKPILEKMDGTEELLVKLNREDLLRKQRTFDNGSIPHQIHLGELHAILRRQEDFYPFLKDNREKIEKILTFRIPYYVGPLARGNSRFAWMTRKSEETITPWNFEEVVDKGASAQSFIERMTNFDKNLPNEKVLPKHSLLYEYFTVYNELTKVKYVTEGMRKPAFLSGEQKKAIVDLLFKTNRKVTVKQLKEDYFKKIECFDSVEISGVEDRFNASLGTYHDLLKIIKDKDFLDNEENEDILEDIVLTLTLFEDREMIEERLKTYAHLFDDKVMKQLKRRRYTGWGRLSRKLINGIRDKQSGKTILDFLKSDGFANRNFMQLIHDDSLTFKEDIQKAQVSGQGDSLHEHIANLAGSPAIKKGILQTVKVVDELVKVMGRHKPENIVIEMARENQTTQKGQKNSRERMKRIEEGIKELGSQILKEHPVENTQLQNEKLYLYYLQNGRDMYVDQELDINRLSDYDVDHIVPQSFLKDDSIDNKVLTRSDKARGKSDNVPSEEVVKKMKNYWRQLLNAKLITQRKFDNLTKAERGGLSELDKAGFIKRQLVETRQITKHVAQILDSRMNTKYDENDKLIREVKVITLKSKLVSDFRKDFQFYKVREINNYHHAHDAYLNAVVGTALIKKYPKLESEFVYGDYKVYDVRKMIAKSEQEIGKATAKYFFYSNIMNFFKTEITLANGEIRKRPLIETNGETGEIVWDKGRDFATVRKVLSMPQVNIVKKTEVQTGGFSKESILPKRNSDKLIARKKDWDPKKYGGFDSPTVAYSVLVVAKVEKGKSKKLKSVKELLGITIMERSSFEKNPIDFLEAKGYKEVKKDLIIKLPKYSLFELENGRKRMLASAGELQKGNELALPSKYVNFLYLASHYEKLKGSPEDNEQKQLFVEQHKHYLDEIIEQISEFSKRVILADANLDKVLSAYNKHRDKPIREQAENIIHLFTLTNLGAPAAFKYFDTTIDRKRYTSTKEVLDATLIHQSITGLYETRIDLSQLGGDGGPAPAPAPAPGGTLQLEEEYRLFEPESTQKQEMDIWLKNFPQAWAETGGMGTAHCQAPVLIQLKATATPISIRQYPMPHEAYQGIKPHIRRMLDQGILKPCQSPWNTPLLPVKKPGTEDYRPVQDLREVNKRVEDIHPTVPNPYNLLSTLPPSHPWYTVLDLKDAFFCLRLHSESQLLFAFEWRDPEIGLSGQLTWTRLPQGFKNSPTLFNEALHSDLADFRVRYPALVLLQYVDDLLLAAATRTECLEGTKALLETLGNKGYRASAKKAQICLQEVTYLGYSLKDGQRWLTKARKEAILSIPVPKNSRQVREFLGTAGYCRLWIPGFAELAAPLYPLTRPGTLFQWGTEQQLAFEDIKKALLSSPALGLPDITKPFELFIDENSGFAKGVLVQKLGPWKRPVAYLSKKLDTVASGWPPCLRMVAAIAILVKDAGKLTLGQPLTILTSHPVEALVRQPPNKWLSNARMTHYQAMLLDAERVHFGPTVSLNPATLLPLPSGGNHHDCLQILAETHGTRPDLTDQPLPDADLTWYTDGSSFIRNGEREAGAAVTTESEVIWAAPLPPGTSAQRAELIALTQALKMAEGKKLTVYTDSRYAFATTHVHGEIYRRRGWLTSEGKEIKNKNEILALLEALFLPKRLSIIHCPGHQKGDSPQAKGNRLADDTAKKAATETHSSLTVLPAGKRTADGSEFEKRTADGSEFESPKKKAKVE

SEQ ID NO: 6518 - protein, 2085 aa, synthetic construct
MPAAKRVKLDGGDKKYSIGLDIGTNSVGWAVITDEYKVPSKKFKVLGNTDRHSIKKNLIGALLFDSGETAEATRLKRTARRRYTRRKNRICYLQEIFSNEMAKVDDSFFHRLEESFLVEEDKKHERHPIFGNIVDEVAYHEKYPTIYHLRKKLVDSTDKADLRLIYLALAHMIKFRGHFLIEGDLNPDNSDVDKLFIQLVQTYNQLFEENPINASGVDAKAILSARLSKSRRLENLIAQLPGEKKNGLFGNLIALSLGLTPNFKSNFDLAEDAKLQLSKDTYDDDLDNLLAQIGDQYADLFLAAKNLSDAILLSDILRVNTEITKAPLSASMIKRYDEHHQDLTLLKALVRQQLPEKYKEIFFDQSKNGYAGYIDGGASQEEFYKFIKPILEKMDGTEELLVKLNREDLLRKQRTFDNGSIPHQIHLGELHAILRRQEDFYPFLKDNREKIEKILTFRIPYYVGPLARGNSRFAWMTRKSEETITPWNFEEVVDKGASAQSFIERMTNFDKNLPNEKVLPKHSLLYEYFTVYNELTKVKYVTEGMRKPAFLSGEQKKAIVDLLFKTNRKVTVKQLKEDYFKKIECFDSVEISGVEDRFNASLGTYHDLLKIIKDKDFLDNEENEDILEDIVLTLTLFEDREMIEERLKTYAHLFDDKVMKQLKRRRYTGWGRLSRKLINGIRDKQSGKTILDFLKSDGFANRNFMQLIHDDSLTFKEDIQKAQVSGQGDSLHEHIANLAGSPAIKKGILQTVKVVDELVKVMGRHKPENIVIEMARENQTTQKGQKNSRERMKRIEEGIKELGSQILKEHPVENTQLQNEKLYLYYLQNGRDMYVDQELDINRLSDYDVDHIVPQSFLKDDSIDNKVLTRSDKARGKSDNVPSEEVVKKMKNYWRQLLNAKLITQRKFDNLTKAERGGLSELDKAGFIKRQLVETRQITKHVAQILDSRMNTKYDENDKLIREVKVITLKSKLVSDFRKDFQFYKVREINNYHHAHDAYLNAVVGTALIKKYPKLESEFVYGDYKVYDVRKMIAKSEQEIGKATAKYFFYSNIMNFFKTEITLANGEIRKRPLIETNGETGEIVWDKGRDFATVRKVLSMPQVNIVKKTEVQTGGFSKESILPKRNSDKLIARKKDWDPKKYGGFDSPTVAYSVLVVAKVEKGKSKKLKSVKELLGITIMERSSFEKNPIDFLEAKGYKEVKKDLIIKLPKYSLFELENGRKRMLASAGELQKGNELALPSKYVNFLYLASHYEKLKGSPEDNEQKQLFVEQHKHYLDEIIEQISEFSKRVILADANLDKVLSAYNKHRDKPIREQAENIIHLFTLTNLGAPAAFKYFDTTIDRKRYTSTKEVLDATLIHQSITGLYETRIDLSQLGGDGGPAPAPAPAPGGVPWLTQQPLQLTILVPLQEYQEKILSKTALPEDQKQQLKTLFVKYDNLWQHWENQVGHRKIRPHNIATGDYPPRPQKQYPINPKAKPSIQIVIDDLLKQGVLTPQNSTMNTPVYPVPKPDGRWRMVLDYREVNKTIPLTAAQNQHSAGILATIVRQKYKTTLDLANGFWAHPITPESYWLTAFTWQGKQYCWTRLPQGFLNSPALFNADVVDLLKEIPNVQVYVDDIYLSHDDPKEHVQQLEKVFQILLQAGYVVSLKKSEIGQKTVEFLGFNITKEGRGLTDTFKTKLLNITPPKDLKQLQSILGKLNFARNFIPNFAELVQPLYNLIAPAKGKYIEWSEENTKQLNMVIEALNTASNLEERLPEQRLVIKVNTSPSAGYVRYYNETGKKPIMYLNYVFSKAELKFSMLEKLLTTMHKALIKAMDLAMGQEILVYSPIVSMTKIQKTPLPERKALPIRWITWMTYLEDPRIQFHYDKTLPELKHIPDVYTSSQSPVKHPSQYEGVFYTDGSAIKSPDPTKSNNAGMGIVHATYKPEYQVLNQWSIPLGNHTAQMAEIAAVEFACKKALKIPGPVLVITDSFYVAESANKELPYWKSNGFVNNKKKPLKHISKWKSIAECLSMKPDITIQHEKGISLQIPVFILKGNALADKLATQGSYVVNAGKRTADGSEFEKRTADGSEFESPKKKAKVE

SEQ ID NO: 6519 - protein, 2216 aa, synthetic construct
MPAAKRVKLDGGDKKYSIGLDIGTNSVGWAVITDEYKVPSKKFKVLGNTDRHSIKKNLIGALLFDSGETAEATRLKRTARRRYTRRKNRICYLQEIFSNEMAKVDDSFFHRLEESFLVEEDKKHERHPIFGNIVDEVAYHEKYPTIYHLRKKLVDSTDKADLRLIYLALAHMIKFRGHFLIEGDLNPDNSDVDKLFIQLVQTYNQLFEENPINASGVDAKAILSARLSKSRRLENLIAQLPGEKKNGLFGNLIALSLGLTPNFKSNFDLAEDAKLQLSKDTYDDDLDNLLAQIGDQYADLFLAAKNLSDAILLSDILRVNTEITKAPLSASMIKRYDEHHQDLTLLKALVRQQLPEKYKEIFFDQSKNGYAGYIDGGASQEEFYKFIKPILEKMDGTEELLVKLNREDLLRKQRTFDNGSIPHQIHLGELHAILRRQEDFYPFLKDNREKIEKILTFRIPYYVGPLARGNSRFAWMTRKSEETITPWNFEEVVDKGASAQSFIERMTNFDKNLPNEKVLPKHSLLYEYFTVYNELTKVKYVTEGMRKPAFLSGEQKKAIVDLLFKTNRKVTVKQLKEDYFKKIECFDSVEISGVEDRFNASLGTYHDLLKIIKDKDFLDNEENEDILEDIVLTLTLFEDREMIEERLKTYAHLFDDKVMKQLKRRRYTGWGRLSRKLINGIRDKQSGKTILDFLKSDGFANRNFMQLIHDDSLTFKEDIQKAQVSGQGDSLHEHIANLAGSPAIKKGILQTVKVVDELVKVMGRHKPENIVIEMARENQTTQKGQKNSRERMKRIEEGIKELGSQILKEHPVENTQLQNEKLYLYYLQNGRDMYVDQELDINRLSDYDVDHIVPQSFLKDDSIDNKVLTRSDKARGKSDNVPSEEVVKKMKNYWRQLLNAKLITQRKFDNLTKAERGGLSELDKAGFIKRQLVETRQITKHVAQILDSRMNTKYDENDKLIREVKVITLKSKLVSDFRKDFQFYKVREINNYHHAHDAYLNAVVGTALIKKYPKLESEFVYGDYKVYDVRKMIAKSEQEIGKATAKYFFYSNIMNFFKTEITLANGEIRKRPLIETNGETGEIVWDKGRDFATVRKVLSMPQVNIVKKTEVQTGGFSKESILPKRNSDKLIARKKDWDPKKYGGFDSPTVAYSVLVVAKVEKGKSKKLKSVKELLGITIMERSSFEKNPIDFLEAKGYKEVKKDLIIKLPKYSLFELENGRKRMLASAGELQKGNELALPSKYVNFLYLASHYEKLKGSPEDNEQKQLFVEQHKHYLDEIIEQISEFSKRVILADANLDKVLSAYNKHRDKPIREQAENIIHLFTLTNLGAPAAFKYFDTTIDRKRYTSTKEVLDATLIHQSITGLYETRIDLSQLGGDGGPAPAPAPAPGGTLGDQGSRGSDPLPEPRVTLTVEGIPTEFLVNTGAEHSVLTKPMGKMGSKRTVVAGATGSKVYPWTTKRLLKIGQKQVTHSFLVIPECPAPLLGRDLLTKLKAQIQFSTEGPQVTWEDRPAMCLVLNLEEEYRLHEKPVPPSIDPSWLQLFPMVWAEKAGMGLANQVPPVVVELKSDASPVAVRQYPMSKEAREGIRPHIQRFLDLGILVPCQSPWNTPLLPVKKPGTNDYRPVQDLREVNKRVQDIHPTVPNPYNLLSSLPPSHTWYSVLDLKDAFFCLKLHPNSQPLFAFEWRDPEKGNTGQLTWTRLPQGFKNSPTLFDEALHRDLASFRALNPQVVMLQYVDDLLVAAPTYRDCKEGTRRLLQELSKLGYRVSAKKAQLCREEVTYLGYLLKGGKRWLTPARKATVMKIPTPTTPRQVREFLGTAGFCRLWIPGFASLAAPLYPLTREKVPFTWTEAHQEAFGRIKEALLSAPALALPDLTKPFALYVDEKEGVARGVLTQTLGPWRRPVAYLSKKLDPVASGWPTCLKAIAAVALLLKDADKLTLGQNVLVIAPHNLESIVRQPPDRWMTNARMTHYQSLLLNERVSFAPPAILNPATLLPVESDDTPIHICSEILAEETGTRPDLRDQPLPGVPAWYTDGSSFIMDGRRQAGAAIVDNKRTVWASNLPEGTSAQKAELIALTQALRLAEGKSINIYTDSRYAFATAHVHGAIYKQRGLLTSAGKDIKNKEEILALLEAIHLPKRVAIIHCPGHQRGTDPVATGNRKADEAAKQAAQSTRILTETTKNAGKRTADGSEFEKRTADGSEFESPKKKAKVE

SEQ ID NO: 6520 - protein, 2125 aa, synthetic construct
MPAAKRVKLDGGDKKYSIGLDIGTNSVGWAVITDEYKVPSKKFKVLGNTDRHSIKKNLIGALLFDSGETAEATRLKRTARRRYTRRKNRICYLQEIFSNEMAKVDDSFFHRLEESFLVEEDKKHERHPIFGNIVDEVAYHEKYPTIYHLRKKLVDSTDKADLRLIYLALAHMIKFRGHFLIEGDLNPDNSDVDKLFIQLVQTYNQLFEENPINASGVDAKAILSARLSKSRRLENLIAQLPGEKKNGLFGNLIALSLGLTPNFKSNFDLAEDAKLQLSKDTYDDDLDNLLAQIGDQYADLFLAAKNLSDAILLSDILRVNTEITKAPLSASMIKRYDEHHQDLTLLKALVRQQLPEKYKEIFFDQSKNGYAGYIDGGASQEEFYKFIKPILEKMDGTEELLVKLNREDLLRKQRTFDNGSIPHQIHLGELHAILRRQEDFYPFLKDNREKIEKILTFRIPYYVGPLARGNSRFAWMTRKSEETITPWNFEEVVDKGASAQSFIERMTNFDKNLPNEKVLPKHSLLYEYFTVYNELTKVKYVTEGMRKPAFLSGEQKKAIVDLLFKTNRKVTVKQLKEDYFKKIECFDSVEISGVEDRFNASLGTYHDLLKIIKDKDFLDNEENEDILEDIVLTLTLFEDREMIEERLKTYAHLFDDKVMKQLKRRRYTGWGRLSRKLINGIRDKQSGKTILDFLKSDGFANRNFMQLIHDDSLTFKEDIQKAQVSGQGDSLHEHIANLAGSPAIKKGILQTVKVVDELVKVMGRHKPENIVIEMARENQTTQKGQKNSRERMKRIEEGIKELGSQILKEHPVENTQLQNEKLYLYYLQNGRDMYVDQELDINRLSDYDVDHIVPQSFLKDDSIDNKVLTRSDKARGKSDNVPSEEVVKKMKNYWRQLLNAKLITQRKFDNLTKAERGGLSELDKAGFIKRQLVETRQITKHVAQILDSRMNTKYDENDKLIREVKVITLKSKLVSDFRKDFQFYKVREINNYHHAHDAYLNAVVGTALIKKYPKLESEFVYGDYKVYDVRKMIAKSEQEIGKATAKYFFYSNIMNFFKTEITLANGEIRKRPLIETNGETGEIVWDKGRDFATVRKVLSMPQVNIVKKTEVQTGGFSKESILPKRNSDKLIARKKDWDPKKYGGFDSPTVAYSVLVVAKVEKGKSKKLKSVKELLGITIMERSSFEKNPIDFLEAKGYKEVKKDLIIKLPKYSLFELENGRKRMLASAGELQKGNELALPSKYVNFLYLASHYEKLKGSPEDNEQKQLFVEQHKHYLDEIIEQISEFSKRVILADANLDKVLSAYNKHRDKPIREQAENIIHLFTLTNLGAPAAFKYFDTTIDRKRYTSTKEVLDATLIHQSITGLYETRIDLSQLGGDGGPAPAPAPAPGGLLGRDLLTKLKAQIQFSTEGPQVTWEDRPAMCLVLNLEEEYRLHEKPVPPSIDPSWLQLFPMVWAEKAGMGLANQVPPVVVELKSDASPVAVRQYPMSKEAREGIRPHIQRFLDLGILVPCQSPWNTPLLPVKKPGTNDYRPVQDLREVNKRVQDIHPTVPNPYNLLSSLPPSHTWYSVLDLKDAFFCLKLHPNSQPLFAFEWRDPEKGNTGQLTWTRLPQGFKNSPTLFNEALHRDLASFRALNPQVVMLQYVDDLLVAAPTYRDCKEGTRRLLQELSKLGYRVSAKKAQLCREEVTYLGYLLKGGKRWLTPARKATVMKIPTPTTPRQVREFLGTAGFCRLWIPGFASLAAPLYPLTRPKVPFTWTEAHQEAFGRIKEALLSAPALALPDLTKPFALYVDEKEGVARGVLTQTLGPWRRPVAYLSKKLDPVASGWPTCLKAIAAVALLLKDADKLTLGQNVLVIAPHNLESIVRQPPDRWMTNARMTHYQSLLLNERVSFAPPAILNPATLLPVESDDTPIHICSEILAEETGTRPDLRDQPLPGVPAWYTDGSSFIMDGRRQAGAAIVDNKRTVWASNLPEGTSAQKAELIALTQALRLAEGKSINIYTDSRYAFATAHVHGAIYKQRGWLTSAGKDIKNKEEILALLEAIHLPKRVAIIHCPGHQRGTDPVATGNRKADEAAKQAAQSTRILTETTKNAGKRTADGSEFEKRTADGSEFESPKKKAKVE

SEQ ID NO: 6521 - protein, 2216 aa, synthetic construct
MPAAKRVKLDGGDKKYSIGLDIGTNSVGWAVITDEYKVPSKKFKVLGNTDRHSIKKNLIGALLFDSGETAEATRLKRTARRRYTRRKNRICYLQEIFSNEMAKVDDSFFHRLEESFLVEEDKKHERHPIFGNIVDEVAYHEKYPTIYHLRKKLVDSTDKADLRLIYLALAHMIKFRGHFLIEGDLNPDNSDVDKLFIQLVQTYNQLFEENPINASGVDAKAILSARLSKSRRLENLIAQLPGEKKNGLFGNLIALSLGLTPNFKSNFDLAEDAKLQLSKDTYDDDLDNLLAQIGDQYADLFLAAKNLSDAILLSDILRVNTEITKAPLSASMIKRYDEHHQDLTLLKALVRQQLPEKYKEIFFDQSKNGYAGYIDGGASQEEFYKFIKPILEKMDGTEELLVKLNREDLLRKQRTFDNGSIPHQIHLGELHAILRRQEDFYPFLKDNREKIEKILTFRIPYYVGPLARGNSRFAWMTRKSEETITPWNFEEVVDKGASAQSFIERMTNFDKNLPNEKVLPKHSLLYEYFTVYNELTKVKYVTEGMRKPAFLSGEQKKAIVDLLFKTNRKVTVKQLKEDYFKKIECFDSVEISGVEDRFNASLGTYHDLLKIIKDKDFLDNEENEDILEDIVLTLTLFEDREMIEERLKTYAHLFDDKVMKQLKRRRYTGWGRLSRKLINGIRDKQSGKTILDFLKSDGFANRNFMQLIHDDSLTFKEDIQKAQVSGQGDSLHEHIANLAGSPAIKKGILQTVKVVDELVKVMGRHKPENIVIEMARENQTTQKGQKNSRERMKRIEEGIKELGSQILKEHPVENTQLQNEKLYLYYLQNGRDMYVDQELDINRLSDYDVDHIVPQSFLKDDSIDNKVLTRSDKARGKSDNVPSEEVVKKMKNYWRQLLNAKLITQRKFDNLTKAERGGLSELDKAGFIKRQLVETRQITKHVAQILDSRMNTKYDENDKLIREVKVITLKSKLVSDFRKDFQFYKVREINNYHHAHDAYLNAVVGTALIKKYPKLESEFVYGDYKVYDVRKMIAKSEQEIGKATAKYFFYSNIMNFFKTEITLANGEIRKRPLIETNGETGEIVWDKGRDFATVRKVLSMPQVNIVKKTEVQTGGFSKESILPKRNSDKLIARKKDWDPKKYGGFDSPTVAYSVLVVAKVEKGKSKKLKSVKELLGITIMERSSFEKNPIDFLEAKGYKEVKKDLIIKLPKYSLFELENGRKRMLASAGELQKGNELALPSKYVNFLYLASHYEKLKGSPEDNEQKQLFVEQHKHYLDEIIEQISEFSKRVILADANLDKVLSAYNKHRDKPIREQAENIIHLFTLTNLGAPAAFKYFDTTIDRKRYTSTKEVLDATLIHQSITGLYETRIDLSQLGGDGGPAPAPAPAPGGTLGDQGSRGSDPLPEPRVTLTVEGIPTEFLVNTGAEHSVLTKPMGKMGSKRTVVAGATGSKVYPWTTKRLLKIGQKQVTHSFLVIPECPAPLLGRDLLTKLKAQIQFSTEGPQVTWEDRPAMCLVLNLEEEYRLHEKPVPPSIDPSWLQLFPMVWAEKAGMGLANQVPPVVVELKSDASPVAVRQYPMSKEAREGIRPHIQRFLDLGILVPCQSPWNTPLLPVKKPGTNDYRPVQDLREVNKRVQDIHPTVPNPYNLLSSLPPSHTWYSVLDLKDAFFCLKLHPNSQPLFAFEWRDPEKGNTGQLTWTRLPQGFKNSPTLFNEALHRDLASFRALNPQVVMLQYVDDLLVAAPTYRDCKEGTRRLLQELSKLGYRVSAKKAQLCREEVTYLGYLLKGGKRWLTPARKATVMKIPTPTTPRQVREFLGTAGFCRLWIPGFASLAAPLYPLTRPKVPFTWTEAHQEAFGRIKEALLSAPALALPDLTKPFALYVDEKEGVARGVLTQTLGPWRRPVAYLSKKLDPVASGWPTCLKAIAAVALLLKDADKLTLGQNVLVIAPHNLESIVRQPPDRWMTNARMTHYQSLLLNERVSFAPPAILNPATLLPVESDDTPIHICSEILAEETGTRPDLRDQPLPGVPAWYTDGSSFIMDGRRQAGAAIVDNKRTVWASNLPEGTSAQKAELIALTQALRLAEGKSINIYTDSRYAFATAHVHGAIYKQRGWLTSAGKDIKNKEEILALLEAIHLPKRVAIIHCPGHQRGTDPVATGNRKADEAAKQAAQSTRILTETTKNAGKRTADGSEFEKRTADGSEFESPKKKAKVE

SEQ ID NO: 6522 - protein, 2094 aa, synthetic construct
MPAAKRVKLDGGDKKYSIGLDIGTNSVGWAVITDEYKVPSKKFKVLGNTDRHSIKKNLIGALLFDSGETAEATRLKRTARRRYTRRKNRICYLQEIFSNEMAKVDDSFFHRLEESFLVEEDKKHERHPIFGNIVDEVAYHEKYPTIYHLRKKLVDSTDKADLRLIYLALAHMIKFRGHFLIEGDLNPDNSDVDKLFIQLVQTYNQLFEENPINASGVDAKAILSARLSKSRRLENLIAQLPGEKKNGLFGNLIALSLGLTPNFKSNFDLAEDAKLQLSKDTYDDDLDNLLAQIGDQYADLFLAAKNLSDAILLSDILRVNTEITKAPLSASMIKRYDEHHQDLTLLKALVRQQLPEKYKEIFFDQSKNGYAGYIDGGASQEEFYKFIKPILEKMDGTEELLVKLNREDLLRKQRTFDNGSIPHQIHLGELHAILRRQEDFYPFLKDNREKIEKILTFRIPYYVGPLARGNSRFAWMTRKSEETITPWNFEEVVDKGASAQSFIERMTNFDKNLPNEKVLPKHSLLYEYFTVYNELTKVKYVTEGMRKPAFLSGEQKKAIVDLLFKTNRKVTVKQLKEDYFKKIECFDSVEISGVEDRFNASLGTYHDLLKIIKDKDFLDNEENEDILEDIVLTLTLFEDREMIEERLKTYAHLFDDKVMKQLKRRRYTGWGRLSRKLINGIRDKQSGKTILDFLKSDGFANRNFMQLIHDDSLTFKEDIQKAQVSGQGDSLHEHIANLAGSPAIKKGILQTVKVVDELVKVMGRHKPENIVIEMARENQTTQKGQKNSRERMKRIEEGIKELGSQILKEHPVENTQLQNEKLYLYYLQNGRDMYVDQELDINRLSDYDVDHIVPQSFLKDDSIDNKVLTRSDKARGKSDNVPSEEVVKKMKNYWRQLLNAKLITQRKFDNLTKAERGGLSELDKAGFIKRQLVETRQITKHVAQILDSRMNTKYDENDKLIREVKVITLKSKLVSDFRKDFQFYKVREINNYHHAHDAYLNAVVGTALIKKYPKLESEFVYGDYKVYDVRKMIAKSEQEIGKATAKYFFYSNIMNFFKTEITLANGEIRKRPLIETNGETGEIVWDKGRDFATVRKVLSMPQVNIVKKTEVQTGGFSKESILPKRNSDKLIARKKDWDPKKYGGFDSPTVAYSVLVVAKVEKGKSKKLKSVKELLGITIMERSSFEKNPIDFLEAKGYKEVKKDLIIKLPKYSLFELENGRKRMLASAGELQKGNELALPSKYVNFLYLASHYEKLKGSPEDNEQKQLFVEQHKHYLDEIIEQISEFSKRVILADANLDKVLSAYNKHRDKPIREQAENIIHLFTLTNLGAPAAFKYFDTTIDRKRYTSTKEVLDATLIHQSITGLYETRIDLSQLGGDGGPAPAPAPAPGGLGIEDEYRLHETSTEPDVSLGSTWLSDFPQAWAETGGMGLAVRQAPLIIPLKATSTPVSIQQYPMSHEARLGIKPHIQRLLDQGILVPCQSPWNTPLLPVKKPGTNDYRPVQDLREVNKRVEDIHPTVPNPYNLLSGLPPSHQWYTVLDLKDAFFCLRLHPTSQPLFAFEWRDPGMGISGQLTWTRLPQGFKNSPTLFNEALHRDLADFRIQHPDLILLQYVDDILLAATSELDCQQGTRALLQTLGDLGYRASAKKAQICQKQVKYLGYLLREGQRWLTEARKETVMGQPVPKTPRQLREFLGKAGFCRLFIPGFAEMAAPLYPLTKPGTLFSWGPDQQKAYQEIKQALLTAPALGLPDLTKPFELFVDEKQGYAKGVLTQKLGPWRRPVAYLSKKLDPVAAGWPPCLRMVAAIAVLTKDAGKLTMGQPLVILAPHAVEALVKQPPDRWLSNARMTHYQAMLLDTDRVQFGPVVALNPATLLPLPEEGAPHDCLEILAETHGTRPDLTDQPIPDADHTWYTDGSSFLQEGQRKAGAAVTTETEVIWAGALPAGTSAQRAELIALTQALKMAEGKRLNVYTDSRYAFATAHIHGEIYRRRGWLTSEGREIKNKSEILALLKALFLPKRLSIIHCLGHQKGDSAEARGNRLADQAAREAAIKTPPDTSTLLIAGKRTADGSEFEKRTADGSEFESPKKKAKVE

SEQ ID NO: 6523 - protein, 2094 aa, synthetic construct; identical to SEQ ID NO: 6522

SEQ ID NO: 6524 - protein, 2094 aa, synthetic construct
MPAAKRVKLDGGDKKYSIGLDIGTNSVGWAVITDEYKVPSKKFKVLGNTDRHSIKKNLIGALLFDSGETAEATRLKRTARRRYTRRKNRICYLQEIFSNEMAKVDDSFFHRLEESFLVEEDKKHERHPIFGNIVDEVAYHEKYPTIYHLRKKLVDSTDKADLRLIYLALAHMIKFRGHFLIEGDLNPDNSDVDKLFIQLVQTYNQLFEENPINASGVDAKAILSARLSKSRRLENLIAQLPGEKKNGLFGNLIALSLGLTPNFKSNFDLAEDAKLQLSKDTYDDDLDNLLAQIGDQYADLFLAAKNLSDAILLSDILRVNTEITKAPLSASMIKRYDEHHQDLTLLKALVRQQLPEKYKEIFFDQSKNGYAGYIDGGASQEEFYKFIKPILEKMDGTEELLVKLNREDLLRKQRTFDNGSIPHQIHLGELHAILRRQEDFYPFLKDNREKIEKILTFRIPYYVGPLARGNSRFAWMTRKSEETITPWNFEEVVDKGASAQSFIERMTNFDKNLPNEKVLPKHSLLYEYFTVYNELTKVKYVTEGMRKPAFLSGEQKKAIVDLLFKTNRKVTVKQLKEDYFKKIECFDSVEISGVEDRFNASLGTYHDLLKIIKDKDFLDNEENEDILEDIVLTLTLFEDREMIEERLKTYAHLFDDKVMKQLKRRRYTGWGRLSRKLINGIRDKQSGKTILDFLKSDGFANRNFMQLIHDDSLTFKEDIQKAQVSGQGDSLHEHIANLAGSPAIKKGILQTVKVVDELVKVMGRHKPENIVIEMARENQTTQKGQKNSRERMKRIEEGIKELGSQILKEHPVENTQLQNEKLYLYYLQNGRDMYVDQELDINRLSDYDVDHIVPQSFLKDDSIDNKVLTRSDKARGKSDNVPSEEVVKKMKNYWRQLLNAKLITQRKFDNLTKAERGGLSELDKAGFIKRQLVETRQITKHVAQILDSRMNTKYDENDKLIREVKVITLKSKLVSDFRKDFQFYKVREINNYHHAHDAYLNAVVGTALIKKYPKLESEFVYGDYKVYDVRKMIAKSEQEIGKATAKYFFYSNIMNFFKTEITLANGEIRKRPLIETNGETGEIVWDKGRDFATVRKVLSMPQVNIVKKTEVQTGGFSKESILPKRNSDKLIARKKDWDPKKYGGFDSPTVAYSVLVVAKVEKGKSKKLKSVKELLGITIMERSSFEKNPIDFLEAKGYKEVKKDLIIKLPKYSLFELENGRKRMLASAGELQKGNELALPSKYVNFLYLASHYEKLKGSPEDNEQKQLFVEQHKHYLDEIIEQISEFSKRVILADANLDKVLSAYNKHRDKPIREQAENIIHLFTLTNLGAPAAFKYFDTTIDRKRYTSTKEVLDATLIHQSITGLYETRIDLSQLGGDGGPAPAPAPAPGGTLNIEDEHRLHETSKEPDVSLGSTWLSDFPQAWAETGGMGLAVRQAPLIIPLKATSTPVSIKQYPMSQEARLGIKPHIQRLLDQGILVPCQSPWNTPLLPVKKPGTNDYRPVQDLREVNKRVEDIHPTVPNPYNLLSGLPPSHQWYTVLDLKDAFFCLRLHPTSQPLFAFEWRDPEMGISGQLTWTRLPQGFKNSPTLFDEALHRDLADFRIQHPDLILLQYVDDLLLAATSELDCQQGTRALLQTLGNLGYRASAKKAQICQKQVKYLGYLLKEGQRWLTEARKETVMGQPTPKTPRQLREFLGTAGFCRLWIPGFAEMAAPLYPLTKTGTLFNWGPDQQKAYQEIKQALLTAPALGLPDLTKPFELFVDEKQGYAKGVLTQKLGPWRRPVAYLSKKLDPVAAGWPPCLRMVAAIAVLTKDAGKLTMGQPLVILAPHAVEALVKQPPDRWLSNARMTHYQALLLDTDRVQFGPVVALNPATLLPLPEEGLQHNCLDILAEAHGTRPDLTDQPLPDADHTWYTDGSSLLQEGQRKAGAAVTTETEVIWAKALPAGTSAQRAELIALTQALKMAEGKKLNVYTDSRYAFATAHIHGEIYRRRGLLTSEGKEIKNKDEILALLKALFLPKRLSIIHCPGHQKGHSAEARGNRMADQAARKAAITETPDTSTLLAGKRTADGSEFEKRTADGSEFESPKKKAKVE

SEQ ID NO: 6525 - protein, 2086 aa, synthetic construct
MPAAKRVKLDGGDKKYSIGLDIGTNSVGWAVITDEYKVPSKKFKVLGNTDRHSIKKNLIGALLFDSGETAEATRLKRTARRRYTRRKNRICYLQEIFSNEMAKVDDSFFHRLEESFLVEEDKKHERHPIFGNIVDEVAYHEKYPTIYHLRKKLVDSTDKADLRLIYLALAHMIKFRGHFLIEGDLNPDNSDVDKLFIQLVQTYNQLFEENPINASGVDAKAILSARLSKSRRLENLIAQLPGEKKNGLFGNLIALSLGLTPNFKSNFDLAEDAKLQLSKDTYDDDLDNLLAQIGDQYADLFLAAKNLSDAILLSDILRVNTEITKAPLSASMIKRYDEHHQDLTLLKALVRQQLPEKYKEIFFDQSKNGYAGYIDGGASQEEFYKFIKPILEKMDGTEELLVKLNREDLLRKQRTFDNGSIPHQIHLGELHAILRRQEDFYPFLKDNREKIEKILTFRIPYYVGPLARGNSRFAWMTRKSEETITPWNFEEVVDKGASAQSFIERMTNFDKNLPNEKVLPKHSLLYEYFTVYNELTKVKYVTEGMRKPAFLSGEQKKAIVDLLFKTNRKVTVKQLKEDYFKKIECFDSVEISGVEDRFNASLGTYHDLLKIIKDKDFLDNEENEDILEDIVLTLTLFEDREMIEERLKTYAHLFDDKVMKQLKRRRYTGWGRLSRKLINGIRDKQSGKTILDFLKSDGFANRNFMQLIHDDSLTFKEDIQKAQVSGQGDSLHEHIANLAGSPAIKKGILQTVKVVDELVKVMGRHKPENIVIEMARENQTTQKGQKNSRERMKRIEEGIKELGSQILKEHPVENTQLQNEKLYLYYLQNGRDMYVDQELDINRLSDYDVDHIVPQSFLKDDSIDNKVLTRSDKARGKSDNVPSEEVVKKMKNYWRQLLNAKLITQRKFDNLTKAERGGLSELDKAGFIKRQLVETRQITKHVAQILDSRMNTKYDENDKLIREVKVITLKSKLVSDFRKDFQFYKVREINNYHHAHDAYLNAVVGTALIKKYPKLESEFVYGDYKVYDVRKMIAKSEQEIGKATAKYFFYSNIMNFFKTEITLANGEIRKRPLIETNGETGEIVWDKGRDFATVRKVLSMPQVNIVKKTEVQTGGFSKESILPKRNSDKLIARKKDWDPKKYGGFDSPTVAYSVLVVAKVEKGKSKKLKSVKELLGITIMERSSFEKNPIDFLEAKGYKEVKKDLIIKLPKYSLFELENGRKRMLASAGELQKGNELALPSKYVNFLYLASHYEKLKGSPEDNEQKQLFVEQHKHYLDEIIEQISEFSKRVILADANLDKVLSAYNKHRDKPIREQAENIIHLFTLTNLGAPAAFKYFDTTIDRKRYTSTKEVLDATLIHQSITGLYETRIDLSQLGGDGGPAPAPAPAPGGLDDEYRLYSPLVKPDQNIQFWLEQFPQAWAETAGMGLAKQVPPQVIQLKASATPVSVRQYPLSKEAQEGIRPHVQRLIQQGILVPVQSPWNTPLLPVRKPGTNDYRPVQDLREVNKRVQDIHPTVPNPYNLLCALPPQRSWYTVLDLKDAFFCLRLHPTSQPLFAFEWRDPGTGRTGQLTWTRLPQGFKNSPTIFNEALHRDLANFRIQHPQVTLLQYVDDLLLAGATKQDCLEGTKALLLELSDLGYRASAKKAQICRREVTYLGYSLRDGQRWLTEARKKTVVQIPAPTTAKQVREFLGKAGFCRLFIPGFATLAAPLYPLTKPKGEFSWAPEHQKAFDAIKKALLSAPALALPDVTKPFTLYVDERKGVARGVLTQTLGPWRRPVAYLSKKLDPVASGWPVCLKAIAAVAILVKDADKLTLGQNITVIAPHALENIVRQPPDRWMTNARMTHYQSLLLTERVTFAPPAALNPATLLPEETDEPVTHDCHQLLIEETGVRKDLTDIPLTGEVLTWFTDGSSYVVEGKRMAGAAVVDGTRTIWASSLPEGTSAQKAELMALTQALRLAEGKSINIYTDSRYAFATAHVHGAIYKQRGWLTSAGREIKNKEEILSLLEALHLPKRLAIIHCPGHQKAKDPISRGNQMADRVAKQAAQGVNLLPAGKRTADGSEFEKRTADGSEFESPKKKAKVE

SEQ ID NO: 6526 - protein, 2088 aa, synthetic construct
MPAAKRVKLDGGDKKYSIGLDIGTNSVGWAVITDEYKVPSKKFKVLGNTDRHSIKKNLIGALLFDSGETAEATRLKRTARRRYTRRKNRICYLQEIFSNEMAKVDDSFFHRLEESFLVEEDKKHERHPIFGNIVDEVAYHEKYPTIYHLRKKLVDSTDKADLRLIYLALAHMIKFRGHFLIEGDLNPDNSDVDKLFIQLVQTYNQLFEENPINASGVDAKAILSARLSKSRRLENLIAQLPGEKKNGLFGNLIALSLGLTPNFKSNFDLAEDAKLQLSKDTYDDDLDNLLAQIGDQYADLFLAAKNLSDAILLSDILRVNTEITKAPLSASMIKRYDEHHQDLTLLKALVRQQLPEKYKEIFFDQSKNGYAGYIDGGASQEEFYKFIKPILEKMDGTEELLVKLNREDLLRKQRTFDNGSIPHQIHLGELHAILRRQEDFYPFLKDNREKIEKILTFRIPYYVGPLARGNSRFAWMTRKSEETITPWNFEEVVDKGASAQSFIERMTNFDKNLPNEKVLPKHSLLYEYFTVYNELTKVKYVTEGMRKPAFLSGEQKKAIVDLLFKTNRKVTVKQLKEDYFKKIECFDSVEISGVEDRFNASLGTYHDLLKIIKDKDFLDNEENEDILEDIVLTLTLFEDREMIEERLKTYAHLFDDKVMKQLKRRRYTGWGRLSRKLINGIRDKQSGKTILDFLKSDGFANRNFMQLIHDDSLTFKEDIQKAQVSGQGDSLHEHIANLAGSPAIKKGILQTVKVVDELVKVMGRHKPENIVIEMARENQTTQKGQKNSRERMKRIEEGIKELGSQILKEHPVENTQLQNEKLYLYYLQNGRDMYVDQELDINRLSDYDVDHIVPQSFLKDDSIDNKVLTRSDKARGKSDNVPSEEVVKKMKNYWRQLLNAKLITQRKFDNLTKAERGGLSELDKAGFIKRQLVETRQITKHVAQILDSRMNTKYDENDKLIREVKVITLKSKLVSDFRKDFQFYKVREINNYHHAHDAYLNAVVGTALIKKYPKLESEFVYGDYKVYDVRKMIAKSEQEIGKATAKYFFYSNIMNFFKTEITLANGEIRKRPLIETNGETGEIVWDKGRDFATVRKVLSMPQVNIVKKTEVQTGGFSKESILPKRNSDKLIARKKDWDPKKYGGFDSPTVAYSVLVVAKVEKGKSKKLKSVKELLGITIMERSSFEKNPIDFLEAKGYKEVKKDLIIKLPKYSLFELENGRKRMLASAGELQKGNELALPSKYVNFLYLASHYEKLKGSPEDNEQKQLFVEQHKHYLDEIIEQISEFSKRVILADANLDKVLSAYNKHRDKPIREQAENIIHLFTLTNLGAPAAFKYFDTTIDRKRYTSTKEVLDATLIHQSITGLYETRIDLSQLGGDGGPAPAPAPAPGGTLQLDDEYRLYSPLVKPDQNIQFWLEQFPQAWAETAGMGLAKQVPPQVIQLKASATPVSVRQYPLSKEAQEGIRPHVQRLIQQGILVPVQSPWNTPLLPVRKPGTNDYRPVQDLREVNKRVQDIHPTVPNPYNLLCALPPQRSWYTVLDLKDAFFCLRLHPTSQPLFAFEWRDPGTGRTGQLTWTRLPQGFKNSPTIFDEALHRDLANFRIQHPQVTLLQYVDDLLLAGATKQDCLEGTKALLLELSDLGYRASAKKAQICRREVTYLGYSLRDGQRWLTEARKKTVVQIPAPTTAKQVREFLGTAGFCRLWIPGFATLAAPLYPLTKEKGEFSWAPEHQKAFDAIKKALLSAPALALPDVTKPFTLYVDERKGVARGVLTQTLGPWRRPVAYLSKKLDPVASGWPVCLKAIAAVAILVKDADKLTLGQNITVIAPHALENIVRQPPDRWMTNARMTHYQSLLLTERVTFAPPAALNPATLLPEETDEPVTHDCHQLLIEETGVRKDLTDIPLTGEVLTWFTDGSSYVVEGKRMAGAAVVDGTRTIWASSLPEGTSAQKAELMALTQALRLAEGKSINIYTDSRYAFATAHVHGAIYKQRGLLTSAGREIKNKEEILSLLEALHLPKRLAIIHCPGHQKAKDPISRGNQMADRVAKQAAQGVNLLAGKRTADGSEFEKRTADGSEFESPKKKAKVE

SEQ ID NO: 6527 - protein, 2086 aa, synthetic construct; identical to SEQ ID NO: 6525

SEQ ID NO: 6528 - protein, 2088 aa, synthetic construct; identical to SEQ ID NO: 6526

SEQ ID NO: 6529 - protein, 2085 aa, synthetic construct
MPAAKRVKLDGGDKKYSIGLDIGTNSVGWAVITDEYKVPSKKFKVLGNTDRHSIKKNLIGALLFDSGETAEATRLKRTARRRYTRRKNRICYLQEIFSNEMAKVDDSFFHRLEESFLVEEDKKHERHPIFGNIVDEVAYHEKYPTIYHLRKKLVDSTDKADLRLIYLALAHMIKFRGHFLIEGDLNPDNSDVDKLFIQLVQTYNQLFEENPINASGVDAKAILSARLSKSRRLENLIAQLPGEKKNGLFGNLIALSLGLTPNFKSNFDLAEDAKLQLSKDTYDDDLDNLLAQIGDQYADLFLAAKNLSDAILLSDILRVNTEITKAPLSASMIKRYDEHHQDLTLLKALVRQQLPEKYKEIFFDQSKNGYAGYIDGGASQEEFYKFIKPILEKMDGTEELLVKLNREDLLRKQRTFDNGSIPHQIHLGELHAILRRQEDFYPFLKDNREKIEKILTFRIPYYVGPLARGNSRFAWMTRKSEETITPWNFEEVVDKGASAQSFIERMTNFDKNLPNEKVLPKHSLLYEYFTVYNELTKVKYVTEGMRKPAFLSGEQKKAIVDLLFKTNRKVTVKQLKEDYFKKIECFDSVEISGVEDRFNASLGTYHDLLKIIKDKDFLDNEENEDILEDIVLTLTLFEDREMIEERLKTYAHLFDDKVMKQLKRRRYTGWGRLSRKLINGIRDKQSGKTILDFLKSDGFANRNFMQLIHDDSLTFKEDIQKAQVSGQGDSLHEHIANLAGSPAIKKGILQTVKVVDELVKVMGRHKPENIVIEMARENQTTQKGQKNSRERMKRIEEGIKELGSQILKEHPVENTQLQNEKLYLYYLQNGRDMYVDQELDINRLSDYDVDHIVPQSFLKDDSIDNKVLTRSDKARGKSDNVPSEEVVKKMKNYWRQLLNAKLITQRKFDNLTKAERGGLSELDKAGFIKRQLVETRQITKHVAQILDSRMNTKYDENDKLIREVKVITLKSKLVSDFRKDFQFYKVREINNYHHAHDAYLNAVVGTALIKKYPKLESEFVYGDYKVYDVRKMIAKSEQEIGKATAKYFFYSNIMNFFKTEITLANGEIRKRPLIETNGETGEIVWDKGRDFATVRKVLSMPQVNIVKKTEVQTGGFSKESILPKRNSDKLIARKKDWDPKKYGGFDSPTVAYSVLVVAKVEKGKSKKLKSVKELLGITIMERSSFEKNPIDFLEAKGYKEVKKDLIIKLPKYSLFELENGRKRMLASAGELQKGNELALPSKYVNFLYLASHYEKLKGSPEDNEQKQLFVEQHKHYLDEIIEQISEFSKRVILADANLDKVLSAYNKHRDKPIREQAENIIHLFTLTNLGAPAAFKYFDTTIDRKRYTSTKEVLDATLIHQSITGLYETRIDLSQLGGDGGPAPAPAPAPGGIPWLMKKPLQLTTLVPLQEYEERLLKQTMLTGSYKEKLQSLFLKYDALWQHWENQVGHRRIKPHHIATGTVNPRPQKQYPINPKAKASIQTVINDLLKQGVLIQQNSIMNTPVYPVPKPDGKWRMVLDYREVNKTIPLIAAQNQHSAGILSSIFRGKYKTTLDLSNGFWAHSITPESYWLTAFTWLGQQYCWTRLPQGFLNSPALFNADVVDLLKEVPNVQVYVDDIYISHDDPREHLEQLEKVFSLLLNAGYVVSLKKSEIAQHEVEFLGFNITKEGRGLTETFKQKLLNITPPRDLKQLQSILGKLNFARNFIPNFSELVKPLYNIIATAPGKYITWTTDNSQQLQNIISMLNSAENLEERNPEVRLIMKVNTSPSAGYIRFYNEFAKRPIMYLNYVYTKAEVKFTNTEKLLTTIHKGLIKALDLGMGQEILVYSPIVSMTKIQKTPLPERKALPIRWITWMSYLEDPRIQFHYDKTLPELQQVPTVTDDIIAKIKHPSEFSMVFYTDGSAIKHPNVNKSHNAGMGIAQVQFKPEFTVINTWSIPLGDHTAQLAEVAAVEFACKKALKIDGPVLIVTDSFYVAESVNKELPYWQSNGFFNNKKKPLKHVSKWKSIADCIQLKPDIIIIHEKGHQPTASTFHTEGNNLADKLATQGSYVVNAGKRTADGSEFEKRTADGSEFESPKKKAKVE

SEQ ID NO: 6530 - protein, 2098 aa, synthetic construct
MPAAKRVKLDGGDKKYSIGLDIGTNSVGWAVITDEYKVPSKKFKVLGNTDRHSIKKNLIGALLFDSGETAEATRLKRTARRRYTRRKNRICYLQEIFSNEMAKVDDSFFHRLEESFLVEEDKKHERHPIFGNIVDEVAYHEKYPTIYHLRKKLVDSTDKADLRLIYLALAHMIKFRGHFLIEGDLNPDNSDVDKLFIQLVQTYNQLFEENPINASGVDAKAILSARLSKSRRLENLIAQLPGEKKNGLFGNLIALSLGLTPNFKSNFDLAEDAKLQLSKDTYDDDLDNLLAQIGDQYADLFLAAKNLSDAILLSDILRVNTEITKAPLSASMIKRYDEHHQDLTLLKALVRQQLPEKYKEIFFDQSKNGYAGYIDGGASQEEFYKFIKPILEKMDGTEELLVKLNREDLLRKQRTFDNGSIPHQIHLGELHAILRRQEDFYPFLKDNREKIEKILTFRIPYYVGPLARGNSRFAWMTRKSEETITPWNFEEVVDKGASAQSFIERMTNFDKNLPNEKVLPKHSLLYEYFTVYNELTKVKYVTEGMRKPAFLSGEQKKAIVDLLFKTNRKVTVKQLKEDYFKKIECFDSVEISGVEDRFNASLGTYHDLLKIIKDKDFLDNEENEDILEDIVLTLTLFEDREMIEERLKTYAHLFDDKVMKQLKRRRYTGWGRLSRKLINGIRDKQSGKTILDFLKSDGFANRNFMQLIHDDSLTFKEDIQKAQVSGQGDSLHEHIANLAGSPAIKKGILQTVKVVDELVKVMGRHKPENIVIEMARENQTTQKGQKNSRERMKRIEEGIKELGSQILKEHPVENTQLQNEKLYLYYLQNGRDMYVDQELDINRLSDYDVDHIVPQSFLKDDSIDNKVLTRSDKARGKSDNVPSEEVVKKMKNYWRQLLNAKLITQRKFDNLTKAERGGLSELDKAGFIKRQLVETRQITKHVAQILDSRMNTKYDENDKLIREVKVITLKSKLVSDFRKDFQFYKVREINNYHHAHDAYLNAVVGTALIKKYPKLESEFVYGDYKVYDVRKMIAKSEQEIGKATAKYFFYSNIMNFFKTEITLANGEIRKRPLIETNGETGEIVWDKGRDFATVRKVLSMPQVNIVKKTEVQTGGFSKESILPKRNSDKLIARKKDWDPKKYGGFDSPTVAYSVLVVAKVEKGKSKKLKSVKELLGITIMERSSFEKNPIDFLEAKGYKEVKKDLIIKLPKYSLFELENGRKRMLASAGELQKGNELALPSKYVNFLYLASHYEKLKGSPEDNEQKQLFVEQHKHYLDEIIEQISEFSKRVILADANLDKVLSAYNKHRDKPIREQAENIIHLFTLTNLGAPAAFKYFDTTIDRKRYTSTKEVLDATLIHQSITGLYETRIDLSQLGGDGGPAPAPAPAPAPGGTAPLEEEYRLFLEAPIQNVTLLEQWKREIPKVWAEINPPGLASTQAPIHVQLLSTALPVRVRQYPITLEAKRSLRETIRKFRAAGILRPVHSPWNTPLLPVRKSGTSEYRMVQDLREVNKRVETIHPTVPNPYTLLSLLPPDRIWYSVLDLKDAFFCIPLAPESQLIFAFEWADAEEGESGQLTWTRLPQGFKNSPTLFNEALNRDLQGFRLDHPSVSLLQYVDDLLIAADTQAACLSATRDLLMTLAELGYRVSGKKAQLCQEEVTYLGFKIHKGSRSLSNSRTQAILQIPVPKTKRQVREFLGTIGYCRLWIPGFAELAQPLYAATRPGNDPLVWGEKEEEAFQSLKLALTQPPALALPSLDKPFQLFVEETSGAAKGVLTQALGPWKRPVAYLSKRLDPVAAGWPRCLRAIAAAALLTREASKLTFGQDIEITSSHNLESLLRSPPDKWLTNARITQYQVLLLDPPRVRFKQTAALNPATLLPETDDTLPIHHCLDTLDSLTSTRPDLTDQPLAQAEATLFTDGSSYIRDGKRYAGAAVVTLDSVIWAEPLPIGTSAQKAELIALTKALEWSKDKSVNIYTDSRYAFATLHVHGMIYRERGWLTAGGKAIKNAPEILALLTAVWLPKRVAVMHCKGHQKDDAPTSTGNRRADEVAREVAIRPLSTQATISAGKRTADGSEFEKRTADGSEFESPKKKAKVE

SEQ ID NO: 6531 - protein, 2098 aa, synthetic construct
MPAAKRVKLDGGDKKYSIGLDIGTNSVGWAVITDEYKVPSKKFKVLGNTDRHSIKKNLIGALLFDSGETAEATRLKRTARRRYTRRKNRICYLQEIFSNEMAKVDDSFFHRLEESFLVEEDKKHERHPIFGNIVDEVAYHEKYPTIYHLRKKLVDSTDKADLRLIYLALAHMIKFRGHFLIEGDLNPDNSDVDKLFIQLVQTYNQLFEENPINASGVDAKAILSARLSKSRRLENLIAQLPGEKKNGLFGNLIALSLGLTPNFKSNFDLAEDAKLQLSKDTYDDDLDNLLAQIGDQYADLFLAAKNLSDAILLSDILRVNTEITKAPLSASMIKRYDEHHQDLTLLKALVRQQLPEKYKEIFFDQSKNGYAGYIDGGASQEEFYKFIKPILEKMDGTEELLVKLNREDLLRKQRTFDNGSIPHQIHLGELHAILRRQEDFYPFLKDNREKIEKILTFRIPYYVGPLARGNSRFAWMTRKSEETITPWNFEEVVDKGASAQSFIERMTNFDKNLPNEKVLPKHSLLYEYFTVYNELTKVKYVTEGMRKPAFLSGEQKKAIVDLLFKTNRKVTVKQLKEDYFKKIECFDSVEISGVEDRFNASLGTYHDLLKIIKDKDFLDNEENEDILEDIVLTLTLFEDREMIEERLKTYAHLFDDKVMKQLKRRRYTGWGRLSRKLINGIRDKQSGKTILDFLKSDGFANRNFMQLIHDDSLTFKEDIQKAQVSGQGDSLHEHIANLAGSPAIKKGILQTVKVVDELVKVMGRHKPENIVIEMARENQTTQKGQKNSRERMKRIEEGIKELGSQILKEHPVENTQLQNEKLYLYYLQNGRDMYVDQELDINRLSDYDVDHIVPQSFLKDDSIDNKVLTRSDKARGKSDNVPSEEVVKKMKNYWRQLLNAKLITQRKFDNLTKAERGGLSELDKAGFIKRQLVETRQITKHVAQILDSRMNTKYDENDKLIREVKVITLKSKLVSDFRKDFQFYKVREINNYHHAHDAYLNAVVGTALIKKYPKLESEFVYGDYKVYDVRKMIAKSEQEIGKATAKYFFYSNIMNFFKTEITLANGEIRKRPLIETNGETGEIVWDKGRDFATVRKVLSMPQVNIVKKTEVQTGGFSKESILPKRNSDKLIARKKDWDPKKYGGFDSPTVAYSVLVVAKVEKGKSKKLKSVKELLGITIMERSSFEKNPIDFLEAKGYKEVKKDLIIKLPKYSLFELENGRKRMLASAGELQKGNELALPSKYVNFLYLASHYEKLKGSPEDNEQKQLFVEQHKHYLDEIIEQISEFSKRVILADANLDKVLSAYNKHRDKPIREQAENIIHLFTLTNLGAPAAFKYFDTTIDRKRYTSTKEVLDATLIHQSITGLYETRIDLSQLGGDGGPAPAPAPAPAPGGTAPLEEEYRLFLEAPIQNVTLLEQWKREIPKVWAEINPPGLASTQAPIHVQLLSTALPVRVRQYPITLEAKRSLRETIRKFRAAGILRPVHSPWNTPLLPVRKSGTSEYRMVQDLREVNKRVETIHPTVPNPYTLLSLLPPDRIWYSVLDLKDAFFCIPLAPESQLIFAFEWADAEEGESGQLTWTRLPQGFKNSPTLFNEALNRDLQGFRLDHPSVSLLQYVDDLLIAADTQAACLSATRDLLMTLAELGYRVSGKKAQLCQEEVTYLGFKIHKGSRSLSNSRTQAILQIPVPKTKRQVREFLGKIGYCRLFIPGFAELAQPLYAATRPGNDPLVWGEKEEEAFQSLKLALTQPPALALPSLDKPFQLFVEETSGAAKGVLTQALGPWKRPVAYLSKRLDPVAAGWPRCLRAIAAAALLTREASKLTFGQDIEITSSHNLESLLRSPPDKWLTNARITQYQVLLLDPPRVRFKQTAALNPATLLPETDDTLPIHHCLDTLDSLTSTRPDLTDQPLAQAEATLFTDGSSYIRDGKRYAGAAVVTLDSVIWAEPLPIGTSAQKAELIALTKALEWSKDKSVNIYTDSRYAFATLHVHGMIYRERGWLTAGGKAIKNAPEILALLTAVWLPKRVAVMHCKGHQKDDAPTSTGNRRADEVAREVAIRPLSTQATISAGKRTADGSEFEKRTADGSEFESPKKKAKVE

SEQ ID NO: 6532 - protein, 2102 aa, synthetic construct
MPAAKRVKLDGGDKKYSIGLDIGTNSVGWAVITDEYKVPSKKFKVLGNTDRHSIKKNLIGALLFDSGETAEATRLKRTARRRYTRRKNRICYLQEIFSNEMAKVDDSFFHRLEESFLVEEDKKHERHPIFGNIVDEVAYHEKYPTIYHLRKKLVDSTDKADLRLIYLALAHMIKFRGHFLIEGDLNPDNSDVDKLFIQLVQTYNQLFEENPINASGVDAKAILSARLSKSRRLENLIAQLPGEKKNGLFGNLIALSLGLTPNFKSNFDLAEDAKLQLSKDTYDDDLDNLLAQIGDQYADLFLAAKNLSDAILLSDILRVNTEITKAPLSASMIKRYDEHHQDLTLLKALVRQQLPEKYKEIFFDQSKNGYAGYIDGGASQEEFYKFIKPILEKMDGTEELLVKLNREDLLRKQRTFDNGSIPHQIHLGELHAILRRQEDFYPFLKDNREKIEKILTFRIPYYVGPLARGNSRFAWMTRKSEETITPWNFEEVVDKGASAQSFIERMTNFDKNLPNEKVLPKHSLLYEYFTVYNELTKVKYVTEGMRKPAFLSGEQKKAIVDLLFKTNRKVTVKQLKEDYFKKIECFDSVEISGVEDRFNASLGTYHDLLKIIKDKDFLDNEENEDILEDIVLTLTLFEDREMIEERLKTYAHLFDDKVMKQLKRRRYTGWGRLSRKLINGIRDKQSGKTILDFLKSDGFANRNFMQLIHDDSLTFKEDIQKAQVSGQGDSLHEHIANLAGSPAIKKGILQTVKVVDELVKVMGRHKPENIVIEMARENQTTQKGQKNSRERMKRIEEGIKELGSQILKEHPVENTQLQNEKLYLYYLQNGRDMYVDQELDINRLSDYDVDHIVPQSFLKDDSIDNKVLTRSDKARGKSDNVPSEEVVKKMKNYWRQLLNAKLITQRKFDNLTKAERGGLSELDKAGFIKRQLVETRQITKHVAQILDSRMNTKYDENDKLIREVKVITLKSKLVSDFRKDFQFYKVREINNYHHAHDAYLNAVVGTALIKKYPKLESEFVYGDYKVYDVRKMIAKSEQEIGKATAKYFFYSNIMNFFKTEITLANGEIRKRPLIETNGETGEIVWDKGRDFATVRKVLSMPQVNIVKKTEVQTGGFSKESILPKRNSDKLIARKKDWDPKKYGGFDSPTVAYSVLVVAKVEKGKSKKLKSVKELLGITIMERSSFEKNPIDFLEAKGYKEVKKDLIIKLPKYSLFELENGRKRMLASAGELQKGNELALPSKYVNFLYLASHYEKLKGSPEDNEQKQLFVEQHKHYLDEIIEQISEFSKRVILADANLDKVLSAYNKHRDKPIREQAENIIHLFTLTNLGAPAAFKYFDTTIDRKRYTSTKEVLDATLIHQSITGLYETRIDLSQLGGDGGPAPAPAPAPAPGGTVSLQDEHRLFDIPVTTSLPDVWLQDFPQAWAETGGLGRAKCQAPIIIDLKPTAVPVSIKQYPMSLEAHMGIRQHIIKFLELGVLRPCRSPWNTPLLPVKKPGTQDYRPVQDLREINKRTVDIHPTVPNPYNLLSTLKPDYSWYTVLDLKDAFFCLPLAPQSQELFAFEWKDPERGISGQLTWTRLPQGFKNSPTLFNEALHRDLTDFRTQHPEVTLLQYVDDLLLAAPTKKACTQGTRHLLQELGEKGYRASAKKAQICQTKVTYLGYILSEGKRWLTPGRIETVARIPPPRNPREVREFLGTAGFCRLWIPGFAELAAPLYALTKPSTPFTWQTEHQLAFEALKKALLSAPALGLPDTSKPFTLFLDERQGIAKGVLTQKLGPWKRPVAYLSKKLDPVAAGWPPCLRIMAATAMLVKDSAKLTLGQPLTVITPHTLEAIVRQPPDRWITNARLTHYQALLLDTDRVQFGPPVTLNPATLLPVPENQPSPHDCRQVLAETHGTREDLKDQELPDADHTWYTDGSSYLDSGTRRAGAAVVDGHNTIWAQSLPPGTSAQKAELIALTKALELSKGKKANIYTDSRYAFATAHTHGSIYERRGWLTSEGKEIKNKAEIIALLKALFLPQEVAIIHCPGHQKGQDPVAVGNRQADRVARQAAMAEVLTLATEPDNTSHITAGKRTADGSEFEKRTADGSEFESPKKKAKVE

SEQ ID NO: 6533 - protein, 2173 aa, synthetic construct
MPAAKRVKLDGGDKKYSIGLDIGTNSVGWAVITDEYKVPSKKFKVLGNTDRHSIKKNLIGALLFDSGETAEATRLKRTARRRYTRRKNRICYLQEIFSNEMAKVDDSFFHRLEESFLVEEDKKHERHPIFGNIVDEVAYHEKYPTIYHLRKKLVDSTDKADLRLIYLALAHMIKFRGHFLIEGDLNPDNSDVDKLFIQLVQTYNQLFEENPINASGVDAKAILSARLSKSRRLENLIAQLPGEKKNGLFGNLIALSLGLTPNFKSNFDLAEDAKLQLSKDTYDDDLDNLLAQIGDQYADLFLAAKNLSDAILLSDILRVNTEITKAPLSASMIKRYDEHHQDLTLLKALVRQQLPEKYKEIFFDQSKNGYAGYIDGGASQEEFYKFIKPILEKMDGTEELLVKLNREDLLRKQRTFDNGSIPHQIHLGELHAILRRQEDFYPFLKDNREKIEKILTFRIPYYVGPLARGNSRFAWMTRKSEETITPWNFEEVVDKGASAQSFIERMTNFDKNLPNEKVLPKHSLLYEYFTVYNELTKVKYVTEGMRKPAFLSGEQKKAIVDLLFKTNRKVTVKQLKEDYFKKIECFDSVEISGVEDRFNASLGTYHDLLKIIKDKDFLDNEENEDILEDIVLTLTLFEDREMIEERLKTYAHLFDDKVMKQLKRRRYTGWGRLSRKLINGIRDKQSGKTILDFLKSDGFANRNFMQLIHDDSLTFKEDIQKAQVSGQGDSLHEHIANLAGSPAIKKGILQTVKVVDELVKVMGRHKPENIVIEMARENQTTQKGQKNSRERMKRIEEGIKELGSQILKEHPVENTQLQNEKLYLYYLQNGRDMYVDQELDINRLSDYDVDHIVPQSFLKDDSIDNKVLTRSDKARGKSDNVPSEEVVKKMKNYWRQLLNAKLITQRKFDNLTKAERGGLSELDKAGFIKRQLVETRQITKHVAQILDSRMNTKYDENDKLIREVKVITLKSKLVSDFRKDFQFYKVREINNYHHAHDAYLNAVVGTALIKKYPKLESEFVYGDYKVYDVRKMIAKSEQEIGKATAKYFFYSNIMNFFKTEITLANGEIRKRPLIETNGETGEIVWDKGRDFATVRKVLSMPQVNIVKKTEVQTGGFSKESILPKRNSDKLIARKKDWDPKKYGGFDSPTVAYSVLVVAKVEKGKSKKLKSVKELLGITIMERSSFEKNPIDFLEAKGYKEVKKDLIIKLPKYSLFELENGRKRMLASAGELQKGNELALPSKYVNFLYLASHYEKLKGSPEDNEQKQLFVEQHKHYLDEIIEQISEFSKRVILADANLDKVLSAYNKHRDKPIREQAENIIHLFTLTNLGAPAAFKYFDTTIDRKRYTSTKEVLDATLIHQSITGLYETRIDLSQLGGDGGPAPAPAPAPAPGGMDLLKPLTVERKGVKIKGYWNSQADITCVPKDLLQGEEPVRQQNVTTIHGTQEGDVYYVNLKIDGRRINTEVIGTTLDYAIITPGDVPWILKKPLELTIKLDLEEQQGTLLNNSILSKKGKEELKQLFEKYSALWQSWENQVGHRRIRPHKIATGTVKPTPQKQYHINPKAKPDIQIVINDLLKQGVLIQKESTMNTPVYPVPKPNGRWRMVLDYRAVNKVTPLIAVQNQHSYGILGSLFKGRYKTTIDLSNGFWAHPIVPEDYWITAFTWQGKQYCWTVLPQGFLNSPGLFTGDVVDLLQGIPNVEVYVDDVYISHDSEKEHLEYLDILFNRLKEAGYIISLKKSNIANSIVDFLGFQITNEGRGLTDTFKEKLENITAPTTLKQLQSILGLLNFARNFIPDFTELIAPLYALIPKSTKNYVPWQIEHSTTLETLITKLNGAEYLQGRKGDKTLIMKVNASYTTGYIRYYNEGEKKPISYVSIVFSKTELKFTELEKLLTTVHKGLLKALDLSMGQNIHVYSPIVSMQNIQKTPQTAKKALASRWLSWLSYLEDPRIRFFYDPQMPALKDLPAVDTGKDNKKHPSNFQHIFYTDGSAITSPTKEGHLNAGMGIVYFINKDGNLQKQQEWSISLGNHTAQFAEIAAFEFALKKCLPLGGNILVVTDSNYVAKAYNEELDVWASNGFVNNRKKPLKHISKWKSVADLKRLRPDVVVTHEPGHQKLDSSPHAYGNNLADQLATQASFKVHAGKRTADGSEFEKRTADGSEFESPKKKAKVE

SEQ ID NO: 6534 - protein, 2173 aa, synthetic construct
MPAAKRVKLDGGDKKYSIGLDIGTNSVGWAVITDEYKVPSKKFKVLGNTDRHSIKKNLIGALLFDSGETAEATRLKRTARRRYTRRKNRICYLQEIFSNEMAKVDDSFFHRLEESFLVEEDKKHERHPIFGNIVDEVAYHEKYPTIYHLRKKLVDSTDKADLRLIYLALAHMIKFRGHFLIEGDLNPDNSDVDKLFIQLVQTYNQLFEENPINASGVDAKAILSARLSKSRRLENLIAQLPGEKKNGLFGNLIALSLGLTPNFKSNFDLAEDAKLQLSKDTYDDDLDNLLAQIGDQYADLFLAAKNLSDAILLSDILRVNTEITKAPLSASMIKRYDEHHQDLTLLKALVRQQLPEKYKEIFFDQSKNGYAGYIDGGASQEEFYKFIKPILEKMDGTEELLVKLNREDLLRKQRTFDNGSIPHQIHLGELHAILRRQEDFYPFLKDNREKIEKILTFRIPYYVGPLARGNSRFAWMTRKSEETITPWNFEEVVDKGASAQSFIERMTNFDKNLPNEKVLPKHSLLYEYFTVYNELTKVKYVTEGMRKPAFLSGEQKKAIVDLLFKTNRKVTVKQLKEDYFKKIECFDSVEISGVEDRFNASLGTYHDLLKIIKDKDFLDNEENEDILEDIVLTLTLFEDREMIEERLKTYAHLFDDKVMKQLKRRRYTGWGRLSRKLINGIRDKQSGKTILDFLKSDGFANRNFMQLIHDDSLTFKEDIQKAQVSGQGDSLHEHIANLAGSPAIKKGILQTVKVVDELVKVMGRHKPENIVIEMARENQTTQKGQKNSRERMKRIEEGIKELGSQILKEHPVENTQLQNEKLYLYYLQNGRDMYVDQELDINRLSDYDVDHIVPQSFLKDDSIDNKVLTRSDKARGKSDNVPSEEVVKKMKNYWRQLLNAKLITQRKFDNLTKAERGGLSELDKAGFIKRQLVETRQITKHVAQILDSRMNTKYDENDKLIREVKVITLKSKLVSDFRKDFQFYKVREINNYHHAHDAYLNAVVGTALIKKYPKLESEFVYGDYKVYDVRKMIAKSEQEIGKATAKYFFYSNIMNFFKTEITLANGEIRKRPLIETNGETGEIVWDKGRDFATVRKVLSMPQVNIVKKTEVQTGGFSKESILPKRNSDKLIARKKDWDPKKYGGFDSPTVAYSVLVVAKVEKGKSKKLKSVKELLGITIMERSSFEKNPIDFLEAKGYKEVKKDLIIKLPKYSLFELENGRKRMLASAGELQKGNELALPSKYVNFLYLASHYEKLKGSPEDNEQKQLFVEQHKHYLDEIIEQISEFSKRVILADANLDKVLSAYNKHRDKPIREQAENIIHLFTLTNLGAPAAFKYFDTTIDRKRYTSTKEVLDATLIHQSITGLYETRIDLSQLGGDGGPAPAPAPAPAPGGMDLLKPLTVERKGVKIKGYWNSQADITCVPKDLLQGEEPVRQQNVTTIHGTQEGDVYYVNLKIDGRRINTEVIGTTLDYAIITPGDVPWILKKPLELTIKLDLEEQQGTLLNNSILSKKGKEELKQLFEKYSALWQSWENQVGHRRIRPHKIATGTVKPTPQKQYHINPKAKPDIQIVINDLLKQGVLIQKESTMNTPVYPVPKPNGRWRMVLDYRAVNKVTPLIAVQNQHSYGILGSLFKGRYKTTIDLSNGFWAHPIVPEDYWITAFTWQGKQYCWTVLPQGFLNSPGLFNGDVVDLLQGIPNVEVYVDDVYISHDSEKEHLEYLDILFNRLKEAGYIISLKKSNIANSIVDFLGFQITNEGRGLTDTFKEKLENITAPTTLKQLQSILGLLNFARNFIPDFTELIAPLYALIPKSPKNYVPWQIEHSTTLETLITKLNGAEYLQGRKGDKTLIMKVNASYTTGYIRYYNEGEKKPISYVSIVFSKTELKFTELEKLLTTVHKGLLKALDLSMGQNIHVYSPIVSMQNIQKTPQTAKKALASRWLSWLSYLEDPRIRFFYDPQMPALKDLPAVDTGKDNKKHPSNFQHIFYTDGSAITSPTKEGHLNAGMGIVYFINKDGNLQKQQEWSISLGNHTAQFAEIAAFEFALKKCLPLGGNILVVTDSNYVAKAYNEELDVWASNGFVNNRKKPLKHISKWKSVADLKRLRPDVVVTHEPGHQKLDSSPHAYGNNLADQLATQASFKVHAGKRTADGSEFEKRTADGSEFESPKKKAKVE

SEQ ID NO: 6535 - protein, 2095 aa, synthetic construct
MPAAKRVKLDGGDKKYSIGLDIGTNSVGWAVITDEYKVPSKKFKVLGNTDRHSIKKNLIGALLFDSGETAEATRLKRTARRRYTRRKNRICYLQEIFSNEMAKVDDSFFHRLEESFLVEEDKKHERHPIFGNIVDEVAYHEKYPTIYHLRKKLVDSTDKADLRLIYLALAHMIKFRGHFLIEGDLNPDNSDVDKLFIQLVQTYNQLFEENPINASGVDAKAILSARLSKSRRLENLIAQLPGEKKNGLFGNLIALSLGLTPNFKSNFDLAEDAKLQLSKDTYDDDLDNLLAQIGDQYADLFLAAKNLSDAILLSDILRVNTEITKAPLSASMIKRYDEHHQDLTLLKALVRQQLPEKYKEIFFDQSKNGYAGYIDGGASQEEFYKFIKPILEKMDGTEELLVKLNREDLLRKQRTFDNGSIPHQIHLGELHAILRRQEDFYPFLKDNREKIEKILTFRIPYYVGPLARGNSRFAWMTRKSEETITPWNFEEVVDKGASAQSFIERMTNFDKNLPNEKVLPKHSLLYEYFTVYNELTKVKYVTEGMRKPAFLSGEQKKAIVDLLFKTNRKVTVKQLKEDYFKKIECFDSVEISGVEDRFNASLGTYHDLLKIIKDKDFLDNEENEDILEDIVLTLTLFEDREMIEERLKTYAHLFDDKVMKQLKRRRYTGWGRLSRKLINGIRDKQSGKTILDFLKSDGFANRNFMQLIHDDSLTFKEDIQKAQVSGQGDSLHEHIANLAGSPAIKKGILQTVKVVDELVKVMGRHKPENIVIEMARENQTTQKGQKNSRERMKRIEEGIKELGSQILKEHPVENTQLQNEKLYLYYLQNGRDMYVDQELDINRLSDYDVDHIVPQSFLKDDSIDNKVLTRSDKARGKSDNVPSEEVVKKMKNYWRQLLNAKLITQRKFDNLTKAERGGLSELDKAGFIKRQLVETRQITKHVAQILDSRMNTKYDENDKLIREVKVITLKSKLVSDFRKDFQFYKVREINNYHHAHDAYLNAVVGTALIKKYPKLESEFVYGDYKVYDVRKMIAKSEQEIGKATAKYFFYSNIMNFFKTEITLANGEIRKRPLIETNGETGEIVWDKGRDFATVRKVLSMPQVNIVKKTEVQTGGFSKESILPKRNSDKLIARKKDWDPKKYGGFDSPTVAYSVLVVAKVEKGKSKKLKSVKELLGITIMERSSFEKNPIDFLEAKGYKEVKKDLIIKLPKYSLFELENGRKRMLASAGELQKGNELALPSKYVNFLYLASHYEKLKGSPEDNEQKQLFVEQHKHYLDEIIEQISEFSKRVILADANLDKVLSAYNKHRDKPIREQAENIIHLFTLTNLGAPAAFKYFDTTIDRKRYTSTKEVLDATLIHQSITGLYETRIDLSQLGGDGGPAPAPAPAPAPGGTLQLEEEYRLFEPESTQKQEMDIWLKNFPQAWAETGGMGTAHCQAPVLIQLKATATPISIRQYPMPHEAYQGIKPHIRRMLDQGILKPCQSPWNTPLLPVKKPGTEDYRPVQDLREVNKRVEDIHPTVPNPYNLLSTLPPSHPWYTVLDLKDAFFCLRLHSESQLLFAFEWRDPEIGLSGQLTWTRLPQGFKNSPTLFDEALHSDLADFRVRYPALVLLQYVDDLLLAAATRTECLEGTKALLETLGNKGYRASAKKAQICLQEVTYLGYSLKDGQRWLTKARKEAILSIPVPKNSRQVREFLGTAGYCRLWIPGFAELAAPLYPLTRPGTLFQWGTEQQLAFEDIKKALLSSPALGLPDITKPFELFIDENSGFAKGVLVQKLGPWKRPVAYLSKKLDTVASGWPPCLRMVAAIAILVKDAGKLTLGQPLTILTSHPVEALVRQPPNKWLSNARMTHYQAMLLDAERVHFGPTVSLNPATLLPLPSGGNHHDCLQILAETHGTRPDLTDQPLPDADLTWYTDGSSFIRNGEREAGAAVTTESEVIWAAPLPPGTSAQRAELIALTQALKMAEGKKLTVYTDSRYAFATTHVHGEIYRRRGLLTSEGKEIKNKNEILALLEALFLPKRLSIIHCPGHQKGDSPQAKGNRLADDTAKKAATETHSSLTVLPAGKRTADGSEFEKRTADGSEFESPKKKAKVE

SEQ ID NO: 6536 - protein, 2176 aa, synthetic construct
MPAAKRVKLDGGDKKYSIGLDIGTNSVGWAVITDEYKVPSKKFKVLGNTDRHSIKKNLIGALLFDSGETAEATRLKRTARRRYTRRKNRICYLQEIFSNEMAKVDDSFFHRLEESFLVEEDKKHERHPIFGNIVDEVAYHEKYPTIYHLRKKLVDSTDKADLRLIYLALAHMIKFRGHFLIEGDLNPDNSDVDKLFIQLVQTYNQLFEENPINASGVDAKAILSARLSKSRRLENLIAQLPGEKKNGLFGNLIALSLGLTPNFKSNFDLAEDAKLQLSKDTYDDDLDNLLAQIGDQYADLFLAAKNLSDAILLSDILRVNTEITKAPLSASMIKRYDEHHQDLTLLKALVRQQLPEKYKEIFFDQSKNGYAGYIDGGASQEEFYKFIKPILEKMDGTEELLVKLNREDLLRKQRTFDNGSIPHQIHLGELHAILRRQEDFYPFLKDNREKIEKILTFRIPYYVGPLARGNSRFAWMTRKSEETITPWNFEEVVDKGASAQSFIERMTNFDKNLPNEKVLPKHSLLYEYFTVYNELTKVKYVTEGMRKPAFLSGEQKKAIVDLLFKTNRKVTVKQLKEDYFKKIECFDSVEISGVEDRFNASLGTYHDLLKIIKDKDFLDNEENEDILEDIVLTLTLFEDREMIEERLKTYAHLFDDKVMKQLKRRRYTGWGRLSRKLINGIRDKQSGKTILDFLKSDGFANRNFMQLIHDDSLTFKEDIQKAQVSGQGDSLHEHIANLAGSPAIKKGILQTVKVVDELVKVMGRHKPENIVIEMARENQTTQKGQKNSRERMKRIEEGIKELGSQILKEHPVENTQLQNEKLYLYYLQNGRDMYVDQELDINRLSDYDVDHIVPQSFLKDDSIDNKVLTRSDKARGKSDNVPSEEVVKKMKNYWRQLLNAKLITQRKFDNLTKAERGGLSELDKAGFIKRQLVETRQITKHVAQILDSRMNTKYDENDKLIREVKVITLKSKLVSDFRKDFQFYKVREINNYHHAHDAYLNAVVGTALIKKYPKLESEFVYGDYKVYDVRKMIAKSEQEIGKATAKYFFYSNIMNFFKTEITLANGEIRKRPLIETNGETGEIVWDKGRDFATVRKVLSMPQVNIVKKTEVQTGGFSKESILPKRNSDKLIARKKDWDPKKYGGFDSPTVAYSVLVVAKVEKGKSKKLKSVKELLGITIMERSSFEKNPIDFLEAKGYKEVKKDLIIKLPKYSLFELENGRKRMLASAGELQKGNELALPSKYVNFLYLASHYEKLKGSPEDNEQKQLFVEQHKHYLDEIIEQISEFSKRVILADANLDKVLSAYNKHRDKPIREQAENIIHLFTLTNLGAPAAFKYFDTTIDRKRYTSTKEVLDATLIHQSITGLYETRIDLSQLGGDGGPAPAPAPAPAPGGMNPLQLLQPLPAEIKGTKLLAHWNSGATITCIPESFLEDEQPIKKTLIKTIHGEKQQNVYYVTFKVKGRKVEAEVIASPYEYILLSPTDVPWLTQQPLQLTILVPLQEYQEKILSKTALPEDQKQQLKTLFVKYDNLWQHWENQVGHRKIRPHNIATGDYPPRPQKQYPINPKAKPSIQIVIDDLLKQGVLTPQNSTMNTPVYPVPKPDGRWRMVLDYREVNKTIPLTAAQNQHSAGILATIVRQKYKTTLDLANGFWAHPITPESYWLTAFTWQGKQYCWTRLPQGFLNSPALFNADVVDLLKEIPNVQVYVDDIYLSHDDPKEHVQQLEKVFQILLQAGYVVSLKKSEIGQKTVEFLGFNITKEGRGLTDTFKTKLLNITPPKDLKQLQSILGLLNFARNFIPNFAELVQPLYNLIAPAKGKYIEWSEENTKQLNMVIEALNTASNLEERLPEQRLVIKVNTSPSAGYVRYYNETGKKPIMYLNYVFSKAELKFSMLEKLLTTMHKALIKAMDLAMGQEILVYSPIVSMTKIQKTPLPERKALPIRWITWMTYLEDPRIQFHYDKTLPELKHIPDVYTSSQSPVKHPSQYEGVFYTDGSAIKSPDPTKSNNAGMGIVHATYKPEYQVLNQWSIPLGNHTAQMAEIAAVEFACKKALKIPGPVLVITDSFYVAESANKELPYWKSNGFVNNKKKPLKHISKWKSIAECLSMKPDITIQHEKGISLQIPVFILKGNALADKLATQGSYVVNAGKRTADGSEFEKRTADGSEFESPKKKAKVE

SEQ ID NO: 6537 - protein, 2009 aa, synthetic construct
MPAAKRVKLDGGDKKYSIGLDIGTNSVGWAVITDEYKVPSKKFKVLGNTDRHSIKKNLIGALLFDSGETAEATRLKRTARRRYTRRKNRICYLQEIFSNEMAKVDDSFFHRLEESFLVEEDKKHERHPIFGNIVDEVAYHEKYPTIYHLRKKLVDSTDKADLRLIYLALAHMIKFRGHFLIEGDLNPDNSDVDKLFIQLVQTYNQLFEENPINASGVDAKAILSARLSKSRRLENLIAQLPGEKKNGLFGNLIALSLGLTPNFKSNFDLAEDAKLQLSKDTYDDDLDNLLAQIGDQYADLFLAAKNLSDAILLSDILRVNTEITKAPLSASMIKRYDEHHQDLTLLKALVRQQLPEKYKEIFFDQSKNGYAGYIDGGASQEEFYKFIKPILEKMDGTEELLVKLNREDLLRKQRTFDNGSIPHQIHLGELHAILRRQEDFYPFLKDNREKIEKILTFRIPYYVGPLARGNSRFAWMTRKSEETITPWNFEEVVDKGASAQSFIERMTNFDKNLPNEKVLPKHSLLYEYFTVYNELTKVKYVTEGMRKPAFLSGEQKKAIVDLLFKTNRKVTVKQLKEDYFKKIECFDSVEISGVEDRFNASLGTYHDLLKIIKDKDFLDNEENEDILEDIVLTLTLFEDREMIEERLKTYAHLFDDKVMKQLKRRRYTGWGRLSRKLINGIRDKQSGKTILDFLKSDGFANRNFMQLIHDDSLTFKEDIQKAQVSGQGDSLHEHIANLAGSPAIKKGILQTVKVVDELVKVMGRHKPENIVIEMARENQTTQKGQKNSRERMKRIEEGIKELGSQILKEHPVENTQLQNEKLYLYYLQNGRDMYVDQELDINRLSDYDVDHIVPQSFLKDDSIDNKVLTRSDKARGKSDNVPSEEVVKKMKNYWRQLLNAKLITQRKFDNLTKAERGGLSELDKAGFIKRQLVETRQITKHVAQILDSRMNTKYDENDKLIREVKVITLKSKLVSDFRKDFQFYKVREINNYHHAHDAYLNAVVGTALIKKYPKLESEFVYGDYKVYDVRKMIAKSEQEIGKATAKYFFYSNIMNFFKTEITLANGEIRKRPLIETNGETGEIVWDKGRDFATVRKVLSMPQVNIVKKTEVQTGGFSKESILPKRNSDKLIARKKDWDPKKYGGFDSPTVAYSVLVVAKVEKGKSKKLKSVKELLGITIMERSSFEKNPIDFLEAKGYKEVKKDLIIKLPKYSLFELENGRKRMLASAGELQKGNELALPSKYVNFLYLASHYEKLKGSPEDNEQKQLFVEQHKHYLDEIIEQISEFSKRVILADANLDKVLSAYNKHRDKPIREQAENIIHLFTLTNLGAPAAFKYFDTTIDRKRYTSTKEVLDATLIHQSITGLYETRIDLSQLGGDGGPAPAPAPAPAPGGGLEHLPPPPEVSQFPLNPERLQALTDLVSRALEAKHIEPYQGPGNNPIFPVKKPNGKWRFIHDLRATNSVTRDLASPSPGPPDLTSLPQGLPHLRTIDLTDAFFQIPLPTIFQPYFAFTLPQPNNYGPGTRYSWRVLPQGFKNSPTLFQQQLSHILTPVRKTFPNSLIIQYMDDILLASPAPGELAALTDKVTNALTKEGLPLSPEKTQATPGPIHFLGQVISQDCITYETLPSINVKSTWSLAELQSMLGELQWVSKGTPVLRSSLHQLYLALRGHRDPRDTIKLTSIQVQALRTIQKALTLNCRSRLVNQLPILALIMLRPTGTTAVLFQTKQKWPLVWLHTPHPATSLRPWGQLLANAVIILDKYSLQHYGQVCKSFHHNISNQALTYYLHTSDQSSVAILLQHSHRFHNLGAQPSGPWRSLLQMPQIFQNIDVLRPPFTISPVVINHAPCLFSDGSASKAAFIIWDRQVIHQQVLSLPSTCSAQAGELFGLLAGLQKSQPWVALNIFLDSKFLIGHLRRMAWGAFPGPSTQCELHTQLLPLLQGKTVYVHHVRSHTLLQDPISRLNEATDALMLAPLLPLAGKRTADGSEFEKRTADGSEFESPKKKAKVE

SEQ ID NO: 6538 - protein, 2127 aa, synthetic construct
MPAAKRVKLDGGDKKYSIGLDIGTNSVGWAVITDEYKVPSKKFKVLGNTDRHSIKKNLIGALLFDSGETAEATRLKRTARRRYTRRKNRICYLQEIFSNEMAKVDDSFFHRLEESFLVEEDKKHERHPIFGNIVDEVAYHEKYPTIYHLRKKLVDSTDKADLRLIYLALAHMIKFRGHFLIEGDLNPDNSDVDKLFIQLVQTYNQLFEENPINASGVDAKAILSARLSKSRRLENLIAQLPGEKKNGLFGNLIALSLGLTPNFKSNFDLAEDAKLQLSKDTYDDDLDNLLAQIGDQYADLFLAAKNLSDAILLSDILRVNTEITKAPLSASMIKRYDEHHQDLTLLKALVRQQLPEKYKEIFFDQSKNGYAGYIDGGASQEEFYKFIKPILEKMDGTEELLVKLNREDLLRKQRTFDNGSIPHQIHLGELHAILRRQEDFYPFLKDNREKIEKILTFRIPYYVGPLARGNSRFAWMTRKSEETITPWNFEEVVDKGASAQSFIERMTNFDKNLPNEKVLPKHSLLYEYFTVYNELTKVKYVTEGMRKPAFLSGEQKKAIVDLLFKTNRKVTVKQLKEDYFKKIECFDSVEISGVEDRFNASLGTYHDLLKIIKDKDFLDNEENEDILEDIVLTLTLFEDREMIEERLKTYAHLFDDKVMKQLKRRRYTGWGRLSRKLINGIRDKQSGKTILDFLKSDGFANRNFMQLIHDDSLTFKEDIQKAQVSGQGDSLHEHIANLAGSPAIKKGILQTVKVVDELVKVMGRHKPENIVIEMARENQTTQKGQKNSRERMKRIEEGIKELGSQILKEHPVENTQLQNEKLYLYYLQNGRDMYVDQELDINRLSDYDVDHIVPQSFLKDDSIDNKVLTRSDKARGKSDNVPSEEVVKKMKNYWRQLLNAKLITQRKFDNLTKAERGGLSELDKAGFIKRQLVETRQITKHVAQILDSRMNTKYDENDKLIREVKVITLKSKLVSDFRKDFQFYKVREINNYHHAHDAYLNAVVGTALIKKYPKLESEFVYGDYKVYDVRKMIAKSEQEIGKATAKYFFYSNIMNFFKTEITLANGEIRKRPLIETNGETGEIVWDKGRDFATVRKVLSMPQVNIVKKTEVQTGGFSKESILPKRNSDKLIARKKDWDPKKYGGFDSPTVAYSVLVVAKVEKGKSKKLKSVKELLGITIMERSSFEKNPIDFLEAKGYKEVKKDLIIKLPKYSLFELENGRKRMLASAGELQKGNELALPSKYVNFLYLASHYEKLKGSPEDNEQKQLFVEQHKHYLDEIIEQISEFSKRVILADANLDKVLSAYNKHRDKPIREQAENIIHLFTLTNLGAPAAFKYFDTTIDRKRYTSTKEVLDATLIHQSITGLYETRIDLSQLGGDGGPAPAPAPAPAPGGLLGRDLLTKLKAQIQFSTEGPQVTWEDRPAMCLVLNLEEEYRLHEKPVPPSIDPSWLQLFPMVWAEKAGMGLANQVPPVVVELKSDASPVAVRQYPMSKEAREGIRPHIQRFLDLGILVPCQSPWNTPLLPVKKPGTNDYRPVQDLREVNKRVQDIHPTVPNPYNLLSSLPPSHTWYSVLDLKDAFFCLKLHPNSQPLFAFEWRDPEKGNTGQLTWTRLPQGFKNSPTLFDEALHRDLASFRALNPQVVMLQYVDDLLVAAPTYRDCKEGTRRLLQELSKLGYRVSAKKAQLCREEVTYLGYLLKGGKRWLTPARKATVMKIPTPTTPRQVREFLGTAGFCRLWIPGFASLAAPLYPLTREKVPFTWTEAHQEAFGRIKEALLSAPALALPDLTKPFALYVDEKEGVARGVLTQTLGPWRRPVAYLSKKLDPVASGWPTCLKAIAAVALLLKDADKLTLGQNVLVIAPHNLESIVRQPPDRWMTNARMTHYQSLLLNERVSFAPPAILNPATLLPVESDDTPIHICSEILAEETGTRPDLRDQPLPGVPAWYTDGSSFIMDGRRQAGAAIVDNKRTVWASNLPEGTSAQKAELIALTQALRLAEGKSINIYTDSRYAFATAHVHGAIYKQRGLLTSAGKDIKNKEEILALLEAIHLPKRVAIIHCPGHQRGTDPVATGNRKADEAAKQAAQSTRILTETTKNAGKRTADGSEFEKRTADGSEFESPKKKAKVE

SEQ ID NO: 6539 - protein, 2218 aa, synthetic construct
MPAAKRVKLDGGDKKYSIGLDIGTNSVGWAVITDEYKVPSKKFKVLGNTDRHSIKKNLIGALLFDSGETAEATRLKRTARRRYTRRKNRICYLQEIFSNEMAKVDDSFFHRLEESFLVEEDKKHERHPIFGNIVDEVAYHEKYPTIYHLRKKLVDSTDKADLRLIYLALAHMIKFRGHFLIEGDLNPDNSDVDKLFIQLVQTYNQLFEENPINASGVDAKAILSARLSKSRRLENLIAQLPGEKKNGLFGNLIALSLGLTPNFKSNFDLAEDAKLQLSKDTYDDDLDNLLAQIGDQYADLFLAAKNLSDAILLSDILRVNTEITKAPLSASMIKRYDEHHQDLTLLKALVRQQLPEKYKEIFFDQSKNGYAGYIDGGASQEEFYKFIKPILEKMDGTEELLVKLNREDLLRKQRTFDNGSIPHQIHLGELHAILRRQEDFYPFLKDNREKIEKILTFRIPYYVGPLARGNSRFAWMTRKSEETITPWNFEEVVDKGASAQSFIERMTNFDKNLPNEKVLPKHSLLYEYFTVYNELTKVKYVTEGMRKPAFLSGEQKKAIVDLLFKTNRKVTVKQLKEDYFKKIECFDSVEISGVEDRFNASLGTYHDLLKIIKDKDFLDNEENEDILEDIVLTLTLFEDREMIEERLKTYAHLFDDKVMKQLKRRRYTGWGRLSRKLINGIRDKQSGKTILDFLKSDGFANRNFMQLIHDDSLTFKEDIQKAQVSGQGDSLHEHIANLAGSPAIKKGILQTVKVVDELVKVMGRHKPENIVIEMARENQTTQKGQKNSRERMKRIEEGIKELGSQILKEHPVENTQLQNEKLYLYYLQNGRDMYVDQELDINRLSDYDVDHIVPQSFLKDDSIDNKVLTRSDKARGKSDNVPSEEVVKKMKNYWRQLLNAKLITQRKFDNLTKAERGGLSELDKAGFIKRQLVETRQITKHVAQILDSRMNTKYDENDKLIREVKVITLKSKLVSDFRKDFQFYKVREINNYHHAHDAYLNAVVGTALIKKYPKLESEFVYGDYKVYDVRKMIAKSEQEIGKATAKYFFYSNIMNFFKTEITLANGEIRKRPLIETNGETGEIVWDKGRDFATVRKVLSMPQVNIVKKTEVQTGGFSKESILPKRNSDKLIARKKDWDPKKYGGFDSPTVAYSVLVVAKVEKGKSKKLKSVKELLGITIMERSSFEKNPIDFLEAKGYKEVKKDLIIKLPKYSLFELENGRKRMLASAGELQKGNELALPSKYVNFLYLASHYEKLKGSPEDNEQKQLFVEQHKHYLDEIIEQISEFSKRVILADANLDKVLSAYNKHRDKPIREQAENIIHLFTLTNLGAPAAFKYFDTTIDRKRYTSTKEVLDATLIHQSITGLYETRIDLSQLGGDGGPAPAPAPAPAPGGTLGDQGSRGSDPLPEPRVTLTVEGIPTEFLVNTGAEHSVLTKPMGKMGSKRTVVAGATGSKVYPWTTKRLLKIGQKQVTHSFLVIPECPAPLLGRDLLTKLKAQIQFSTEGPQVTWEDRPAMCLVLNLEEEYRLHEKPVPPSIDPSWLQLFPMVWAEKAGMGLANQVPPVVVELKSDASPVAVRQYPMSKEAREGIRPHIQRFLDLGILVPCQSPWNTPLLPVKKPGTNDYRPVQDLREVNKRVQDIHPTVPNPYNLLSSLPPSHTWYSVLDLKDAFFCLKLHPNSQPLFAFEWRDPEKGNTGQLTWTRLPQGFKNSPTLFNEALHRDLASFRALNPQVVMLQYVDDLLVAAPTYRDCKEGTRRLLQELSKLGYRVSAKKAQLCREEVTYLGYLLKGGKRWLTPARKATVMKIPTPTTPRQVREFLGTAGFCRLWIPGFASLAAPLYPLTRPKVPFTWTEAHQEAFGRIKEALLSAPALALPDLTKPFALYVDEKEGVARGVLTQTLGPWRRPVAYLSKKLDPVASGWPTCLKAIAAVALLLKDADKLTLGQNVLVIAPHNLESIVRQPPDRWMTNARMTHYQSLLLNERVSFAPPAILNPATLLPVESDDTPIHICSEILAEETGTRPDLRDQPLPGVPAWYTDGSSFIMDGRRQAGAAIVDNKRTVWASNLPEGTSAQKAELIALTQALRLAEGKSINIYTDSRYAFATAHVHGAIYKQRGWLTSAGKDIKNKEEILALLEAIHLPKRVAIIHCPGHQRGTDPVATGNRKADEAAKQAAQSTRILTETTKNAGKRTADGSEFEKRTADGSEFESPKKKAKVE

SEQ ID NO: 6540 - protein, 2096 aa, synthetic construct
MPAAKRVKLDGGDKKYSIGLDIGTNSVGWAVITDEYKVPSKKFKVLGNTDRHSIKKNLIGALLFDSGETAEATRLKRTARRRYTRRKNRICYLQEIFSNEMAKVDDSFFHRLEESFLVEEDKKHERHPIFGNIVDEVAYHEKYPTIYHLRKKLVDSTDKADLRLIYLALAHMIKFRGHFLIEGDLNPDNSDVDKLFIQLVQTYNQLFEENPINASGVDAKAILSARLSKSRRLENLIAQLPGEKKNGLFGNLIALSLGLTPNFKSNFDLAEDAKLQLSKDTYDDDLDNLLAQIGDQYADLFLAAKNLSDAILLSDILRVNTEITKAPLSASMIKRYDEHHQDLTLLKALVRQQLPEKYKEIFFDQSKNGYAGYIDGGASQEEFYKFIKPILEKMDGTEELLVKLNREDLLRKQRTFDNGSIPHQIHLGELHAILRRQEDFYPFLKDNREKIEKILTFRIPYYVGPLARGNSRFAWMTRKSEETITPWNFEEVVDKGASAQSFIERMTNFDKNLPNEKVLPKHSLLYEYFTVYNELTKVKYVTEGMRKPAFLSGEQKKAIVDLLFKTNRKVTVKQLKEDYFKKIECFDSVEISGVEDRFNASLGTYHDLLKIIKDKDFLDNEENEDILEDIVLTLTLFEDREMIEERLKTYAHLFDDKVMKQLKRRRYTGWGRLSRKLINGIRDKQSGKTILDFLKSDGFANRNFMQLIHDDSLTFKEDIQKAQVSGQGDSLHEHIANLAGSPAIKKGILQTVKVVDELVKVMGRHKPENIVIEMARENQTTQKGQKNSRERMKRIEEGIKELGSQILKEHPVENTQLQNEKLYLYYLQNGRDMYVDQELDINRLSDYDVDHIVPQSFLKDDSIDNKVLTRSDKARGKSDNVPSEEVVKKMKNYWRQLLNAKLITQRKFDNLTKAERGGLSELDKAGFIKRQLVETRQITKHVAQILDSRMNTKYDENDKLIREVKVITLKSKLVSDFRKDFQFYKVREINNYHHAHDAYLNAVVGTALIKKYPKLESEFVYGDYKVYDVRKMIAKSEQEIGKATAKYFFYSNIMNFFKTEITLANGEIRKRPLIETNGETGEIVWDKGRDFATVRKVLSMPQVNIVKKTEVQTGGFSKESILPKRNSDKLIARKKDWDPKKYGGFDSPTVAYSVLVVAKVEKGKSKKLKSVKELLGITIMERSSFEKNPIDFLEAKGYKEVKKDLIIKLPKYSLFELENGRKRMLASAGELQKGNELALPSKYVNFLYLASHYEKLKGSPEDNEQKQLFVEQHKHYLDEIIEQISEFSKRVILADANLDKVLSAYNKHRDKPIREQAENIIHLFTLTNLGAPAAFKYFDTTIDRKRYTSTKEVLDATLIHQSITGLYETRIDLSQLGGDGGPAPAPAPAPAPGGLGIEDEYRLHETSTEPDVSLGSTWLSDFPQAWAETGGMGLAVRQAPLIIPLKATSTPVSIQQYPMSHEARLGIKPHIQRLLDQGILVPCQSPWNTPLLPVKKPGTNDYRPVQDLREVNKRVEDIHPTVPNPYNLLSGLPPSHQWYTVLDLKDAFFCLRLHPTSQPLFAFEWRDPGMGISGQLTWTRLPQGFKNSPTLFNEALHRDLADFRIQHPDLILLQYVDDILLAATSELDCQQGTRALLQTLGDLGYRASAKKAQICQKQVKYLGYLLREGQRWLTEARKETVMGQPVPKTPRQLREFLGKAGFCRLFIPGFAEMAAPLYPLTKPGTLFSWGPDQQKAYQEIKQALLTAPALGLPDLTKPFELFVDEKQGYAKGVLTQKLGPWRRPVAYLSKKLDPVAAGWPPCLRMVAAIAVLTKDAGKLTMGQPLVILAPHAVEALVKQPPDRWLSNARMTHYQAMLLDTDRVQFGPVVALNPATLLPLPEEGAPHDCLEILAETHGTRPDLTDQPIPDADHTWYTDGSSFLQEGQRKAGAAVTTETEVIWAGALPAGTSAQRAELIALTQALKMAEGKRLNVYTDSRYAFATAHIHGEIYRRRGWLTSEGREIKNKSEILALLKALFLPKRLSIIHCLGHQKGDSAEARGNRLADQAAREAAIKTPPDTSTLLIAGKRTADGSEFEKRTADGSEFESPKKKAKVE

SEQ ID NO: 6541 - protein, 2096 aa, synthetic construct
MPAAKRVKLDGGDKKYSIGLDIGTNSVGWAVITDEYKVPSKKFKVLGNTDRHSIKKNLIGALLFDSGETAEATRLKRTARRRYTRRKNRICYLQEIFSNEMAKVDDSFFHRLEESFLVEEDKKHERHPIFGNIVDEVAYHEKYPTIYHLRKKLVDSTDKADLRLIYLALAHMIKFRGHFLIEGDLNPDNSDVDKLFIQLVQTYNQLFEENPINASGVDAKAILSARLSKSRRLENLIAQLPGEKKNGLFGNLIALSLGLTPNFKSNFDLAEDAKLQLSKDTYDDDLDNLLAQIGDQYADLFLAAKNLSDAILLSDILRVNTEITKAPLSASMIKRYDEHHQDLTLLKALVRQQLPEKYKEIFFDQSKNGYAGYIDGGASQEEFYKFIKPILEKMDGTEELLVKLNREDLLRKQRTFDNGSIPHQIHLGELHAILRRQEDFYPFLKDNREKIEKILTFRIPYYVGPLARGNSRFAWMTRKSEETITPWNFEEVVDKGASAQSFIERMTNFDKNLPNEKVLPKHSLLYEYFTVYNELTKVKYVTEGMRKPAFLSGEQKKAIVDLLFKTNRKVTVKQLKEDYFKKIECFDSVEISGVEDRFNASLGTYHDLLKIIKDKDFLDNEENEDILEDIVLTLTLFEDREMIEERLKTYAHLFDDKVMKQLKRRRYTGWGRLSRKLINGIRDKQSGKTILDFLKSDGFANRNFMQLIHDDSLTFKEDIQKAQVSGQGDSLHEHIANLAGSPAIKKGILQTVKVVDELVKVMGRHKPENIVIEMARENQTTQKGQKNSRERMKRIEEGIKELGSQILKEHPVENTQLQNEKLYLYYLQNGRDMYVDQELDINRLSDYDVDHIVPQSFLKDDSIDNKVLTRSDKARGKSDNVPSEEVVKKMKNYWRQLLNAKLITQRKFDNLTKAERGGLSELDKAGFIKRQLVETRQITKHVAQILDSRMNTKYDENDKLIREVKVITLKSKLVSDFRKDFQFYKVREINNYHHAHDAYLNAVVGTALIKKYPKLESEFVYGDYKVYDVRKMIAKSEQEIGKATAKYFFYSNIMNFFKTEITLANGEIRKRPLIETNGETGEIVWDKGRDFATVRKVLSMPQVNIVKKTEVQTGGFSKESILPKRNSDKLIARKKDWDPKKYGGFDSPTVAYSVLVVAKVEKGKSKKLKSVKELLGITIMERSSFEKNPIDFLEAKGYKEVKKDLIIKLPKYSLFELENGRKRMLASAGELQKGNELALPSKYVNFLYLASHYEKLKGSPEDNEQKQLFVEQHKHYLDEIIEQISEFSKRVILADANLDKVLSAYNKHRDKPIREQAENIIHLFTLTNLGAPAAFKYFDTTIDRKRYTSTKEVLDATLIHQSITGLYETRIDLSQLGGDGGPAPAPAPAPAPGGTLGIEDEYRLHETSTEPDVSLGSTWLSDFPQAWAETGGMGLAVRQAPLIIPLKATSTPVSIQQYPMSHEARLGIKPHIQRLLDQGILVPCQSPWNTPLLPVKKPGTNDYRPVQDLREVNKRVEDIHPTVPNPYNLLSGLPPSHQWYTVLDLKDAFFCLRLHPTSQPLFAFEWRDPGMGISGQLTWTRLPQGFKNSPTLFDEALHRDLADFRIQHPDLILLQYVDDILLAATSELDCQQGTRALLQTLGDLGYRASAKKAQICQKQVKYLGYLLREGQRWLTEARKETVMGQPVPKTPRQLREFLGTAGFCRLWIPGFAEMAAPLYPLTKTGTLFSWGPDQQKAYQEIKQALLTAPALGLPDLTKPFELFVDEKQGYAKGVLTQKLGPWRRPVAYLSKKLDPVAAGWPPCLRMVAAIAVLTKDAGKLTMGQPLVILAPHAVEALVKQPPDRWLSNARMTHYQAMLLDTDRVQFGPVVALNPATLLPLPEEGAPHDCLEILAETHGTRPDLTDQPIPDADHTWYTDGSSFLQEGQRKAGAAVTTETEVIWAGALPAGTSAQRAELIALTQALKMAEGKRLNVYTDSRYAFATAHIHGEIYRRRGLLTSEGREIKNKSEILALLKALFLPKRLSIIHCLGHQKGDSAEARGNRLADQAAREAAIKTPPDTSTLLAGKRTADGSEFEKRTADGSEFESPKKKAKVE

SEQ ID NO: 6542 - protein, 2096 aa, synthetic construct; identical to SEQ ID NO: 6540

SEQ ID NO: 6543 - protein, 2096 aa, synthetic construct
MPAAKRVKLDGGDKKYSIGLDIGTNSVGWAVITDEYKVPSKKFKVLGNTDRHSIKKNLIGALLFDSGETAEATRLKRTARRRYTRRKNRICYLQEIFSNEMAKVDDSFFHRLEESFLVEEDKKHERHPIFGNIVDEVAYHEKYPTIYHLRKKLVDSTDKADLRLIYLALAHMIKFRGHFLIEGDLNPDNSDVDKLFIQLVQTYNQLFEENPINASGVDAKAILSARLSKSRRLENLIAQLPGEKKNGLFGNLIALSLGLTPNFKSNFDLAEDAKLQLSKDTYDDDLDNLLAQIGDQYADLFLAAKNLSDAILLSDILRVNTEITKAPLSASMIKRYDEHHQDLTLLKALVRQQLPEKYKEIFFDQSKNGYAGYIDGGASQEEFYKFIKPILEKMDGTEELLVKLNREDLLRKQRTFDNGSIPHQIHLGELHAILRRQEDFYPFLKDNREKIEKILTFRIPYYVGPLARGNSRFAWMTRKSEETITPWNFEEVVDKGASAQSFIERMTNFDKNLPNEKVLPKHSLLYEYFTVYNELTKVKYVTEGMRKPAFLSGEQKKAIVDLLFKTNRKVTVKQLKEDYFKKIECFDSVEISGVEDRFNASLGTYHDLLKIIKDKDFLDNEENEDILEDIVLTLTLFEDREMIEERLKTYAHLFDDKVMKQLKRRRYTGWGRLSRKLINGIRDKQSGKTILDFLKSDGFANRNFMQLIHDDSLTFKEDIQKAQVSGQGDSLHEHIANLAGSPAIKKGILQTVKVVDELVKVMGRHKPENIVIEMARENQTTQKGQKNSRERMKRIEEGIKELGSQILKEHPVENTQLQNEKLYLYYLQNGRDMYVDQELDINRLSDYDVDHIVPQSFLKDDSIDNKVLTRSDKARGKSDNVPSEEVVKKMKNYWRQLLNAKLITQRKFDNLTKAERGGLSELDKAGFIKRQLVETRQITKHVAQILDSRMNTKYDENDKLIREVKVITLKSKLVSDFRKDFQFYKVREINNYHHAHDAYLNAVVGTALIKKYPKLESEFVYGDYKVYDVRKMIAKSEQEIGKATAKYFFYSNIMNFFKTEITLANGEIRKRPLIETNGETGEIVWDKGRDFATVRKVLSMPQVNIVKKTEVQTGGFSKESILPKRNSDKLIARKKDWDPKKYGGFDSPTVAYSVLVVAKVEKGKSKKLKSVKELLGITIMERSSFEKNPIDFLEAKGYKEVKKDLIIKLPKYSLFELENGRKRMLASAGELQKGNELALPSKYVNFLYLASHYEKLKGSPEDNEQKQLFVEQHKHYLDEIIEQISEFSKRVILADANLDKVLSAYNKHRDKPIREQAENIIHLFTLTNLGAPAAFKYFDTTIDRKRYTSTKEVLDATLIHQSITGLYETRIDLSQLGGDGGPAPAPAPAPAPGGTLNIEDEYRLHETSKGPDVPLGSTWLSDFPQAWAETGGMGLAVRQAPLIIPLKATSTPVSIKQYPMSQEARLGIKPHIQRLLDQGILVPCQSPWNTPLLPVKKPGTNDYRPVQDLREVNKRVEDIHPTVPNPYNLLSGLPPSHQWYTVLDLKDAFFCLRLHPTSQSLFAFEWRDPEMGISGQLTWTRLPQGFKNSPTLFNEALHRDLADFRIQHPDLILLQYVDDLLLAATSELDCQQGTRALLQTLGDLGYRASAKKAQICQKQVKYLGYLLKEGQRWLTEARKETVMGQPTPKTPRQLREFLGTAGFCRLWIPGFAEMAAPLYPLTKPGTLFEWGPDQQKAYQEIKQALLTAPALGLPDLTKPFELFVDEKQGYAKGVLTQKLGPWRRPVAYLSKKLDPVAAGWPPCLRMVAAIAVLTKDAGKLTMGQPLVILAPHAVEALVKQPPDRWLSNARMTHYQALLLDTDRVQFGPIVALNPATLLPLPEEGLQHDCLDILAEAHGTRPDLTDQPLPDADHTWYTDGSSFLQEGQRKAGAAVTTETEVVWAKALPAGTSAQRAELIALTQALKMAEGKKLNVYTDSRYAFATAHIHGEIYRRRGWLTSEGKEIKNKDEILALLKALFLPKRLSIIHCPGHQKGNRAEARGNRMADQAAREVATRETPETSTLLAGKRTADGSEFEKRTADGSEFESPKKKAKVE

SEQ ID NO: 6544 - protein, 2090 aa, synthetic construct
MPAAKRVKLDGGDKKYSIGLDIGTNSVGWAVITDEYKVPSKKFKVLGNTDRHSIKKNLIGALLFDSGETAEATRLKRTARRRYTRRKNRICYLQEIFSNEMAKVDDSFFHRLEESFLVEEDKKHERHPIFGNIVDEVAYHEKYPTIYHLRKKLVDSTDKADLRLIYLALAHMIKFRGHFLIEGDLNPDNSDVDKLFIQLVQTYNQLFEENPINASGVDAKAILSARLSKSRRLENLIAQLPGEKKNGLFGNLIALSLGLTPNFKSNFDLAEDAKLQLSKDTYDDDLDNLLAQIGDQYADLFLAAKNLSDAILLSDILRVNTEITKAPLSASMIKRYDEHHQDLTLLKALVRQQLPEKYKEIFFDQSKNGYAGYIDGGASQEEFYKFIKPILEKMDGTEELLVKLNREDLLRKQRTFDNGSIPHQIHLGELHAILRRQEDFYPFLKDNREKIEKILTFRIPYYVGPLARGNSRFAWMTRKSEETITPWNFEEVVDKGASAQSFIERMTNFDKNLPNEKVLPKHSLLYEYFTVYNELTKVKYVTEGMRKPAFLSGEQKKAIVDLLFKTNRKVTVKQLKEDYFKKIECFDSVEISGVEDRFNASLGTYHDLLKIIKDKDFLDNEENEDILEDIVLTLTLFEDREMIEERLKTYAHLFDDKVMKQLKRRRYTGWGRLSRKLINGIRDKQSGKTILDFLKSDGFANRNFMQLIHDDSLTFKEDIQKAQVSGQGDSLHEHIANLAGSPAIKKGILQTVKVVDELVKVMGRHKPENIVIEMARENQTTQKGQKNSRERMKRIEEGIKELGSQILKEHPVENTQLQNEKLYLYYLQNGRDMYVDQELDINRLSDYDVDHIVPQSFLKDDSIDNKVLTRSDKARGKSDNVPSEEVVKKMKNYWRQLLNAKLITQRKFDNLTKAERGGLSELDKAGFIKRQLVETRQITKHVAQILDSRMNTKYDENDKLIREVKVITLKSKLVSDFRKDFQFYKVREINNYHHAHDAYLNAVVGTALIKKYPKLESEFVYGDYKVYDVRKMIAKSEQEIGKATAKYFFYSNIMNFFKTEITLANGEIRKRPLIETNGETGEIVWDKGRDFATVRKVLSMPQVNIVKKTEVQTGGFSKESILPKRNSDKLIARKKDWDPKKYGGFDSPTVAYSVLVVAKVEKGKSKKLKSVKELLGITIMERSSFEKNPIDFLEAKGYKEVKKDLIIKLPKYSLFELENGRKRMLASAGELQKGNELALPSKYVNFLYLASHYEKLKGSPEDNEQKQLFVEQHKHYLDEIIEQISEFSKRVILADANLDKVLSAYNKHRDKPIREQAENIIHLFTLTNLGAPAAFKYFDTTIDRKRYTSTKEVLDATLIHQSITGLYETRIDLSQLGGDGGPAPAPAPAPAPGGTLQLDDEYRLYSPLVKPDQNIQFWLEQFPQAWAETAGMGLAKQVPPQVIQLKASATPVSVRQYPLSKEAQEGIRPHVQRLIQQGILVPVQSPWNTPLLPVRKPGTNDYRPVQDLREVNKRVQDIHPTVPNPYNLLCALPPQRSWYTVLDLKDAFFCLRLHPTSQPLFAFEWRDPGTGRTGQLTWTRLPQGFKNSPTIFDEALHRDLANFRIQHPQVTLLQYVDDLLLAGATKQDCLEGTKALLLELSDLGYRASAKKAQICRREVTYLGYSLRDGQRWLTEARKKTVVQIPAPTTAKQVREFLGTAGFCRLWIPGFATLAAPLYPLTKEKGEFSWAPEHQKAFDAIKKALLSAPALALPDVTKPFTLYVDERKGVARGVLTQTLGPWRRPVAYLSKKLDPVASGWPVCLKAIAAVAILVKDADKLTLGQNITVIAPHALENIVRQPPDRWMTNARMTHYQSLLLTERVTFAPPAALNPATLLPEETDEPVTHDCHQLLIEETGVRKDLTDIPLTGEVLTWFTDGSSYVVEGKRMAGAAVVDGTRTIWASSLPEGTSAQKAELMALTQALRLAEGKSINIYTDSRYAFATAHVHGAIYKQRGLLTSAGREIKNKEEILSLLEALHLPKRLAIIHCPGHQKAKDPISRGNQMADRVAKQAAQGVNLLAGKRTADGSEFEKRTADGSEFESPKKKAKVE

SEQ ID NO: 6545 - protein, 2090 aa, synthetic construct; identical to SEQ ID NO: 6544

SEQ ID NO: 6546 - protein, 2087 aa, synthetic construct
MPAAKRVKLDGGDKKYSIGLDIGTNSVGWAVITDEYKVPSKKFKVLGNTDRHSIKKNLIGALLFDSGETAEATRLKRTARRRYTRRKNRICYLQEIFSNEMAKVDDSFFHRLEESFLVEEDKKHERHPIFGNIVDEVAYHEKYPTIYHLRKKLVDSTDKADLRLIYLALAHMIKFRGHFLIEGDLNPDNSDVDKLFIQLVQTYNQLFEENPINASGVDAKAILSARLSKSRRLENLIAQLPGEKKNGLFGNLIALSLGLTPNFKSNFDLAEDAKLQLSKDTYDDDLDNLLAQIGDQYADLFLAAKNLSDAILLSDILRVNTEITKAPLSASMIKRYDEHHQDLTLLKALVRQQLPEKYKEIFFDQSKNGYAGYIDGGASQEEFYKFIKPILEKMDGTEELLVKLNREDLLRKQRTFDNGSIPHQIHLGELHAILRRQEDFYPFLKDNREKIEKILTFRIPYYVGPLARGNSRFAWMTRKSEETITPWNFEEVVDKGASAQSFIERMTNFDKNLPNEKVLPKHSLLYEYFTVYNELTKVKYVTEGMRKPAFLSGEQKKAIVDLLFKTNRKVTVKQLKEDYFKKIECFDSVEISGVEDRFNASLGTYHDLLKIIKDKDFLDNEENEDILEDIVLTLTLFEDREMIEERLKTYAHLFDDKVMKQLKRRRYTGWGRLSRKLINGIRDKQSGKTILDFLKSDGFANRNFMQLIHDDSLTFKEDIQKAQVSGQGDSLHEHIANLAGSPAIKKGILQTVKVVDELVKVMGRHKPENIVIEMARENQTTQKGQKNSRERMKRIEEGIKELGSQILKEHPVENTQLQNEKLYLYYLQNGRDMYVDQELDINRLSDYDVDHIVPQSFLKDDSIDNKVLTRSDKARGKSDNVPSEEVVKKMKNYWRQLLNAKLITQRKFDNLTKAERGGLSELDKAGFIKRQLVETRQITKHVAQILDSRMNTKYDENDKLIREVKVITLKSKLVSDFRKDFQFYKVREINNYHHAHDAYLNAVVGTALIKKYPKLESEFVYGDYKVYDVRKMIAKSEQEIGKATAKYFFYSNIMNFFKTEITLANGEIRKRPLIETNGETGEIVWDKGRDFATVRKVLSMPQVNIVKKTEVQTGGFSKESILPKRNSDKLIARKKDWDPKKYGGFDSPTVAYSVLVVAKVEKGKSKKLKSVKELLGITIMERSSFEKNPIDFLEAKGYKEVKKDLIIKLPKYSLFELENGRKRMLASAGELQKGNELALPSKYVNFLYLASHYEKLKGSPEDNEQKQLFVEQHKHYLDEIIEQISEFSKRVILADANLDKVLSAYNKHRDKPIREQAENIIHLFTLTNLGAPAAFKYFDTTIDRKRYTSTKEVLDATLIHQSITGLYETRIDLSQLGGDGGPAPAPAPAPAPGGVPWLMKKPLQLTVLVPLHEYQERLLQQTALPKEQKELLQKLFLKYDALWQHWENQVGHRRIKPHNIATGTLAPRPQKQYPINPKAKPSIQIVIDDLLKQGVLIQQNSTMNTPVYPVPKPDGKWRMVLDYREVNKTIPLIAAQNQHSAGILSSIYRGKYKTTLDLTNGFWAHPITPESYWLTAFTWQGKQYCWTRLPQGFLNSPALFNADVVDLLKEIPNVQAYVDDIYISHDDPQEHLEQLEKIFSILLNAGYVVSLKKSEIAQREVEFLGFNITKEGRGLTDTFKQKLLNITPPKDLKQLQSILGKLNFARNFIPNYSELVKPLYTIVAPANGKFISWTEDNSNQLQHIISVLNQADNLEERNPETRLIIKVNSSPSAGYIRYYNEGSKRPIMYVNYIFSKAEAKFTQTEKLLTTMHKGLIKAMDLAMGQEILVYSPIVSMTKIQRTPLPERKALPVRWITWMTYLEDPRIQFHYDKSLPELQQIPNVTEDVIAKTKHPSEFAMVFYTDGSAIKHPDVNKSHSAGMGIAQVQFIPEYKIVHQWSIPLGDHTAQLAEIAAVEFACKKALKISGPVLIVTDSFYVAESANKELPYWKSNGFLNNKKKPLRHVSKWKSIAECLQLKPDIIIMHEKGHQQPMTTLHTEGNNLADKLATQGSYVVHAGKRTADGSEFEKRTADGSEFESPKKKAKVE

SEQ ID NO: 6547 - protein, 2176 aa, synthetic construct
MPAAKRVKLDGGDKKYSIGLDIGTNSVGWAVITDEYKVPSKKFKVLGNTDRHSIKKNLIGALLFDSGETAEATRLKRTARRRYTRRKNRICYLQEIFSNEMAKVDDSFFHRLEESFLVEEDKKHERHPIFGNIVDEVAYHEKYPTIYHLRKKLVDSTDKADLRLIYLALAHMIKFRGHFLIEGDLNPDNSDVDKLFIQLVQTYNQLFEENPINASGVDAKAILSARLSKSRRLENLIAQLPGEKKNGLFGNLIALSLGLTPNFKSNFDLAEDAKLQLSKDTYDDDLDNLLAQIGDQYADLFLAAKNLSDAILLSDILRVNTEITKAPLSASMIKRYDEHHQDLTLLKALVRQQLPEKYKEIFFDQSKNGYAGYIDGGASQEEFYKFIKPILEKMDGTEELLVKLNREDLLRKQRTFDNGSIPHQIHLGELHAILRRQEDFYPFLKDNREKIEKILTFRIPYYVGPLARGNSRFAWMTRKSEETITPWNFEEVVDKGASAQSFIERMTNFDKNLPNEKVLPKHSLLYEYFTVYNELTKVKYVTEGMRKPAFLSGEQKKAIVDLLFKTNRKVTVKQLKEDYFKKIECFDSVEISGVEDRFNASLGTYHDLLKIIKDKDFLDNEENEDILEDIVLTLTLFEDREMIEERLKTYAHLFDDKVMKQLKRRRYTGWGRLSRKLINGIRDKQSGKTILDFLKSDGFANRNFMQLIHDDSLTFKEDIQKAQVSGQGDSLHEHIANLAGSPAIKKGILQTVKVVDELVKVMGRHKPENIVIEMARENQTTQKGQKNSRERMKRIEEGIKELGSQILKEHPVENTQLQNEKLYLYYLQNGRDMYVDQELDINRLSDYDVDHIVPQSFLKDDSIDNKVLTRSDKARGKSDNVPSEEVVKKMKNYWRQLLNAKLITQRKFDNLTKAERGGLSELDKAGFIKRQLVETRQITKHVAQILDSRMNTKYDENDKLIREVKVITLKSKLVSDFRKDFQFYKVREINNYHHAHDAYLNAVVGTALIKKYPKLESEFVYGDYKVYDVRKMIAKSEQEIGKATAKYFFYSNIMNFFKTEITLANGEIRKRPLIETNGETGEIVWDKGRDFATVRKVLSMPQVNIVKKTEVQTGGFSKESILPKRNSDKLIARKKDWDPKKYGGFDSPTVAYSVLVVAKVEKGKSKKLKSVKELLGITIMERSSFEKNPIDFLEAKGYKEVKKDLIIKLPKYSLFELENGRKRMLASAGELQKGNELALPSKYVNFLYLASHYEKLKGSPEDNEQKQLFVEQHKHYLDEIIEQISEFSKRVILADANLDKVLSAYNKHRDKPIREQAENIIHLFTLTNLGAPAAFKYFDTTIDRKRYTSTKEVLDATLIHQSITGLYETRIDLSQLGGDGGPAPAPAPAPAPGGMDPLQLLQPLEAEIKGTKLKAHWNSGATITCVPEAFLEDERPIQTMLIKTIHGEKQQDVYYLTFKVQGRKVEAEVLASPYDYILLNPSDVPWLMKKPLQLTVLVPLHEYQERLLQQTALPKEQKELLQKLFLKYDALWQHWENQVGHRRIKPHNIATGTLAPRPQKQYPINPKAKPSIQIVIDDLLKQGVLIQQNSTMNTPVYPVPKPDGKWRMVLDYREVNKTIPLIAAQNQHSAGILSSIYRGKYKTTLDLTNGFWAHPITPESYWLTAFTWQGKQYCWTRLPQGFLNSPALFNADVVDLLKEIPNVQAYVDDIYISHDDPQEHLEQLEKIFSILLNAGYVVSLKKSEIAQREVEFLGFNITKEGRGLTDTFKQKLLNITPPKDLKQLQSILGLLNFARNFIPNYSELVKPLYTIVAPANGKFISWTEDNSNQLQHIISVLNQADNLEERNPETRLIIKVNSSPSAGYIRYYNEGSKRPIMYVNYIFSKAEAKFTQTEKLLTTMHKGLIKAMDLAMGQEILVYSPIVSMTKIQRTPLPERKALPVRWITWMTYLEDPRIQFHYDKSLPELQQIPNVTEDVIAKTKHPSEFAMVFYTDGSAIKHPDVNKSHSAGMGIAQVQFIPEYKIVHQWSIPLGDHTAQLAEIAAVEFACKKALKISGPVLIVTDSFYVAESANKELPYWKSNGFLNNKKKPLRHVSKWKSIAECLQLKPDIIIMHEKGHQQPMTTLHTEGNNLADKLATQGSYVVHAGKRTADGSEFEKRTADGSEFESPKKKAKVE

SEQ ID NO: 6548 - protein, 2176 aa, synthetic construct
MPAAKRVKLDGGDKKYSIGLDIGTNSVGWAVITDEYKVPSKKFKVLGNTDRHSIKKNLIGALLFDSGETAEATRLKRTARRRYTRRKNRICYLQEIFSNEMAKVDDSFFHRLEESFLVEEDKKHERHPIFGNIVDEVAYHEKYPTIYHLRKKLVDSTDKADLRLIYLALAHMIKFRGHFLIEGDLNPDNSDVDKLFIQLVQTYNQLFEENPINASGVDAKAILSARLSKSRRLENLIAQLPGEKKNGLFGNLIALSLGLTPNFKSNFDLAEDAKLQLSKDTYDDDLDNLLAQIGDQYADLFLAAKNLSDAILLSDILRVNTEITKAPLSASMIKRYDEHHQDLTLLKALVRQQLPEKYKEIFFDQSKNGYAGYIDGGASQEEFYKFIKPILEKMDGTEELLVKLNREDLLRKQRTFDNGSIPHQIHLGELHAILRRQEDFYPFLKDNREKIEKILTFRIPYYVGPLARGNSRFAWMTRKSEETITPWNFEEVVDKGASAQSFIERMTNFDKNLPNEKVLPKHSLLYEYFTVYNELTKVKYVTEGMRKPAFLSGEQKKAIVDLLFKTNRKVTVKQLKEDYFKKIECFDSVEISGVEDRFNASLGTYHDLLKIIKDKDFLDNEENEDILEDIVLTLTLFEDREMIEERLKTYAHLFDDKVMKQLKRRRYTGWGRLSRKLINGIRDKQSGKTILDFLKSDGFANRNFMQLIHDDSLTFKEDIQKAQVSGQGDSLHEHIANLAGSPAIKKGILQTVKVVDELVKVMGRHKPENIVIEMARENQTTQKGQKNSRERMKRIEEGIKELGSQILKEHPVENTQLQNEKLYLYYLQNGRDMYVDQELDINRLSDYDVDHIVPQSFLKDDSIDNKVLTRSDKARGKSDNVPSEEVVKKMKNYWRQLLNAKLITQRKFDNLTKAERGGLSELDKAGFIKRQLVETRQITKHVAQILDSRMNTKYDENDKLIREVKVITLKSKLVSDFRKDFQFYKVREINNYHHAHDAYLNAVVGTALIKKYPKLESEFVYGDYKVYDVRKMIAKSEQEIGKATAKYFFYSNIMNFFKTEITLANGEIRKRPLIETNGETGEIVWDKGRDFATVRKVLSMPQVNIVKKTEVQTGGFSKESILPKRNSDKLIARKKDWDPKKYGGFDSPTVAYSVLVVAKVEKGKSKKLKSVKELLGITIMERSSFEKNPIDFLEAKGYKEVKKDLIIKLPKYSLFELENGRKRMLASAGELQKGNELALPSKYVNFLYLASHYEKLKGSPEDNEQKQLFVEQHKHYLDEIIEQISEFSKRVILADANLDKVLSAYNKHRDKPIREQAENIIHLFTLTNLGAPAAFKYFDTTIDRKRYTSTKEVLDATLIHQSITGLYETRIDLSQLGGDGGPAPAPAPAPAPGGMDPLQLLQPLEAEIKGTKLKAHWNSGATITCVPQAFLEEEVPIKNIWIKTIHGEKEQPVYYLTFKIQGRKVEAEVISSPYDYILVSPSDIPWLMKKPLQLTTLVPLQEYEERLLKQTMLTGSYKEKLQSLFLKYDALWQHWENQVGHRRIKPHHIATGTVNPRPQKQYPINPKAKASIQTVINDLLKQGVLIQQNSIMNTPVYPVPKPDGKWRMVLDYREVNKTIPLIAAQNQHSAGILSSIFRGKYKTTLDLSNGFWAHSITPESYWLTAFTWLGQQYCWTRLPQGFLNSPALFNADVVDLLKEVPNVQVYVDDIYISHDDPREHLEQLEKVFSLLLNAGYVVSLKKSEIAQHEVEFLGFNITKEGRGLTETFKQKLLNITPPRDLKQLQSILGLLNFARNFIPNFSELVKPLYNIIATAPGKYITWTTDNSQQLQNIISMLNSAENLEERNPEVRLIMKVNTSPSAGYIRFYNEFAKRPIMYLNYVYTKAEVKFTNTEKLLTTIHKGLIKALDLGMGQEILVYSPIVSMTKIQKTPLPERKALPIRWITWMSYLEDPRIQFHYDKTLPELQQVPTVTDDIIAKIKHPSEFSMVFYTDGSAIKHPNVNKSHNAGMGIAQVQFKPEFTVINTWSIPLGDHTAQLAEVAAVEFACKKALKIDGPVLIVTDSFYVAESVNKELPYWQSNGFFNNKKKPLKHVSKWKSIADCIQLKPDIIIIHEKGHQPTASTFHTEGNNLADKLATQGSYVVNAGKRTADGSEFEKRTADGSEFESPKKKAKVE

SEQ ID NO: 6549 - protein, 2094 aa, synthetic construct
MPAAKRVKLDGGDKKYSIGLDIGTNSVGWAVITDEYKVPSKKFKVLGNTDRHSIKKNLIGALLFDSGETAEATRLKRTARRRYTRRKNRICYLQEIFSNEMAKVDDSFFHRLEESFLVEEDKKHERHPIFGNIVDEVAYHEKYPTIYHLRKKLVDSTDKADLRLIYLALAHMIKFRGHFLIEGDLNPDNSDVDKLFIQLVQTYNQLFEENPINASGVDAKAILSARLSKSRRLENLIAQLPGEKKNGLFGNLIALSLGLTPNFKSNFDLAEDAKLQLSKDTYDDDLDNLLAQIGDQYADLFLAAKNLSDAILLSDILRVNTEITKAPLSASMIKRYDEHHQDLTLLKALVRQQLPEKYKEIFFDQSKNGYAGYIDGGASQEEFYKFIKPILEKMDGTEELLVKLNREDLLRKQRTFDNGSIPHQIHLGELHAILRRQEDFYPFLKDNREKIEKILTFRIPYYVGPLARGNSRFAWMTRKSEETITPWNFEEVVDKGASAQSFIERMTNFDKNLPNEKVLPKHSLLYEYFTVYNELTKVKYVTEGMRKPAFLSGEQKKAIVDLLFKTNRKVTVKQLKEDYFKKIECFDSVEISGVEDRFNASLGTYHDLLKIIKDKDFLDNEENEDILEDIVLTLTLFEDREMIEERLKTYAHLFDDKVMKQLKRRRYTGWGRLSRKLINGIRDKQSGKTILDFLKSDGFANRNFMQLIHDDSLTFKEDIQKAQVSGQGDSLHEHIANLAGSPAIKKGILQTVKVVDELVKVMGRHKPENIVIEMARENQTTQKGQKNSRERMKRIEEGIKELGSQILKEHPVENTQLQNEKLYLYYLQNGRDMYVDQELDINRLSDYDVDHIVPQSFLKDDSIDNKVLTRSDKARGKSDNVPSEEVVKKMKNYWRQLLNAKLITQRKFDNLTKAERGGLSELDKAGFIKRQLVETRQITKHVAQILDSRMNTKYDENDKLIREVKVITLKSKLVSDFRKDFQFYKVREINNYHHAHDAYLNAVVGTALIKKYPKLESEFVYGDYKVYDVRKMIAKSEQEIGKATAKYFFYSNIMNFFKTEITLANGEIRKRPLIETNGETGEIVWDKGRDFATVRKVLSMPQVNIVKKTEVQTGGFSKESILPKRNSDKLIARKKDWDPKKYGGFDSPTVAYSVLVVAKVEKGKSKKLKSVKELLGITIMERSSFEKNPIDFLEAKGYKEVKKDLIIKLPKYSLFELENGRKRMLASAGELQKGNELALPSKYVNFLYLASHYEKLKGSPEDNEQKQLFVEQHKHYLDEIIEQISEFSKRVILADANLDKVLSAYNKHRDKPIREQAENIIHLFTLTNLGAPAAFKYFDTTIDRKRYTSTKEVLDATLIHQSITGLYETRIDLSQLGGDGGPAPAPAPAPAPGGVLNLEEEYRLHEKPVPSSIDPSWLQLFPTVWAERAGMGLANQVPPVVVELRSGASPVAVRQYPMSKEAREGIRPHIQRFLDLGVLVPCQSPWNTPLLPVKKPGTNDYRPVQDLREINKRVQDIHPTVPNPYNLLSSLPPSHTWYSVLDLKDAFFCLKLHPNSQPLFAFEWRDPEKGNTGQLTWTRLPQGFKNSPTLFNEALHRDLAPFRALNPQVVLLQYVDDLLVAAPTYRDCKEGTQKLLQELSKLGYRVSAKKAQLCQKEVTYLGYLLKEGKRWLTPARKATVMKIPPPTTPRQVREFLGKAGFCRLFIPGFASLAAPLYPLTKPSIPFIWTEEHQKAFDRIKEALLSAPALALPDLTKPFTLYVDERAGVARGVLTQTLGPWRRPVAYLSKKLDPVASGWPTCLKAVAAVALLLKDADKLTLGQNVTVIASHSLESIVRQPPDRWMTNARMTHYQSLLLNERVSFAPPAVLNPATLLPVESEATPVHRCSEILAEETGTRRDLKDQPLPGVPAWYTDGSSFIAEGKRRAGAAIVDGKRTVWASSLPEGTSAQKAELVALTQALRLAEGKDINIYTDSRYAFATAHIHGAIYKQRGWLTSAGKDIKNKEEILALLEAIHLPKRVAIIHCPGHQKGNDPVATGNRRADEAAKQAALSTRVLAETTKPAGKRTADGSEFEKRTADGSEFESPKKKAKVE

SEQ ID NO: 6550 - protein, 2096 aa, synthetic construct
MPAAKRVKLDGGDKKYSIGLDIGTNSVGWAVITDEYKVPSKKFKVLGNTDRHSIKKNLIGALLFDSGETAEATRLKRTARRRYTRRKNRICYLQEIFSNEMAKVDDSFFHRLEESFLVEEDKKHERHPIFGNIVDEVAYHEKYPTIYHLRKKLVDSTDKADLRLIYLALAHMIKFRGHFLIEGDLNPDNSDVDKLFIQLVQTYNQLFEENPINASGVDAKAILSARLSKSRRLENLIAQLPGEKKNGLFGNLIALSLGLTPNFKSNFDLAEDAKLQLSKDTYDDDLDNLLAQIGDQYADLFLAAKNLSDAILLSDILRVNTEITKAPLSASMIKRYDEHHQDLTLLKALVRQQLPEKYKEIFFDQSKNGYAGYIDGGASQEEFYKFIKPILEKMDGTEELLVKLNREDLLRKQRTFDNGSIPHQIHLGELHAILRRQEDFYPFLKDNREKIEKILTFRIPYYVGPLARGNSRFAWMTRKSEETITPWNFEEVVDKGASAQSFIERMTNFDKNLPNEKVLPKHSLLYEYFTVYNELTKVKYVTEGMRKPAFLSGEQKKAIVDLLFKTNRKVTVKQLKEDYFKKIECFDSVEISGVEDRFNASLGTYHDLLKIIKDKDFLDNEENEDILEDIVLTLTLFEDREMIEERLKTYAHLFDDKVMKQLKRRRYTGWGRLSRKLINGIRDKQSGKTILDFLKSDGFANRNFMQLIHDDSLTFKEDIQKAQVSGQGDSLHEHIANLAGSPAIKKGILQTVKVVDELVKVMGRHKPENIVIEMARENQTTQKGQKNSRERMKRIEEGIKELGSQILKEHPVENTQLQNEKLYLYYLQNGRDMYVDQELDINRLSDYDVDHIVPQSFLKDDSIDNKVLTRSDKARGKSDNVPSEEVVKKMKNYWRQLLNAKLITQRKFDNLTKAERGGLSELDKAGFIKRQLVETRQITKHVAQILDSRMNTKYDENDKLIREVKVITLKSKLVSDFRKDFQFYKVREINNYHHAHDAYLNAVVGTALIKKYPKLESEFVYGDYKVYDVRKMIAKSEQEIGKATAKYFFYSNIMNFFKTEITLANGEIRKRPLIETNGETGEIVWDKGRDFATVRKVLSMPQVNIVKKTEVQTGGFSKESILPKRNSDKLIARKKDWDPKKYGGFDSPTVAYSVLVVAKVEKGKSKKLKSVKELLGITIMERSSFEKNPIDFLEAKGYKEVKKDLIIKLPKYSLFELENGRKRMLASAGELQKGNELALPSKYVNFLYLASHYEKLKGSPEDNEQKQLFVEQHKHYLDEIIEQISEFSKRVILADANLDKVLSAYNKHRDKPIREQAENIIHLFTLTNLGAPAAFKYFDTTIDRKRYTSTKEVLDATLIHQSITGLYETRIDLSQLGGDGGPAPAPAPAPAPGGTLNIEDEYRLHETSKEPDVPLGSTWLSDFPQAWAETGGMGLAVRQAPLIIPLKATSTPVSIKQYPMSQEARLGIKPHIQRLLDQGILVPCQSPWNTPLLPVKKPGTNDYRPVQDLREVNKRVEDIHPTVPNPYNLLSGLPPSHQWYTVLDLKDAFFCLRLHPTSQPLFAFEWRDPEMGISGQLTWTRLPQGFKNSPTLFDEALHRDLADFRIQHPDLILLQYVDDLLLAATSEQDCQRGTRALLQTLGNLGYRASAKKAQICQKQVKYLGYLLKEGQRWLTEARKETVMGQPTPKTPRQLREFLGTAGFCRLWIPGFAEMAAPLYPLTKTGTLFNWGPDQQKAYQEIKQALLTAPALGLPDLTKPFELFVDEKQGYAKGVLTQKLGPWRRPVAYLSKKLDPVAAGWPPCLRMVAAIAVLTKDAGKLTMGQPLVILAPHAVEALVKQPPDRWLSNARMTHYQAMLLDTDRVQFGPVVALNPATLLPLPEKEAPHDCLEILAETHGTRPDLTDQPIPDADYTWYTDGSSFLQEGQRRAGAAVTTETEVIWARALPAGTSAQRAELIALTQALKMAEGKKLNVYTDSRYAFATAHVHGEIYRRRGLLTSEGREIKNKNEILALLKALFLPKRLSIIHCPGHQKGNSAEARGNRMADQAAREAAMKAVLETSTLLAGKRTADGSEFEKRTADGSEFESPKKKAKVE

SEQ ID NO: 6551 - protein, 2096 aa, synthetic construct
MPAAKRVKLDGGDKKYSIGLDIGTNSVGWAVITDEYKVPSKKFKVLGNTDRHSIKKNLIGALLFDSGETAEATRLKRTARRRYTRRKNRICYLQEIFSNEMAKVDDSFFHRLEESFLVEEDKKHERHPIFGNIVDEVAYHEKYPTIYHLRKKLVDSTDKADLRLIYLALAHMIKFRGHFLIEGDLNPDNSDVDKLFIQLVQTYNQLFEENPINASGVDAKAILSARLSKSRRLENLIAQLPGEKKNGLFGNLIALSLGLTPNFKSNFDLAEDAKLQLSKDTYDDDLDNLLAQIGDQYADLFLAAKNLSDAILLSDILRVNTEITKAPLSASMIKRYDEHHQDLTLLKALVRQQLPEKYKEIFFDQSKNGYAGYIDGGASQEEFYKFIKPILEKMDGTEELLVKLNREDLLRKQRTFDNGSIPHQIHLGELHAILRRQEDFYPFLKDNREKIEKILTFRIPYYVGPLARGNSRFAWMTRKSEETITPWNFEEVVDKGASAQSFIERMTNFDKNLPNEKVLPKHSLLYEYFTVYNELTKVKYVTEGMRKPAFLSGEQKKAIVDLLFKTNRKVTVKQLKEDYFKKIECFDSVEISGVEDRFNASLGTYHDLLKIIKDKDFLDNEENEDILEDIVLTLTLFEDREMIEERLKTYAHLFDDKVMKQLKRRRYTGWGRLSRKLINGIRDKQSGKTILDFLKSDGFANRNFMQLIHDDSLTFKEDIQKAQVSGQGDSLHEHIANLAGSPAIKKGILQTVKVVDELVKVMGRHKPENIVIEMARENQTTQKGQKNSRERMKRIEEGIKELGSQILKEHPVENTQLQNEKLYLYYLQNGRDMYVDQELDINRLSDYDVDHIVPQSFLKDDSIDNKVLTRSDKARGKSDNVPSEEVVKKMKNYWRQLLNAKLITQRKFDNLTKAERGGLSELDKAGFIKRQLVETRQITKHVAQILDSRMNTKYDENDKLIREVKVITLKSKLVSDFRKDFQFYKVREINNYHHAHDAYLNAVVGTALIKKYPKLESEFVYGDYKVYDVRKMIAKSEQEIGKATAKYFFYSNIMNFFKTEITLANGEIRKRPLIETNGETGEIVWDKGRDFATVRKVLSMPQVNIVKKTEVQTGGFSKESILPKRNSDKLIARKKDWDPKKYGGFDSPTVAYSVLVVAKVEKGKSKKLKSVKELLGITIMERSSFEKNPIDFLEAKGYKEVKKDLIIKLPKYSLFELENGRKRMLASAGELQKGNELALPSKYVNFLYLASHYEKLKGSPEDNEQKQLFVEQHKHYLDEIIEQISEFSKRVILADANLDKVLSAYNKHRDKPIREQAENIIHLFTLTNLGAPAAFKYFDTTIDRKRYTSTKEVLDATLIHQSITGLYETRIDLSQLGGDGGPAPAPAPAPAPGGTLNIEDEYRLHETSKEPDVPLGSTWLSDFPQAWAETGGMGLAVRQAPLIIPLKATSTPVSIKQYPMSQEARLGIKPHIQRLLDQGILVPCQSPWNTPLLPVKKPGTNDYRPVQDLREVNKRVEDIHPTVPNPYNLLSGLPPSHQWYTVLDLKDAFFCLRLHPTSQPLFAFEWRDPEMGISGQLTWTRLPQGFKNSPTLFNEALHRDLADFRIQHPDLILLQYVDDLLLAATSEQDCQRGTRALLQTLGNLGYRASAKKAQICQKQVKYLGYLLKEGQRWLTEARKETVMGQPTPKTPRQLREFLGTAGFCRLWIPGFAEMAAPLYPLTKPGTLFNWGPDQQKAYQEIKQALLTAPALGLPDLTKPFELFVDEKQGYAKGVLTQKLGPWRRPVAYLSKKLDPVAAGWPPCLRMVAAIAVLTKDAGKLTMGQPLVILAPHAVEALVKQPPDRWLSNARMTHYQAMLLDTDRVQFGPVVALNPATLLPLPEKEAPHDCLEILAETHGTRPDLTDQPIPDADYTWYTDGSSFLQEGQRRAGAAVTTETEVIWARALPAGTSAQRAELIALTQALKMAEGKKLNVYTDSRYAFATAHVHGEIYRRRGWLTSEGREIKNKNEILALLKALFLPKRLSIIHCPGHQKGNSAEARGNRMADQAAREAAMKAVLETSTLLAGKRTADGSEFEKRTADGSEFESPKKKAKVE

SEQ ID NO: 6552 - protein, 2100 aa, synthetic construct
MPAAKRVKLDGGDKKYSIGLDIGTNSVGWAVITDEYKVPSKKFKVLGNTDRHSIKKNLIGALLFDSGETAEATRLKRTARRRYTRRKNRICYLQEIFSNEMAKVDDSFFHRLEESFLVEEDKKHERHPIFGNIVDEVAYHEKYPTIYHLRKKLVDSTDKADLRLIYLALAHMIKFRGHFLIEGDLNPDNSDVDKLFIQLVQTYNQLFEENPINASGVDAKAILSARLSKSRRLENLIAQLPGEKKNGLFGNLIALSLGLTPNFKSNFDLAEDAKLQLSKDTYDDDLDNLLAQIGDQYADLFLAAKNLSDAILLSDILRVNTEITKAPLSASMIKRYDEHHQDLTLLKALVRQQLPEKYKEIFFDQSKNGYAGYIDGGASQEEFYKFIKPILEKMDGTEELLVKLNREDLLRKQRTFDNGSIPHQIHLGELHAILRRQEDFYPFLKDNREKIEKILTFRIPYYVGPLARGNSRFAWMTRKSEETITPWNFEEVVDKGASAQSFIERMTNFDKNLPNEKVLPKHSLLYEYFTVYNELTKVKYVTEGMRKPAFLSGEQKKAIVDLLFKTNRKVTVKQLKEDYFKKIECFDSVEISGVEDRFNASLGTYHDLLKIIKDKDFLDNEENEDILEDIVLTLTLFEDREMIEERLKTYAHLFDDKVMKQLKRRRYTGWGRLSRKLINGIRDKQSGKTILDFLKSDGFANRNFMQLIHDDSLTFKEDIQKAQVSGQGDSLHEHIANLAGSPAIKKGILQTVKVVDELVKVMGRHKPENIVIEMARENQTTQKGQKNSRERMKRIEEGIKELGSQILKEHPVENTQLQNEKLYLYYLQNGRDMYVDQELDINRLSDYDVDHIVPQSFLKDDSIDNKVLTRSDKARGKSDNVPSEEVVKKMKNYWRQLLNAKLITQRKFDNLTKAERGGLSELDKAGFIKRQLVETRQITKHVAQILDSRMNTKYDENDKLIREVKVITLKSKLVSDFRKDFQFYKVREINNYHHAHDAYLNAVVGTALIKKYPKLESEFVYGDYKVYDVRKMIAKSEQEIGKATAKYFFYSNIMNFFKTEITLANGEIRKRPLIETNGETGEIVWDKGRDFATVRKVLSMPQVNIVKKTEVQTGGFSKESILPKRNSDKLIARKKDWDPKKYGGFDSPTVAYSVLVVAKVEKGKSKKLKSVKELLGITIMERSSFEKNPIDFLEAKGYKEVKKDLIIKLPKYSLFELENGRKRMLASAGELQKGNELALPSKYVNFLYLASHYEKLKGSPEDNEQKQLFVEQHKHYLDEIIEQISEFSKRVILADANLDKVLSAYNKHRDKPIREQAENIIHLFTLTNLGAPAAFKYFDTTIDRKRYTSTKEVLDATLIHQSITGLYETRIDLSQLGGDGGPAPAPAPAPAPAPGGTAPLEEEYRLFLEAPIQNVTLLEQWKREIPKVWAEINPPGLASTQAPIHVQLLSTALPVRVRQYPITLEAKRSLRETIRKFRAAGILRPVHSPWNTPLLPVRKSGTSEYRMVQDLREVNKRVETIHPTVPNPYTLLSLLPPDRIWYSVLDLKDAFFCIPLAPESQLIFAFEWADAEEGESGQLTWTRLPQGFKNSPTLFDEALNRDLQGFRLDHPSVSLLQYVDDLLIAADTQAACLSATRDLLMTLAELGYRVSGKKAQLCQEEVTYLGFKIHKGSRSLSNSRTQAILQIPVPKTKRQVREFLGTIGYCRLWIPGFAELAQPLYAATRGGNDPLVWGEKEEEAFQSLKLALTQPPALALPSLDKPFQLFVEETSGAAKGVLTQALGPWKRPVAYLSKRLDPVAAGWPRCLRAIAAAALLTREASKLTFGQDIEITSSHNLESLLRSPPDKWLTNARITQYQVLLLDPPRVRFKQTAALNPATLLPETDDTLPIHHCLDTLDSLTSTRPDLTDQPLAQAEATLFTDGSSYIRDGKRYAGAAVVTLDSVIWAEPLPIGTSAQKAELIALTKALEWSKDKSVNIYTDSRYAFATLHVHGMIYRERGLLTAGGKAIKNAPEILALLTAVWLPKRVAVMHCKGHQKDDAPTSTGNRRADEVAREVAIRPLSTQATISAGKRTADGSEFEKRTADGSEFESPKKKAKVE

SEQ ID NO: 6553 - protein, 2175 aa, synthetic construct
MPAAKRVKLDGGDKKYSIGLDIGTNSVGWAVITDEYKVPSKKFKVLGNTDRHSIKKNLIGALLFDSGETAEATRLKRTARRRYTRRKNRICYLQEIFSNEMAKVDDSFFHRLEESFLVEEDKKHERHPIFGNIVDEVAYHEKYPTIYHLRKKLVDSTDKADLRLIYLALAHMIKFRGHFLIEGDLNPDNSDVDKLFIQLVQTYNQLFEENPINASGVDAKAILSARLSKSRRLENLIAQLPGEKKNGLFGNLIALSLGLTPNFKSNFDLAEDAKLQLSKDTYDDDLDNLLAQIGDQYADLFLAAKNLSDAILLSDILRVNTEITKAPLSASMIKRYDEHHQDLTLLKALVRQQLPEKYKEIFFDQSKNGYAGYIDGGASQEEFYKFIKPILEKMDGTEELLVKLNREDLLRKQRTFDNGSIPHQIHLGELHAILRRQEDFYPFLKDNREKIEKILTFRIPYYVGPLARGNSRFAWMTRKSEETITPWNFEEVVDKGASAQSFIERMTNFDKNLPNEKVLPKHSLLYEYFTVYNELTKVKYVTEGMRKPAFLSGEQKKAIVDLLFKTNRKVTVKQLKEDYFKKIECFDSVEISGVEDRFNASLGTYHDLLKIIKDKDFLDNEENEDILEDIVLTLTLFEDREMIEERLKTYAHLFDDKVMKQLKRRRYTGWGRLSRKLINGIRDKQSGKTILDFLKSDGFANRNFMQLIHDDSLTFKEDIQKAQVSGQGDSLHEHIANLAGSPAIKKGILQTVKVVDELVKVMGRHKPENIVIEMARENQTTQKGQKNSRERMKRIEEGIKELGSQILKEHPVENTQLQNEKLYLYYLQNGRDMYVDQELDINRLSDYDVDHIVPQSFLKDDSIDNKVLTRSDKARGKSDNVPSEEVVKKMKNYWRQLLNAKLITQRKFDNLTKAERGGLSELDKAGFIKRQLVETRQITKHVAQILDSRMNTKYDENDKLIREVKVITLKSKLVSDFRKDFQFYKVREINNYHHAHDAYLNAVVGTALIKKYPKLESEFVYGDYKVYDVRKMIAKSEQEIGKATAKYFFYSNIMNFFKTEITLANGEIRKRPLIETNGETGEIVWDKGRDFATVRKVLSMPQVNIVKKTEVQTGGFSKESILPKRNSDKLIARKKDWDPKKYGGFDSPTVAYSVLVVAKVEKGKSKKLKSVKELLGITIMERSSFEKNPIDFLEAKGYKEVKKDLIIKLPKYSLFELENGRKRMLASAGELQKGNELALPSKYVNFLYLASHYEKLKGSPEDNEQKQLFVEQHKHYLDEIIEQISEFSKRVILADANLDKVLSAYNKHRDKPIREQAENIIHLFTLTNLGAPAAFKYFDTTIDRKRYTSTKEVLDATLIHQSITGLYETRIDLSQLGGDGGPAPAPAPAPAPAPGGMDLLKPLTVERKGVKIKGYWNSQADITCVPKDLLQGEEPVRQQNVTTIHGTQEGDVYYVNLKIDGRRINTEVIGTTLDYAIITPGDVPWILKKPLELTIKLDLEEQQGTLLNNSILSKKGKEELKQLFEKYSALWQSWENQVGHRRIRPHKIATGTVKPTPQKQYHINPKAKPDIQIVINDLLKQGVLIQKESTMNTPVYPVPKPNGRWRMVLDYRAVNKVTPLIAVQNQHSYGILGSLFKGRYKTTIDLSNGFWAHPIVPEDYWITAFTWQGKQYCWTVLPQGFLNSPGLFNGDVVDLLQGIPNVEVYVDDVYISHDSEKEHLEYLDILFNRLKEAGYIISLKKSNIANSIVDFLGFQITNEGRGLTDTFKEKLENITAPTTLKQLQSILGLLNFARNFIPDFTELIAPLYALIPKSPKNYVPWQIEHSTTLETLITKLNGAEYLQGRKGDKTLIMKVNASYTTGYIRYYNEGEKKPISYVSIVFSKTELKFTELEKLLTTVHKGLLKALDLSMGQNIHVYSPIVSMQNIQKTPQTAKKALASRWLSWLSYLEDPRIRFFYDPQMPALKDLPAVDTGKDNKKHPSNFQHIFYTDGSAITSPTKEGHLNAGMGIVYFINKDGNLQKQQEWSISLGNHTAQFAEIAAFEFALKKCLPLGGNILVVTDSNYVAKAYNEELDVWASNGFVNNRKKPLKHISKWKSVADLKRLRPDVVVTHEPGHQKLDSSPHAYGNNLADQLATQASFKVHAGKRTADGSEFEKRTADGSEFESPKKKAKVE

SEQ ID NO: 6554 - protein, 2175 aa, synthetic construct
MPAAKRVKLDGGDKKYSIGLDIGTNSVGWAVITDEYKVPSKKFKVLGNTDRHSIKKNLIGALLFDSGETAEATRLKRTARRRYTRRKNRICYLQEIFSNEMAKVDDSFFHRLEESFLVEEDKKHERHPIFGNIVDEVAYHEKYPTIYHLRKKLVDSTDKADLRLIYLALAHMIKFRGHFLIEGDLNPDNSDVDKLFIQLVQTYNQLFEENPINASGVDAKAILSARLSKSRRLENLIAQLPGEKKNGLFGNLIALSLGLTPNFKSNFDLAEDAKLQLSKDTYDDDLDNLLAQIGDQYADLFLAAKNLSDAILLSDILRVNTEITKAPLSASMIKRYDEHHQDLTLLKALVRQQLPEKYKEIFFDQSKNGYAGYIDGGASQEEFYKFIKPILEKMDGTEELLVKLNREDLLRKQRTFDNGSIPHQIHLGELHAILRRQEDFYPFLKDNREKIEKILTFRIPYYVGPLARGNSRFAWMTRKSEETITPWNFEEVVDKGASAQSFIERMTNFDKNLPNEKVLPKHSLLYEYFTVYNELTKVKYVTEGMRKPAFLSGEQKKAIVDLLFKTNRKVTVKQLKEDYFKKIECFDSVEISGVEDRFNASLGTYHDLLKIIKDKDFLDNEENEDILEDIVLTLTLFEDREMIEERLKTYAHLFDDKVMKQLKRRRYTGWGRLSRKLINGIRDKQSGKTILDFLKSDGFANRNFMQLIHDDSLTFKEDIQKAQVSGQGDSLHEHIANLAGSPAIKKGILQTVKVVDELVKVMGRHKPENIVIEMARENQTTQKGQKNSRERMKRIEEGIKELGSQILKEHPVENTQLQNEKLYLYYLQNGRDMYVDQELDINRLSDYDVDHIVPQSFLKDDSIDNKVLTRSDKARGKSDNVPSEEVVKKMKNYWRQLLNAKLITQRKFDNLTKAERGGLSELDKAGFIKRQLVETRQITKHVAQILDSRMNTKYDENDKLIREVKVITLKSKLVSDFRKDFQFYKVREINNYHHAHDAYLNAVVGTALIKKYPKLESEFVYGDYKVYDVRKMIAKSEQEIGKATAKYFFYSNIMNFFKTEITLANGEIRKRPLIETNGETGEIVWDKGRDFATVRKVLSMPQVNIVKKTEVQTGGFSKESILPKRNSDKLIARKKDWDPKKYGGFDSPTVAYSVLVVAKVEKGKSKKLKSVKELLGITIMERSSFEKNPIDFLEAKGYKEVKKDLIIKLPKYSLFELENGRKRMLASAGELQKGNELALPSKYVNFLYLASHYEKLKGSPEDNEQKQLFVEQHKHYLDEIIEQISEFSKRVILADANLDKVLSAYNKHRDKPIREQAENIIHLFTLTNLGAPAAFKYFDTTIDRKRYTSTKEVLDATLIHQSITGLYETRIDLSQLGGDGGPAPAPAPAPAPAPGGMDLLKPLTVERKGVKIKGYWNSQADITCVPKDLLQGEEPVRQQNVTTIHGTQEGDVYYVNLKIDGRRINTEVIGTTLDYAIITPGDVPWILKKPLELTIKLDLEEQQGTLLNNSILSKKGKEELKQLFEKYSALWQSWENQVGHRRIRPHKIATGTVKPTPQKQYHINPKAKPDIQIVINDLLKQGVLIQKESTMNTPVYPVPKPNGRWRMVLDYRAVNKVTPLIAVQNQHSYGILGSLFKGRYKTTIDLSNGFWAHPIVPEDYWITAFTWQGKQYCWTVLPQGFLNSPGLFNGDVVDLLQGIPNVEVYVDDVYISHDSEKEHLEYLDILFNRLKEAGYIISLKKSNIANSIVDFLGFQITNEGRGLTDTFKEKLENITAPTTLKQLQSILGKLNFARNFIPDFTELIAPLYALIPKSPKNYVPWQIEHSTTLETLITKLNGAEYLQGRKGDKTLIMKVNASYTTGYIRYYNEGEKKPISYVSIVFSKTELKFTELEKLLTTVHKGLLKALDLSMGQNIHVYSPIVSMQNIQKTPQTAKKALASRWLSWLSYLEDPRIRFFYDPQMPALKDLPAVDTGKDNKKHPSNFQHIFYTDGSAITSPTKEGHLNAGMGIVYFINKDGNLQKQQEWSISLGNHTAQFAEIAAFEFALKKCLPLGGNILVVTDSNYVAKAYNEELDVWASNGFVNNRKKPLKHISKWKSVADLKRLRPDVVVTHEPGHQKLDSSPHAYGNNLADQLATQASFKVHAGKRTADGSEFEKRTADGSEFESPKKKAKVE

SEQ ID NO: 6555 - protein, 2097 aa, synthetic construct
MPAAKRVKLDGGDKKYSIGLDIGTNSVGWAVITDEYKVPSKKFKVLGNTDRHSIKKNLIGALLFDSGETAEATRLKRTARRRYTRRKNRICYLQEIFSNEMAKVDDSFFHRLEESFLVEEDKKHERHPIFGNIVDEVAYHEKYPTIYHLRKKLVDSTDKADLRLIYLALAHMIKFRGHFLIEGDLNPDNSDVDKLFIQLVQTYNQLFEENPINASGVDAKAILSARLSKSRRLENLIAQLPGEKKNGLFGNLIALSLGLTPNFKSNFDLAEDAKLQLSKDTYDDDLDNLLAQIGDQYADLFLAAKNLSDAILLSDILRVNTEITKAPLSASMIKRYDEHHQDLTLLKALVRQQLPEKYKEIFFDQSKNGYAGYIDGGASQEEFYKFIKPILEKMDGTEELLVKLNREDLLRKQRTFDNGSIPHQIHLGELHAILRRQEDFYPFLKDNREKIEKILTFRIPYYVGPLARGNSRFAWMTRKSEETITPWNFEEVVDKGASAQSFIERMTNFDKNLPNEKVLPKHSLLYEYFTVYNELTKVKYVTEGMRKPAFLSGEQKKAIVDLLFKTNRKVTVKQLKEDYFKKIECFDSVEISGVEDRFNASLGTYHDLLKIIKDKDFLDNEENEDILEDIVLTLTLFEDREMIEERLKTYAHLFDDKVMKQLKRRRYTGWGRLSRKLINGIRDKQSGKTILDFLKSDGFANRNFMQLIHDDSLTFKEDIQKAQVSGQGDSLHEHIANLAGSPAIKKGILQTVKVVDELVKVMGRHKPENIVIEMARENQTTQKGQKNSRERMKRIEEGIKELGSQILKEHPVENTQLQNEKLYLYYLQNGRDMYVDQELDINRLSDYDVDHIVPQSFLKDDSIDNKVLTRSDKARGKSDNVPSEEVVKKMKNYWRQLLNAKLITQRKFDNLTKAERGGLSELDKAGFIKRQLVETRQITKHVAQILDSRMNTKYDENDKLIREVKVITLKSKLVSDFRKDFQFYKVREINNYHHAHDAYLNAVVGTALIKKYPKLESEFVYGDYKVYDVRKMIAKSEQEIGKATAKYFFYSNIMNFFKTEITLANGEIRKRPLIETNGETGEIVWDKGRDFATVRKVLSMPQVNIVKKTEVQTGGFSKESILPKRNSDKLIARKKDWDPKKYGGFDSPTVAYSVLVVAKVEKGKSKKLKSVKELLGITIMERSSFEKNPIDFLEAKGYKEVKKDLIIKLPKYSLFELENGRKRMLASAGELQKGNELALPSKYVNFLYLASHYEKLKGSPEDNEQKQLFVEQHKHYLDEIIEQISEFSKRVILADANLDKVLSAYNKHRDKPIREQAENIIHLFTLTNLGAPAAFKYFDTTIDRKRYTSTKEVLDATLIHQSITGLYETRIDLSQLGGDGGPAPAPAPAPAPAPGGTLQLEEEYRLFEPESTQKQEMDIWLKNFPQAWAETGGMGTAHCQAPVLIQLKATATPISIRQYPMPHEAYQGIKPHIRRMLDQGILKPCQSPWNTPLLPVKKPGTEDYRPVQDLREVNKRVEDIHPTVPNPYNLLSTLPPSHPWYTVLDLKDAFFCLRLHSESQLLFAFEWRDPEIGLSGQLTWTRLPQGFKNSPTLFNEALHSDLADFRVRYPALVLLQYVDDLLLAAATRTECLEGTKALLETLGNKGYRASAKKAQICLQEVTYLGYSLKDGQRWLTKARKEAILSIPVPKNSRQVREFLGTAGYCRLWIPGFAELAAPLYPLTRPGTLFQWGTEQQLAFEDIKKALLSSPALGLPDITKPFELFIDENSGFAKGVLVQKLGPWKRPVAYLSKKLDTVASGWPPCLRMVAAIAILVKDAGKLTLGQPLTILTSHPVEALVRQPPNKWLSNARMTHYQAMLLDAERVHFGPTVSLNPATLLPLPSGGNHHDCLQILAETHGTRPDLTDQPLPDADLTWYTDGSSFIRNGEREAGAAVTTESEVIWAAPLPPGTSAQRAELIALTQALKMAEGKKLTVYTDSRYAFATTHVHGEIYRRRGWLTSEGKEIKNKNEILALLEALFLPKRLSIIHCPGHQKGDSPQAKGNRLADDTAKKAATETHSSLTVLPAGKRTADGSEFEKRTADGSEFESPKKKAKVE

SEQ ID NO: 6556 - protein, 2089 aa, synthetic construct
MPAAKRVKLDGGDKKYSIGLDIGTNSVGWAVITDEYKVPSKKFKVLGNTDRHSIKKNLIGALLFDSGETAEATRLKRTARRRYTRRKNRICYLQEIFSNEMAKVDDSFFHRLEESFLVEEDKKHERHPIFGNIVDEVAYHEKYPTIYHLRKKLVDSTDKADLRLIYLALAHMIKFRGHFLIEGDLNPDNSDVDKLFIQLVQTYNQLFEENPINASGVDAKAILSARLSKSRRLENLIAQLPGEKKNGLFGNLIALSLGLTPNFKSNFDLAEDAKLQLSKDTYDDDLDNLLAQIGDQYADLFLAAKNLSDAILLSDILRVNTEITKAPLSASMIKRYDEHHQDLTLLKALVRQQLPEKYKEIFFDQSKNGYAGYIDGGASQEEFYKFIKPILEKMDGTEELLVKLNREDLLRKQRTFDNGSIPHQIHLGELHAILRRQEDFYPFLKDNREKIEKILTFRIPYYVGPLARGNSRFAWMTRKSEETITPWNFEEVVDKGASAQSFIERMTNFDKNLPNEKVLPKHSLLYEYFTVYNELTKVKYVTEGMRKPAFLSGEQKKAIVDLLFKTNRKVTVKQLKEDYFKKIECFDSVEISGVEDRFNASLGTYHDLLKIIKDKDFLDNEENEDILEDIVLTLTLFEDREMIEERLKTYAHLFDDKVMKQLKRRRYTGWGRLSRKLINGIRDKQSGKTILDFLKSDGFANRNFMQLIHDDSLTFKEDIQKAQVSGQGDSLHEHIANLAGSPAIKKGILQTVKVVDELVKVMGRHKPENIVIEMARENQTTQKGQKNSRERMKRIEEGIKELGSQILKEHPVENTQLQNEKLYLYYLQNGRDMYVDQELDINRLSDYDVDHIVPQSFLKDDSIDNKVLTRSDKARGKSDNVPSEEVVKKMKNYWRQLLNAKLITQRKFDNLTKAERGGLSELDKAGFIKRQLVETRQITKHVAQILDSRMNTKYDENDKLIREVKVITLKSKLVSDFRKDFQFYKVREINNYHHAHDAYLNAVVGTALIKKYPKLESEFVYGDYKVYDVRKMIAKSEQEIGKATAKYFFYSNIMNFFKTEITLANGEIRKRPLIETNGETGEIVWDKGRDFATVRKVLSMPQVNIVKKTEVQTGGFSKESILPKRNSDKLIARKKDWDPKKYGGFDSPTVAYSVLVVAKVEKGKSKKLKSVKELLGITIMERSSFEKNPIDFLEAKGYKEVKKDLIIKLPKYSLFELENGRKRMLASAGELQKGNELALPSKYVNFLYLASHYEKLKGSPEDNEQKQLFVEQHKHYLDEIIEQISEFSKRVILADANLDKVLSAYNKHRDKPIREQAENIIHLFTLTNLGAPAAFKYFDTTIDRKRYTSTKEVLDATLIHQSITGLYETRIDLSQLGGDGGPAPAPAPAPAPAPGGVPWLTQQPLQLTILVPLQEYQEKILSKTALPEDQKQQLKTLFVKYDNLWQHWENQVGHRKIRPHNIATGDYPPRPQKQYPINPKAKPSIQIVIDDLLKQGVLTPQNSTMNTPVYPVPKPDGRWRMVLDYREVNKTIPLTAAQNQHSAGILATIVRQKYKTTLDLANGFWAHPITPESYWLTAFTWQGKQYCWTRLPQGFLNSPALFNADVVDLLKEIPNVQVYVDDIYLSHDDPKEHVQQLEKVFQILLQAGYVVSLKKSEIGQKTVEFLGFNITKEGRGLTDTFKTKLLNITPPKDLKQLQSILGKLNFARNFIPNFAELVQPLYNLIAPAKGKYIEWSEENTKQLNMVIEALNTASNLEERLPEQRLVIKVNTSPSAGYVRYYNETGKKPIMYLNYVFSKAELKFSMLEKLLTTMHKALIKAMDLAMGQEILVYSPIVSMTKIQKTPLPERKALPIRWITWMTYLEDPRIQFHYDKTLPELKHIPDVYTSSQSPVKHPSQYEGVFYTDGSAIKSPDPTKSNNAGMGIVHATYKPEYQVLNQWSIPLGNHTAQMAEIAAVEFACKKALKIPGPVLVITDSFYVAESANKELPYWKSNGFVNNKKKPLKHISKWKSIAECLSMKPDITIQHEKGISLQIPVFILKGNALADKLATQGSYVVNAGKRTADGSEFEKRTADGSEFESPKKKAKVE

SEQ ID NO: 6557 - protein, 2096 aa, synthetic construct
MPAAKRVKLDGGDKKYSIGLDIGTNSVGWAVITDEYKVPSKKFKVLGNTDRHSIKKNLIGALLFDSGETAEATRLKRTARRRYTRRKNRICYLQEIFSNEMAKVDDSFFHRLEESFLVEEDKKHERHPIFGNIVDEVAYHEKYPTIYHLRKKLVDSTDKADLRLIYLALAHMIKFRGHFLIEGDLNPDNSDVDKLFIQLVQTYNQLFEENPINASGVDAKAILSARLSKSRRLENLIAQLPGEKKNGLFGNLIALSLGLTPNFKSNFDLAEDAKLQLSKDTYDDDLDNLLAQIGDQYADLFLAAKNLSDAILLSDILRVNTEITKAPLSASMIKRYDEHHQDLTLLKALVRQQLPEKYKEIFFDQSKNGYAGYIDGGASQEEFYKFIKPILEKMDGTEELLVKLNREDLLRKQRTFDNGSIPHQIHLGELHAILRRQEDFYPFLKDNREKIEKILTFRIPYYVGPLARGNSRFAWMTRKSEETITPWNFEEVVDKGASAQSFIERMTNFDKNLPNEKVLPKHSLLYEYFTVYNELTKVKYVTEGMRKPAFLSGEQKKAIVDLLFKTNRKVTVKQLKEDYFKKIECFDSVEISGVEDRFNASLGTYHDLLKIIKDKDFLDNEENEDILEDIVLTLTLFEDREMIEERLKTYAHLFDDKVMKQLKRRRYTGWGRLSRKLINGIRDKQSGKTILDFLKSDGFANRNFMQLIHDDSLTFKEDIQKAQVSGQGDSLHEHIANLAGSPAIKKGILQTVKVVDELVKVMGRHKPENIVIEMARENQTTQKGQKNSRERMKRIEEGIKELGSQILKEHPVENTQLQNEKLYLYYLQNGRDMYVDQELDINRLSDYDVDHIVPQSFLKDDSIDNKVLTRSDKARGKSDNVPSEEVVKKMKNYWRQLLNAKLITQRKFDNLTKAERGGLSELDKAGFIKRQLVETRQITKHVAQILDSRMNTKYDENDKLIREVKVITLKSKLVSDFRKDFQFYKVREINNYHHAHDAYLNAVVGTALIKKYPKLESEFVYGDYKVYDVRKMIAKSEQEIGKATAKYFFYSNIMNFFKTEITLANGEIRKRPLIETNGETGEIVWDKGRDFATVRKVLSMPQVNIVKKTEVQTGGFSKESILPKRNSDKLIARKKDWDPKKYGGFDSPTVAYSVLVVAKVEKGKSKKLKSVKELLGITIMERSSFEKNPIDFLEAKGYKEVKKDLIIKLPKYSLFELENGRKRMLASAGELQKGNELALPSKYVNFLYLASHYEKLKGSPEDNEQKQLFVEQHKHYLDEIIEQISEFSKRVILADANLDKVLSAYNKHRDKPIREQAENIIHLFTLTNLGAPAAFKYFDTTIDRKRYTSTKEVLDATLIHQSITGLYETRIDLSQLGGDGGPAPAPAPAPAPAPGGVLNLEEEYRLHEKPVPSSIDPSWLQLFPTVWAERAGMGLANQVPPVVVELRSGASPVAVRQYPMSKEAREGIRPHIQKFLDLGVLVPCRSPWNTPLLPVKKPGTNDYRPVQDLREINKRVQDIHPTVPNPYNLLSSLPPSYTWYSVLDLKDAFFCLRLHPNSQPLFAFEWKDPEKGNTGQLTWTRLPQGFKNSPTLFNEALHRDLAPFRALNPQVVLLQYVDDLLVAAPTYEDCKKGTQKLLQELSKLGYRVSAKKAQLCQREVTYLGYLLKEGKRWLTPARKATVMKIPVPTTPRQVREFLGTAGFCRLWIPGFASLAAPLYPLTKPSIPFIWTEEHQQAFDHIKKALLSAPALALPDLTKPFTLYIDERAGVARGVLTQTLGPWRRPVAYLSKKLDPVASGWPTCLKAVAAVALLLKDADKLTLGQNVTVIASHSLESIVRQPPDRWMTNARMTHYQSLLLNERVSFAPPAVLNPATLLPVESEATPVHRCSEILAEETGTRRDLEDQPLPGVPTWYTDGSSFITEGKRRAGAPIVDGKRTVWASSLPEGTSAQKAELVALTQALRLAEGKNINIYTDSRYAFATAHIHGAIYKQRGWLTSAGKDIKNKEEILALLEAIHLPRRVAIIHCPGHQRGSNPVATGNRRADEAAKQAALSTRVLAGTTKPAGKRTADGSEFEKRTADGSEFESPKKKAKVE

SEQ ID NO: 6558 - protein, 2096 aa, synthetic construct
MPAAKRVKLDGGDKKYSIGLDIGTNSVGWAVITDEYKVPSKKFKVLGNTDRHSIKKNLIGALLFDSGETAEATRLKRTARRRYTRRKNRICYLQEIFSNEMAKVDDSFFHRLEESFLVEEDKKHERHPIFGNIVDEVAYHEKYPTIYHLRKKLVDSTDKADLRLIYLALAHMIKFRGHFLIEGDLNPDNSDVDKLFIQLVQTYNQLFEENPINASGVDAKAILSARLSKSRRLENLIAQLPGEKKNGLFGNLIALSLGLTPNFKSNFDLAEDAKLQLSKDTYDDDLDNLLAQIGDQYADLFLAAKNLSDAILLSDILRVNTEITKAPLSASMIKRYDEHHQDLTLLKALVRQQLPEKYKEIFFDQSKNGYAGYIDGGASQEEFYKFIKPILEKMDGTEELLVKLNREDLLRKQRTFDNGSIPHQIHLGELHAILRRQEDFYPFLKDNREKIEKILTFRIPYYVGPLARGNSRFAWMTRKSEETITPWNFEEVVDKGASAQSFIERMTNFDKNLPNEKVLPKHSLLYEYFTVYNELTKVKYVTEGMRKPAFLSGEQKKAIVDLLFKTNRKVTVKQLKEDYFKKIECFDSVEISGVEDRFNASLGTYHDLLKIIKDKDFLDNEENEDILEDIVLTLTLFEDREMIEERLKTYAHLFDDKVMKQLKRRRYTGWGRLSRKLINGIRDKQSGKTILDFLKSDGFANRNFMQLIHDDSLTFKEDIQKAQVSGQGDSLHEHIANLAGSPAIKKGILQTVKVVDELVKVMGRHKPENIVIEMARENQTTQKGQKNSRERMKRIEEGIKELGSQILKEHPVENTQLQNEKLYLYYLQNGRDMYVDQELDINRLSDYDVDHIVPQSFLKDDSIDNKVLTRSDKARGKSDNVPSEEVVKKMKNYWRQLLNAKLITQRKFDNLTKAERGGLSELDKAGFIKRQLVETRQITKHVAQILDSRMNTKYDENDKLIREVKVITLKSKLVSDFRKDFQFYKVREINNYHHAHDAYLNAVVGTALIKKYPKLESEFVYGDYKVYDVRKMIAKSEQEIGKATAKYFFYSNIMNFFKTEITLANGEIRKRPLIETNGETGEIVWDKGRDFATVRKVLSMPQVNIVKKTEVQTGGFSKESILPKRNSDKLIARKKDWDPKKYGGFDSPTVAYSVLVVAKVEKGKSKKLKSVKELLGITIMERSSFEKNPIDFLEAKGYKEVKKDLIIKLPKYSLFELENGRKRMLASAGELQKGNELALPSKYVNFLYLASHYEKLKGSPEDNEQKQLFVEQHKHYLDEIIEQISEFSKRVILADANLDKVLSAYNKHRDKPIREQAENIIHLFTLTNLGAPAAFKYFDTTIDRKRYTSTKEVLDATLIHQSITGLYETRIDLSQLGGDGGPAPAPAPAPAPAPGGVLNLEEEYRLHEKPVPSSIDPSWLQLFPTVWAERAGMGLANQVPPVVVELRSGASPVAVRQYPMSKEAREGIRPHIQKFLDLGVLVPCRSPWNTPLLPVKKPGTNDYRPVQDLREINKRVQDIHPTVPNPYNLLSSLPPSYTWYSVLDLKDAFFCLRLHPNSQPLFAFEWKDPEKGNTGQLTWTRLPQGFKNSPTLFNEALHRDLAPFRALNPQVVLLQYVDDLLVAAPTYEDCKKGTQKLLQELSKLGYRVSAKKAQLCQREVTYLGYLLKEGKRWLTPARKATVMKIPVPTTPRQVREFLGKAGFCRLFIPGFASLAAPLYPLTKPSIPFIWTEEHQQAFDHIKKALLSAPALALPDLTKPFTLYIDERAGVARGVLTQTLGPWRRPVAYLSKKLDPVASGWPTCLKAVAAVALLLKDADKLTLGQNVTVIASHSLESIVRQPPDRWMTNARMTHYQSLLLNERVSFAPPAVLNPATLLPVESEATPVHRCSEILAEETGTRRDLEDQPLPGVPTWYTDGSSFITEGKRRAGAPIVDGKRTVWASSLPEGTSAQKAELVALTQALRLAEGKNINIYTDSRYAFATAHIHGAIYKQRGWLTSAGKDIKNKEEILALLEAIHLPRRVAIIHCPGHQRGSNPVATGNRRADEAAKQAALSTRVLAGTTKPAGKRTADGSEFEKRTADGSEFESPKKKAKVE

SEQ ID NO: 6559 - protein, 2129 aa, synthetic construct
MPAAKRVKLDGGDKKYSIGLDIGTNSVGWAVITDEYKVPSKKFKVLGNTDRHSIKKNLIGALLFDSGETAEATRLKRTARRRYTRRKNRICYLQEIFSNEMAKVDDSFFHRLEESFLVEEDKKHERHPIFGNIVDEVAYHEKYPTIYHLRKKLVDSTDKADLRLIYLALAHMIKFRGHFLIEGDLNPDNSDVDKLFIQLVQTYNQLFEENPINASGVDAKAILSARLSKSRRLENLIAQLPGEKKNGLFGNLIALSLGLTPNFKSNFDLAEDAKLQLSKDTYDDDLDNLLAQIGDQYADLFLAAKNLSDAILLSDILRVNTEITKAPLSASMIKRYDEHHQDLTLLKALVRQQLPEKYKEIFFDQSKNGYAGYIDGGASQEEFYKFIKPILEKMDGTEELLVKLNREDLLRKQRTFDNGSIPHQIHLGELHAILRRQEDFYPFLKDNREKIEKILTFRIPYYVGPLARGNSRFAWMTRKSEETITPWNFEEVVDKGASAQSFIERMTNFDKNLPNEKVLPKHSLLYEYFTVYNELTKVKYVTEGMRKPAFLSGEQKKAIVDLLFKTNRKVTVKQLKEDYFKKIECFDSVEISGVEDRFNASLGTYHDLLKIIKDKDFLDNEENEDILEDIVLTLTLFEDREMIEERLKTYAHLFDDKVMKQLKRRRYTGWGRLSRKLINGIRDKQSGKTILDFLKSDGFANRNFMQLIHDDSLTFKEDIQKAQVSGQGDSLHEHIANLAGSPAIKKGILQTVKVVDELVKVMGRHKPENIVIEMARENQTTQKGQKNSRERMKRIEEGIKELGSQILKEHPVENTQLQNEKLYLYYLQNGRDMYVDQELDINRLSDYDVDHIVPQSFLKDDSIDNKVLTRSDKARGKSDNVPSEEVVKKMKNYWRQLLNAKLITQRKFDNLTKAERGGLSELDKAGFIKRQLVETRQITKHVAQILDSRMNTKYDENDKLIREVKVITLKSKLVSDFRKDFQFYKVREINNYHHAHDAYLNAVVGTALIKKYPKLESEFVYGDYKVYDVRKMIAKSEQEIGKATAKYFFYSNIMNFFKTEITLANGEIRKRPLIETNGETGEIVWDKGRDFATVRKVLSMPQVNIVKKTEVQTGGFSKESILPKRNSDKLIARKKDWDPKKYGGFDSPTVAYSVLVVAKVEKGKSKKLKSVKELLGITIMERSSFEKNPIDFLEAKGYKEVKKDLIIKLPKYSLFELENGRKRMLASAGELQKGNELALPSKYVNFLYLASHYEKLKGSPEDNEQKQLFVEQHKHYLDEIIEQISEFSKRVILADANLDKVLSAYNKHRDKPIREQAENIIHLFTLTNLGAPAAFKYFDTTIDRKRYTSTKEVLDATLIHQSITGLYETRIDLSQLGGDGGPAPAPAPAPAPAPGGLLGRDLLTKLKAQIQFSTEGPQVTWEDRPAMCLVLNLEEEYRLHEKPVPPSIDPSWLQLFPMVWAEKAGMGLANQVPPVVVELKSDASPVAVRQYPMSKEAREGIRPHIQRFLDLGILVPCQSPWNTPLLPVKKPGTNDYRPVQDLREVNKRVQDIHPTVPNPYNLLSSLPPSHTWYSVLDLKDAFFCLKLHPNSQPLFAFEWRDPEKGNTGQLTWTRLPQGFKNSPTLFNEALHRDLASFRALNPQVVMLQYVDDLLVAAPTYRDCKEGTRRLLQELSKLGYRVSAKKAQLCREEVTYLGYLLKGGKRWLTPARKATVMKIPTPTTPRQVREFLGTAGFCRLWIPGFASLAAPLYPLTRPKVPFTWTEAHQEAFGRIKEALLSAPALALPDLTKPFALYVDEKEGVARGVLTQTLGPWRRPVAYLSKKLDPVASGWPTCLKAIAAVALLLKDADKLTLGQNVLVIAPHNLESIVRQPPDRWMTNARMTHYQSLLLNERVSFAPPAILNPATLLPVESDDTPIHICSEILAEETGTRPDLRDQPLPGVPAWYTDGSSFIMDGRRQAGAAIVDNKRTVWASNLPEGTSAQKAELIALTQALRLAEGKSINIYTDSRYAFATAHVHGAIYKQRGWLTSAGKDIKNKEEILALLEAIHLPKRVAIIHCPGHQRGTDPVATGNRKADEAAKQAAQSTRILTETTKNAGKRTADGSEFEKRTADGSEFESPKKKAKVE

SEQ ID NO: 6560 - protein, 2220 aa, synthetic construct
MPAAKRVKLDGGDKKYSIGLDIGTNSVGWAVITDEYKVPSKKFKVLGNTDRHSIKKNLIGALLFDSGETAEATRLKRTARRRYTRRKNRICYLQEIFSNEMAKVDDSFFHRLEESFLVEEDKKHERHPIFGNIVDEVAYHEKYPTIYHLRKKLVDSTDKADLRLIYLALAHMIKFRGHFLIEGDLNPDNSDVDKLFIQLVQTYNQLFEENPINASGVDAKAILSARLSKSRRLENLIAQLPGEKKNGLFGNLIALSLGLTPNFKSNFDLAEDAKLQLSKDTYDDDLDNLLAQIGDQYADLFLAAKNLSDAILLSDILRVNTEITKAPLSASMIKRYDEHHQDLTLLKALVRQQLPEKYKEIFFDQSKNGYAGYIDGGASQEEFYKFIKPILEKMDGTEELLVKLNREDLLRKQRTFDNGSIPHQIHLGELHAILRRQEDFYPFLKDNREKIEKILTFRIPYYVGPLARGNSRFAWMTRKSEETITPWNFEEVVDKGASAQSFIERMTNFDKNLPNEKVLPKHSLLYEYFTVYNELTKVKYVTEGMRKPAFLSGEQKKAIVDLLFKTNRKVTVKQLKEDYFKKIECFDSVEISGVEDRFNASLGTYHDLLKIIKDKDFLDNEENEDILEDIVLTLTLFEDREMIEERLKTYAHLFDDKVMKQLKRRRYTGWGRLSRKLINGIRDKQSGKTILDFLKSDGFANRNFMQLIHDDSLTFKEDIQKAQVSGQGDSLHEHIANLAGSPAIKKGILQTVKVVDELVKVMGRHKPENIVIEMARENQTTQKGQKNSRERMKRIEEGIKELGSQILKEHPVENTQLQNEKLYLYYLQNGRDMYVDQELDINRLSDYDVDHIVPQSFLKDDSIDNKVLTRSDKARGKSDNVPSEEVVKKMKNYWRQLLNAKLITQRKFDNLTKAERGGLSELDKAGFIKRQLVETRQITKHVAQILDSRMNTKYDENDKLIREVKVITLKSKLVSDFRKDFQFYKVREINNYHHAHDAYLNAVVGTALIKKYPKLESEFVYGDYKVYDVRKMIAKSEQEIGKATAKYFFYSNIMNFFKTEITLANGEIRKRPLIETNGETGEIVWDKGRDFATVRKVLSMPQVNIVKKTEVQTGGFSKESILPKRNSDKLIARKKDWDPKKYGGFDSPTVAYSVLVVAKVEKGKSKKLKSVKELLGITIMERSSFEKNPIDFLEAKGYKEVKKDLIIKLPKYSLFELENGRKRMLASAGELQKGNELALPSKYVNFLYLASHYEKLKGSPEDNEQKQLFVEQHKHYLDEIIEQISEFSKRVILADANLDKVLSAYNKHRDKPIREQAENIIHLFTLTNLGAPAAFKYFDTTIDRKRYTSTKEVLDATLIHQSITGLYETRIDLSQLGGDGGPAPAPAPAPAPAPGGTLGDQGSRGSDPLPEPRVTLTVEGIPTEFLVNTGAEHSVLTKPMGKMGSKRTVVAGATGSKVYPWTTKRLLKIGQKQVTHSFLVIPECPAPLLGRDLLTKLKAQIQFSTEGPQVTWEDRPAMCLVLNLEEEYRLHEKPVPPSIDPSWLQLFPMVWAEKAGMGLANQVPPVVVELKSDASPVAVRQYPMSKEAREGIRPHIQRFLDLGILVPCQSPWNTPLLPVKKPGTNDYRPVQDLREVNKRVQDIHPTVPNPYNLLSSLPPSHTWYSVLDLKDAFFCLKLHPNSQPLFAFEWRDPEKGNTGQLTWTRLPQGFKNSPTLFNEALHRDLASFRALNPQVVMLQYVDDLLVAAPTYRDCKEGTRRLLQELSKLGYRVSAKKAQLCREEVTYLGYLLKGGKRWLTPARKATVMKIPTPTTPRQVREFLGTAGFCRLWIPGFASLAAPLYPLTRPKVPFTWTEAHQEAFGRIKEALLSAPALALPDLTKPFALYVDEKEGVARGVLTQTLGPWRRPVAYLSKKLDPVASGWPTCLKAIAAVALLLKDADKLTLGQNVLVIAPHNLESIVRQPPDRWMTNARMTHYQSLLLNERVSFAPPAILNPATLLPVESDDTPIHICSEILAEETGTRPDLRDQPLPGVPAWYTDGSSFIMDGRRQAGAAIVDNKRTVWASNLPEGTSAQKAELIALTQALRLAEGKSINIYTDSRYAFATAHVHGAIYKQRGWLTSAGKDIKNKEEILALLEAIHLPKRVAIIHCPGHQRGTDPVATGNRKADEAAKQAAQSTRILTETTKNAGKRTADGSEFEKRTADGSEFESPKKKAKVE

SEQ ID NO: 6561 - protein, 2098 aa, synthetic construct
MPAAKRVKLDGGDKKYSIGLDIGTNSVGWAVITDEYKVPSKKFKVLGNTDRHSIKKNLIGALLFDSGETAEATRLKRTARRRYTRRKNRICYLQEIFSNEMAKVDDSFFHRLEESFLVEEDKKHERHPIFGNIVDEVAYHEKYPTIYHLRKKLVDSTDKADLRLIYLALAHMIKFRGHFLIEGDLNPDNSDVDKLFIQLVQTYNQLFEENPINASGVDAKAILSARLSKSRRLENLIAQLPGEKKNGLFGNLIALSLGLTPNFKSNFDLAEDAKLQLSKDTYDDDLDNLLAQIGDQYADLFLAAKNLSDAILLSDILRVNTEITKAPLSASMIKRYDEHHQDLTLLKALVRQQLPEKYKEIFFDQSKNGYAGYIDGGASQEEFYKFIKPILEKMDGTEELLVKLNREDLLRKQRTFDNGSIPHQIHLGELHAILRRQEDFYPFLKDNREKIEKILTFRIPYYVGPLARGNSRFAWMTRKSEETITPWNFEEVVDKGASAQSFIERMTNFDKNLPNEKVLPKHSLLYEYFTVYNELTKVKYVTEGMRKPAFLSGEQKKAIVDLLFKTNRKVTVKQLKEDYFKKIECFDSVEISGVEDRFNASLGTYHDLLKIIKDKDFLDNEENEDILEDIVLTLTLFEDREMIEERLKTYAHLFDDKVMKQLKRRRYTGWGRLSRKLINGIRDKQSGKTILDFLKSDGFANRNFMQLIHDDSLTFKEDIQKAQVSGQGDSLHEHIANLAGSPAIKKGILQTVKVVDELVKVMGRHKPENIVIEMARENQTTQKGQKNSRERMKRIEEGIKELGSQILKEHPVENTQLQNEKLYLYYLQNGRDMYVDQELDINRLSDYDVDHIVPQSFLKDDSIDNKVLTRSDKARGKSDNVPSEEVVKKMKNYWRQLLNAKLITQRKFDNLTKAERGGLSELDKAGFIKRQLVETRQITKHVAQILDSRMNTKYDENDKLIREVKVITLKSKLVSDFRKDFQFYKVREINNYHHAHDAYLNAVVGTALIKKYPKLESEFVYGDYKVYDVRKMIAKSEQEIGKATAKYFFYSNIMNFFKTEITLANGEIRKRPLIETNGETGEIVWDKGRDFATVRKVLSMPQVNIVKKTEVQTGGFSKESILPKRNSDKLIARKKDWDPKKYGGFDSPTVAYSVLVVAKVEKGKSKKLKSVKELLGITIMERSSFEKNPIDFLEAKGYKEVKKDLIIKLPKYSLFELENGRKRMLASAGELQKGNELALPSKYVNFLYLASHYEKLKGSPEDNEQKQLFVEQHKHYLDEIIEQISEFSKRVILADANLDKVLSAYNKHRDKPIREQAENIIHLFTLTNLGAPAAFKYFDTTIDRKRYTSTKEVLDATLIHQSITGLYETRIDLSQLGGDGGPAPAPAPAPAPAPGGTLNIEDEYRLHETSKEPDVSLGSTWLSDFPQAWAETGGMGLAVRQAPLIIPLKATSTPVSIKQYPMSQEARLGIKPHIQRLLDQGILVPCQSPWNTPLLPVKKPGTNDYRPVQDLREVNKRVEDIHPTVPNPYNLLSGLPPSHQWYTVLDLKDAFFCLRLHPTSQPLFAFEWRDPEMGISGQLTWTRLPQGFKNSPTLFNEALHRDLAGFRIQHPDLILLQYVDDLLLAATSELDCQQGTRALLQTLGDLGYRASAKKAQICQKQVKYLGYLLKEGQRWLTEARKETVMGQPIPKTPRQLREFLGTAGFCRLWIPGFAEMAAPLYPLTKPGTLFNWGPDQQKAFQEIKQALLTAPALGLPDLTKPFELFVDEKQGYAKGVLTQKLGPWRRPVAYLSKKLDPVAAGWPPCLRMVAAIAVLTKDAGKLTMGQPLVILAPHAVEALVKQPPDRWLSNARMTHYQALLLDTDRVQFGPVVALNPATLLPLPEEGLQHDCLDILAEAHGTRSDLMDQPLPDADHTWYTDGSSFLQEGQRKAGAAVTTETEVIWARALPAGTSAQRAELIALTQALKMAEGKKLNVYTDSRYAFATAHIHGEIYRRRGWLTSEGKEIKNKDEILALLKALFLPKRLSIIHCPGHQKGNSAEARGNRMADQAAREVATRETPETSTLLAGKRTADGSEFEKRTADGSEFESPKKKAKVE

SEQ ID NO: 6562 - protein, 2098 aa, synthetic construct
MPAAKRVKLDGGDKKYSIGLDIGTNSVGWAVITDEYKVPSKKFKVLGNTDRHSIKKNLIGALLFDSGETAEATRLKRTARRRYTRRKNRICYLQEIFSNEMAKVDDSFFHRLEESFLVEEDKKHERHPIFGNIVDEVAYHEKYPTIYHLRKKLVDSTDKADLRLIYLALAHMIKFRGHFLIEGDLNPDNSDVDKLFIQLVQTYNQLFEENPINASGVDAKAILSARLSKSRRLENLIAQLPGEKKNGLFGNLIALSLGLTPNFKSNFDLAEDAKLQLSKDTYDDDLDNLLAQIGDQYADLFLAAKNLSDAILLSDILRVNTEITKAPLSASMIKRYDEHHQDLTLLKALVRQQLPEKYKEIFFDQSKNGYAGYIDGGASQEEFYKFIKPILEKMDGTEELLVKLNREDLLRKQRTFDNGSIPHQIHLGELHAILRRQEDFYPFLKDNREKIEKILTFRIPYYVGPLARGNSRFAWMTRKSEETITPWNFEEVVDKGASAQSFIERMTNFDKNLPNEKVLPKHSLLYEYFTVYNELTKVKYVTEGMRKPAFLSGEQKKAIVDLLFKTNRKVTVKQLKEDYFKKIECFDSVEISGVEDRFNASLGTYHDLLKIIKDKDFLDNEENEDILEDIVLTLTLFEDREMIEERLKTYAHLFDDKVMKQLKRRRYTGWGRLSRKLINGIRDKQSGKTILDFLKSDGFANRNFMQLIHDDSLTFKEDIQKAQVSGQGDSLHEHIANLAGSPAIKKGILQTVKVVDELVKVMGRHKPENIVIEMARENQTTQKGQKNSRERMKRIEEGIKELGSQILKEHPVENTQLQNEKLYLYYLQNGRDMYVDQELDINRLSDYDVDHIVPQSFLKDDSIDNKVLTRSDKARGKSDNVPSEEVVKKMKNYWRQLLNAKLITQRKFDNLTKAERGGLSELDKAGFIKRQLVETRQITKHVAQILDSRMNTKYDENDKLIREVKVITLKSKLVSDFRKDFQFYKVREINNYHHAHDAYLNAVVGTALIKKYPKLESEFVYGDYKVYDVRKMIAKSEQEIGKATAKYFFYSNIMNFFKTEITLANGEIRKRPLIETNGETGEIVWDKGRDFATVRKVLSMPQVNIVKKTEVQTGGFSKESILPKRNSDKLIARKKDWDPKKYGGFDSPTVAYSVLVVAKVEKGKSKKLKSVKELLGITIMERSSFEKNPIDFLEAKGYKEVKKDLIIKLPKYSLFELENGRKRMLASAGELQKGNELALPSKYVNFLYLASHYEKLKGSPEDNEQKQLFVEQHKHYLDEIIEQISEFSKRVILADANLDKVLSAYNKHRDKPIREQAENIIHLFTLTNLGAPAAFKYFDTTIDRKRYTSTKEVLDATLIHQSITGLYETRIDLSQLGGDGGPAPAPAPAPAPAPGGTLNIEDEHRLHETSKEPDVSLGSTWLSDFPQAWAETGGMGLAVRQAPLIIPLKATSTPVSIKQYPMSQEARLGIKPHIQRLLDQGILVPCQSPWNTPLLPVKKPGTNDYRPVQDLREVNKRVEDIHPTVPNPYNLLSGLPPSHQWYTVLDLKDAFFCLRLHPTSQPLFAFEWRDPEMGISGQLTWTRLPQGFKNSPTLFDEALHRDLADFRIQHPDLILLQYVDDLLLAATSELDCQQGTRALLQTLGNLGYRASAKKAQICQKQVKYLGYLLKEGQRWLTEARKETVMGQPTPKTPRQLREFLGTAGFCRLWIPGFAEMAAPLYPLTKTGTLFNWGPDQQKAYQEIKQALLTAPALGLPDLTKPFELFVDEKQGYAKGVLTQKLGPWRRPVAYLSKKLDPVAAGWPPCLRMVAAIAVLTKDAGKLTMGQPLVILAPHAVEALVKQPPDRWLSNARMTHYQALLLDTDRVQFGPVVALNPATLLPLPEEGLQHNCLDILAEAHGTRPDLTDQPLPDADHTWYTDGSSLLQEGQRKAGAAVTTETEVIWAKALPAGTSAQRAELIALTQALKMAEGKKLNVYTDSRYAFATAHIHGEIYRRRGLLTSEGKEIKNKDEILALLKALFLPKRLSIIHCPGHQKGHSAEARGNRMADQAARKAAITETPDTSTLLAGKRTADGSEFEKRTADGSEFESPKKKAKVE

SEQ ID NO: 6563 - protein, 2098 aa, synthetic construct; identical to SEQ ID NO: 6562

SEQ ID NO: 6564 - protein, 2092 aa, synthetic construct
MPAAKRVKLDGGDKKYSIGLDIGTNSVGWAVITDEYKVPSKKFKVLGNTDRHSIKKNLIGALLFDSGETAEATRLKRTARRRYTRRKNRICYLQEIFSNEMAKVDDSFFHRLEESFLVEEDKKHERHPIFGNIVDEVAYHEKYPTIYHLRKKLVDSTDKADLRLIYLALAHMIKFRGHFLIEGDLNPDNSDVDKLFIQLVQTYNQLFEENPINASGVDAKAILSARLSKSRRLENLIAQLPGEKKNGLFGNLIALSLGLTPNFKSNFDLAEDAKLQLSKDTYDDDLDNLLAQIGDQYADLFLAAKNLSDAILLSDILRVNTEITKAPLSASMIKRYDEHHQDLTLLKALVRQQLPEKYKEIFFDQSKNGYAGYIDGGASQEEFYKFIKPILEKMDGTEELLVKLNREDLLRKQRTFDNGSIPHQIHLGELHAILRRQEDFYPFLKDNREKIEKILTFRIPYYVGPLARGNSRFAWMTRKSEETITPWNFEEVVDKGASAQSFIERMTNFDKNLPNEKVLPKHSLLYEYFTVYNELTKVKYVTEGMRKPAFLSGEQKKAIVDLLFKTNRKVTVKQLKEDYFKKIECFDSVEISGVEDRFNASLGTYHDLLKIIKDKDFLDNEENEDILEDIVLTLTLFEDREMIEERLKTYAHLFDDKVMKQLKRRRYTGWGRLSRKLINGIRDKQSGKTILDFLKSDGFANRNFMQLIHDDSLTFKEDIQKAQVSGQGDSLHEHIANLAGSPAIKKGILQTVKVVDELVKVMGRHKPENIVIEMARENQTTQKGQKNSRERMKRIEEGIKELGSQILKEHPVENTQLQNEKLYLYYLQNGRDMYVDQELDINRLSDYDVDHIVPQSFLKDDSIDNKVLTRSDKARGKSDNVPSEEVVKKMKNYWRQLLNAKLITQRKFDNLTKAERGGLSELDKAGFIKRQLVETRQITKHVAQILDSRMNTKYDENDKLIREVKVITLKSKLVSDFRKDFQFYKVREINNYHHAHDAYLNAVVGTALIKKYPKLESEFVYGDYKVYDVRKMIAKSEQEIGKATAKYFFYSNIMNFFKTEITLANGEIRKRPLIETNGETGEIVWDKGRDFATVRKVLSMPQVNIVKKTEVQTGGFSKESILPKRNSDKLIARKKDWDPKKYGGFDSPTVAYSVLVVAKVEKGKSKKLKSVKELLGITIMERSSFEKNPIDFLEAKGYKEVKKDLIIKLPKYSLFELENGRKRMLASAGELQKGNELALPSKYVNFLYLASHYEKLKGSPEDNEQKQLFVEQHKHYLDEIIEQISEFSKRVILADANLDKVLSAYNKHRDKPIREQAENIIHLFTLTNLGAPAAFKYFDTTIDRKRYTSTKEVLDATLIHQSITGLYETRIDLSQLGGDGGPAPAPAPAPAPAPGGTLQLDDEYRLYSPLVKPDQNIQFWLEQFPQAWAETAGMGLAKQVPPQVIQLKASATPVSVRQYPLSKEAQEGIRPHVQRLIQQGILVPVQSPWNTPLLPVRKPGTNDYRPVQDLREVNKRVQDIHPTVPNPYNLLCALPPQRSWYTVLDLKDAFFCLRLHPTSQPLFAFEWRDPGTGRTGQLTWTRLPQGFKNSPTIFDEALHRDLANFRIQHPQVTLLQYVDDLLLAGATKQDCLEGTKALLLELSDLGYRASAKKAQICRREVTYLGYSLRDGQRWLTEARKKTVVQIPAPTTAKQVREFLGTAGFCRLWIPGFATLAAPLYPLTKEKGEFSWAPEHQKAFDAIKKALLSAPALALPDVTKPFTLYVDERKGVARGVLTQTLGPWRRPVAYLSKKLDPVASGWPVCLKAIAAVAILVKDADKLTLGQNITVIAPHALENIVRQPPDRWMTNARMTHYQSLLLTERVTFAPPAALNPATLLPEETDEPVTHDCHQLLIEETGVRKDLTDIPLTGEVLTWFTDGSSYVVEGKRMAGAAVVDGTRTIWASSLPEGTSAQKAELMALTQALRLAEGKSINIYTDSRYAFATAHVHGAIYKQRGLLTSAGREIKNKEEILSLLEALHLPKRLAIIHCPGHQKAKDPISRGNQMADRVAKQAAQGVNLLAGKRTADGSEFEKRTADGSEFESPKKKAKVE

SEQ ID NO: 6565 - protein, 2092 aa, synthetic construct; identical to SEQ ID NO: 6564

SEQ ID NO: 6566 - protein, 2178 aa, synthetic construct
MPAAKRVKLDGGDKKYSIGLDIGTNSVGWAVITDEYKVPSKKFKVLGNTDRHSIKKNLIGALLFDSGETAEATRLKRTARRRYTRRKNRICYLQEIFSNEMAKVDDSFFHRLEESFLVEEDKKHERHPIFGNIVDEVAYHEKYPTIYHLRKKLVDSTDKADLRLIYLALAHMIKFRGHFLIEGDLNPDNSDVDKLFIQLVQTYNQLFEENPINASGVDAKAILSARLSKSRRLENLIAQLPGEKKNGLFGNLIALSLGLTPNFKSNFDLAEDAKLQLSKDTYDDDLDNLLAQIGDQYADLFLAAKNLSDAILLSDILRVNTEITKAPLSASMIKRYDEHHQDLTLLKALVRQQLPEKYKEIFFDQSKNGYAGYIDGGASQEEFYKFIKPILEKMDGTEELLVKLNREDLLRKQRTFDNGSIPHQIHLGELHAILRRQEDFYPFLKDNREKIEKILTFRIPYYVGPLARGNSRFAWMTRKSEETITPWNFEEVVDKGASAQSFIERMTNFDKNLPNEKVLPKHSLLYEYFTVYNELTKVKYVTEGMRKPAFLSGEQKKAIVDLLFKTNRKVTVKQLKEDYFKKIECFDSVEISGVEDRFNASLGTYHDLLKIIKDKDFLDNEENEDILEDIVLTLTLFEDREMIEERLKTYAHLFDDKVMKQLKRRRYTGWGRLSRKLINGIRDKQSGKTILDFLKSDGFANRNFMQLIHDDSLTFKEDIQKAQVSGQGDSLHEHIANLAGSPAIKKGILQTVKVVDELVKVMGRHKPENIVIEMARENQTTQKGQKNSRERMKRIEEGIKELGSQILKEHPVENTQLQNEKLYLYYLQNGRDMYVDQELDINRLSDYDVDHIVPQSFLKDDSIDNKVLTRSDKARGKSDNVPSEEVVKKMKNYWRQLLNAKLITQRKFDNLTKAERGGLSELDKAGFIKRQLVETRQITKHVAQILDSRMNTKYDENDKLIREVKVITLKSKLVSDFRKDFQFYKVREINNYHHAHDAYLNAVVGTALIKKYPKLESEFVYGDYKVYDVRKMIAKSEQEIGKATAKYFFYSNIMNFFKTEITLANGEIRKRPLIETNGETGEIVWDKGRDFATVRKVLSMPQVNIVKKTEVQTGGFSKESILPKRNSDKLIARKKDWDPKKYGGFDSPTVAYSVLVVAKVEKGKSKKLKSVKELLGITIMERSSFEKNPIDFLEAKGYKEVKKDLIIKLPKYSLFELENGRKRMLASAGELQKGNELALPSKYVNFLYLASHYEKLKGSPEDNEQKQLFVEQHKHYLDEIIEQISEFSKRVILADANLDKVLSAYNKHRDKPIREQAENIIHLFTLTNLGAPAAFKYFDTTIDRKRYTSTKEVLDATLIHQSITGLYETRIDLSQLGGDGGPAPAPAPAPAPAPGGMDPLQLLQPLEAEIKGTKLKAHWNSGATITCVPQAFLEEEVPIKNIWIKTIHGEKEQPVYYLTFKIQGRKVEAEVISSPYDYILVSPSDIPWLMKKPLQLTTLVPLQEYEERLLKQTMLTGSYKEKLQSLFLKYDALWQHWENQVGHRRIKPHHIATGTVNPRPQKQYPINPKAKASIQTVINDLLKQGVLIQQNSIMNTPVYPVPKPDGKWRMVLDYREVNKTIPLIAAQNQHSAGILSSIFRGKYKTTLDLSNGFWAHSITPESYWLTAFTWLGQQYCWTRLPQGFLNSPALFNADVVDLLKEVPNVQVYVDDIYISHDDPREHLEQLEKVFSLLLNAGYVVSLKKSEIAQHEVEFLGFNITKEGRGLTETFKQKLLNITPPRDLKQLQSILGLLNFARNFIPNFSELVKPLYNIIATAPGKYITWTTDNSQQLQNIISMLNSAENLEERNPEVRLIMKVNTSPSAGYIRFYNEFAKRPIMYLNYVYTKAEVKFTNTEKLLTTIHKGLIKALDLGMGQEILVYSPIVSMTKIQKTPLPERKALPIRWITWMSYLEDPRIQFHYDKTLPELQQVPTVTDDIIAKIKHPSEFSMVFYTDGSAIKHPNVNKSHNAGMGIAQVQFKPEFTVINTWSIPLGDHTAQLAEVAAVEFACKKALKIDGPVLIVTDSFYVAESVNKELPYWQSNGFFNNKKKPLKHVSKWKSIADCIQLKPDIIIIHEKGHQPTASTFHTEGNNLADKLATQGSYVVNAGKRTADGSEFEKRTADGSEFESPKKKAKVE

SEQ ID NO: 6567 - protein, 2096 aa, synthetic construct; identical to SEQ ID NO: 4509

SEQ ID NO: 6568 - protein, 2098 aa, synthetic construct; identical to SEQ ID NO: 4510

SEQ ID NO: 6569 - protein, 2093 aa, synthetic construct
MPAAKRVKLDGGDKKYSIGLDIGTNSVGWAVITDEYKVPSKKFKVLGNTDRHSIKKNLIGALLFDSGETAEATRLKRTARRRYTRRKNRICYLQEIFSNEMAKVDDSFFHRLEESFLVEEDKKHERHPIFGNIVDEVAYHEKYPTIYHLRKKLVDSTDKADLRLIYLALAHMIKFRGHFLIEGDLNPDNSDVDKLFIQLVQTYNQLFEENPINASGVDAKAILSARLSKSRRLENLIAQLPGEKKNGLFGNLIALSLGLTPNFKSNFDLAEDAKLQLSKDTYDDDLDNLLAQIGDQYADLFLAAKNLSDAILLSDILRVNTEITKAPLSASMIKRYDEHHQDLTLLKALVRQQLPEKYKEIFFDQSKNGYAGYIDGGASQEEFYKFIKPILEKMDGTEELLVKLNREDLLRKQRTFDNGSIPHQIHLGELHAILRRQEDFYPFLKDNREKIEKILTFRIPYYVGPLARGNSRFAWMTRKSEETITPWNFEEVVDKGASAQSFIERMTNFDKNLPNEKVLPKHSLLYEYFTVYNELTKVKYVTEGMRKPAFLSGEQKKAIVDLLFKTNRKVTVKQLKEDYFKKIECFDSVEISGVEDRFNASLGTYHDLLKIIKDKDFLDNEENEDILEDIVLTLTLFEDREMIEERLKTYAHLFDDKVMKQLKRRRYTGWGRLSRKLINGIRDKQSGKTILDFLKSDGFANRNFMQLIHDDSLTFKEDIQKAQVSGQGDSLHEHIANLAGSPAIKKGILQTVKVVDELVKVMGRHKPENIVIEMARENQTTQKGQKNSRERMKRIEEGIKELGSQILKEHPVENTQLQNEKLYLYYLQNGRDMYVDQELDINRLSDYDVDHIVPQSFLKDDSIDNKVLTRSDKARGKSDNVPSEEVVKKMKNYWRQLLNAKLITQRKFDNLTKAERGGLSELDKAGFIKRQLVETRQITKHVAQILDSRMNTKYDENDKLIREVKVITLKSKLVSDFRKDFQFYKVREINNYHHAHDAYLNAVVGTALIKKYPKLESEFVYGDYKVYDVRKMIAKSEQEIGKATAKYFFYSNIMNFFKTEITLANGEIRKRPLIETNGETGEIVWDKGRDFATVRKVLSMPQVNIVKKTEVQTGGFSKESILPKRNSDKLIARKKDWDPKKYGGFDSPTVAYSVLVVAKVEKGKSKKLKSVKELLGITIMERSSFEKNPIDFLEAKGYKEVKKDLIIKLPKYSLFELENGRKRMLASAGELQKGNELALPSKYVNFLYLASHYEKLKGSPEDNEQKQLFVEQHKHYLDEIIEQISEFSKRVILADANLDKVLSAYNKHRDKPIREQAENIIHLFTLTNLGAPAAFKYFDTTIDRKRYTSTKEVLDATLIHQSITGLYETRIDLSQLGGDGGGGSGGGGGTAPLEEEYRLFLEAPIQNVTLLEQWKREIPKVWAEINPPGLASTQAPIHVQLLSTALPVRVRQYPITLEAKRSLRETIRKFRAAGILRPVHSPWNTPLLPVRKSGTSEYRMVQDLREVNKRVETIHPTVPNPYTLLSLLPPDRIWYSVLDLKDAFFCIPLAPESQLIFAFEWADAEEGESGQLTWTRLPQGFKNSPTLFNEALNRDLQGFRLDHPSVSLLQYVDDLLIAADTQAACLSATRDLLMTLAELGYRVSGKKAQLCQEEVTYLGFKIHKGSRSLSNSRTQAILQIPVPKTKRQVREFLGTIGYCRLWIPGFAELAQPLYAATRPGNDPLVWGEKEEEAFQSLKLALTQPPALALPSLDKPFQLFVEETSGAAKGVLTQALGPWKRPVAYLSKRLDPVAAGWPRCLRAIAAAALLTREASKLTFGQDIEITSSHNLESLLRSPPDKWLTNARITQYQVLLLDPPRVRFKQTAALNPATLLPETDDTLPIHHCLDTLDSLTSTRPDLTDQPLAQAEATLFTDGSSYIRDGKRYAGAAVVTLDSVIWAEPLPIGTSAQKAELIALTKALEWSKDKSVNIYTDSRYAFATLHVHGMIYRERGWLTAGGKAIKNAPEILALLTAVWLPKRVAVMHCKGHQKDDAPTSTGNRRADEVAREVAIRPLSTQATISAGKRTADGSEFEKRTADGSEFESPKKKAKVE

SEQ ID NO: 6570 - protein, 2082 aa, synthetic construct
MPAAKRVKLDGGDKKYSIGLDIGTNSVGWAVITDEYKVPSKKFKVLGNTDRHSIKKNLIGALLFDSGETAEATRLKRTARRRYTRRKNRICYLQEIFSNEMAKVDDSFFHRLEESFLVEEDKKHERHPIFGNIVDEVAYHEKYPTIYHLRKKLVDSTDKADLRLIYLALAHMIKFRGHFLIEGDLNPDNSDVDKLFIQLVQTYNQLFEENPINASGVDAKAILSARLSKSRRLENLIAQLPGEKKNGLFGNLIALSLGLTPNFKSNFDLAEDAKLQLSKDTYDDDLDNLLAQIGDQYADLFLAAKNLSDAILLSDILRVNTEITKAPLSASMIKRYDEHHQDLTLLKALVRQQLPEKYKEIFFDQSKNGYAGYIDGGASQEEFYKFIKPILEKMDGTEELLVKLNREDLLRKQRTFDNGSIPHQIHLGELHAILRRQEDFYPFLKDNREKIEKILTFRIPYYVGPLARGNSRFAWMTRKSEETITPWNFEEVVDKGASAQSFIERMTNFDKNLPNEKVLPKHSLLYEYFTVYNELTKVKYVTEGMRKPAFLSGEQKKAIVDLLFKTNRKVTVKQLKEDYFKKIECFDSVEISGVEDRFNASLGTYHDLLKIIKDKDFLDNEENEDILEDIVLTLTLFEDREMIEERLKTYAHLFDDKVMKQLKRRRYTGWGRLSRKLINGIRDKQSGKTILDFLKSDGFANRNFMQLIHDDSLTFKEDIQKAQVSGQGDSLHEHIANLAGSPAIKKGILQTVKVVDELVKVMGRHKPENIVIEMARENQTTQKGQKNSRERMKRIEEGIKELGSQILKEHPVENTQLQNEKLYLYYLQNGRDMYVDQELDINRLSDYDVDHIVPQSFLKDDSIDNKVLTRSDKARGKSDNVPSEEVVKKMKNYWRQLLNAKLITQRKFDNLTKAERGGLSELDKAGFIKRQLVETRQITKHVAQILDSRMNTKYDENDKLIREVKVITLKSKLVSDFRKDFQFYKVREINNYHHAHDAYLNAVVGTALIKKYPKLESEFVYGDYKVYDVRKMIAKSEQEIGKATAKYFFYSNIMNFFKTEITLANGEIRKRPLIETNGETGEIVWDKGRDFATVRKVLSMPQVNIVKKTEVQTGGFSKESILPKRNSDKLIARKKDWDPKKYGGFDSPTVAYSVLVVAKVEKGKSKKLKSVKELLGITIMERSSFEKNPIDFLEAKGYKEVKKDLIIKLPKYSLFELENGRKRMLASAGELQKGNELALPSKYVNFLYLASHYEKLKGSPEDNEQKQLFVEQHKHYLDEIIEQISEFSKRVILADANLDKVLSAYNKHRDKPIREQAENIIHLFTLTNLGAPAAFKYFDTTIDRKRYTSTKEVLDATLIHQSITGLYETRIDLSQLGGDGGGGSGGGGGVPWILKKPLELTIKLDLEEQQGTLLNNSILSKKGKEELKQLFEKYSALWQSWENQVGHRRIRPHKIATGTVKPTPQKQYHINPKAKPDIQIVINDLLKQGVLIQKESTMNTPVYPVPKPNGRWRMVLDYRAVNKVTPLIAVQNQHSYGILGSLFKGRYKTTIDLSNGFWAHPIVPEDYWITAFTWQGKQYCWTVLPQGFLNSPGLFTGDVVDLLQGIPNVEVYVDDVYISHDSEKEHLEYLDILFNRLKEAGYIISLKKSNIANSIVDFLGFQITNEGRGLTDTFKEKLENITAPTTLKQLQSILGLLNFARNFIPDFTELIAPLYALIPKSTKNYVPWQIEHSTTLETLITKLNGAEYLQGRKGDKTLIMKVNASYTTGYIRYYNEGEKKPISYVSIVFSKTELKFTELEKLLTTVHKGLLKALDLSMGQNIHVYSPIVSMQNIQKTPQTAKKALASRWLSWLSYLEDPRIRFFYDPQMPALKDLPAVDTGKDNKKHPSNFQHIFYTDGSAITSPTKEGHLNAGMGIVYFINKDGNLQKQQEWSISLGNHTAQFAEIAAFEFALKKCLPLGGNILVVTDSNYVAKAYNEELDVWASNGFVNNRKKPLKHISKWKSVADLKRLRPDVVVTHEPGHQKLDSSPHAYGNNLADQLATQASFKVHAGKRTADGSEFEKRTADGSEFESPKKKAKVE

SEQ ID NO: 6571 - protein, 2082 aa, synthetic construct
MPAAKRVKLDGGDKKYSIGLDIGTNSVGWAVITDEYKVPSKKFKVLGNTDRHSIKKNLIGALLFDSGETAEATRLKRTARRRYTRRKNRICYLQEIFSNEMAKVDDSFFHRLEESFLVEEDKKHERHPIFGNIVDEVAYHEKYPTIYHLRKKLVDSTDKADLRLIYLALAHMIKFRGHFLIEGDLNPDNSDVDKLFIQLVQTYNQLFEENPINASGVDAKAILSARLSKSRRLENLIAQLPGEKKNGLFGNLIALSLGLTPNFKSNFDLAEDAKLQLSKDTYDDDLDNLLAQIGDQYADLFLAAKNLSDAILLSDILRVNTEITKAPLSASMIKRYDEHHQDLTLLKALVRQQLPEKYKEIFFDQSKNGYAGYIDGGASQEEFYKFIKPILEKMDGTEELLVKLNREDLLRKQRTFDNGSIPHQIHLGELHAILRRQEDFYPFLKDNREKIEKILTFRIPYYVGPLARGNSRFAWMTRKSEETITPWNFEEVVDKGASAQSFIERMTNFDKNLPNEKVLPKHSLLYEYFTVYNELTKVKYVTEGMRKPAFLSGEQKKAIVDLLFKTNRKVTVKQLKEDYFKKIECFDSVEISGVEDRFNASLGTYHDLLKIIKDKDFLDNEENEDILEDIVLTLTLFEDREMIEERLKTYAHLFDDKVMKQLKRRRYTGWGRLSRKLINGIRDKQSGKTILDFLKSDGFANRNFMQLIHDDSLTFKEDIQKAQVSGQGDSLHEHIANLAGSPAIKKGILQTVKVVDELVKVMGRHKPENIVIEMARENQTTQKGQKNSRERMKRIEEGIKELGSQILKEHPVENTQLQNEKLYLYYLQNGRDMYVDQELDINRLSDYDVDHIVPQSFLKDDSIDNKVLTRSDKARGKSDNVPSEEVVKKMKNYWRQLLNAKLITQRKFDNLTKAERGGLSELDKAGFIKRQLVETRQITKHVAQILDSRMNTKYDENDKLIREVKVITLKSKLVSDFRKDFQFYKVREINNYHHAHDAYLNAVVGTALIKKYPKLESEFVYGDYKVYDVRKMIAKSEQEIGKATAKYFFYSNIMNFFKTEITLANGEIRKRPLIETNGETGEIVWDKGRDFATVRKVLSMPQVNIVKKTEVQTGGFSKESILPKRNSDKLIARKKDWDPKKYGGFDSPTVAYSVLVVAKVEKGKSKKLKSVKELLGITIMERSSFEKNPIDFLEAKGYKEVKKDLIIKLPKYSLFELENGRKRMLASAGELQKGNELALPSKYVNFLYLASHYEKLKGSPEDNEQKQLFVEQHKHYLDEIIEQISEFSKRVILADANLDKVLSAYNKHRDKPIREQAENIIHLFTLTNLGAPAAFKYFDTTIDRKRYTSTKEVLDATLIHQSITGLYETRIDLSQLGGDGGGGSGGGGGVPWILKKPLELTIKLDLEEQQGTLLNNSILSKKGKEELKQLFEKYSALWQSWENQVGHRRIRPHKIATGTVKPTPQKQYHINPKAKPDIQIVINDLLKQGVLIQKESTMNTPVYPVPKPNGRWRMVLDYRAVNKVTPLIAVQNQHSYGILGSLFKGRYKTTIDLSNGFWAHPIVPEDYWITAFTWQGKQYCWTVLPQGFLNSPGLFNGDVVDLLQGIPNVEVYVDDVYISHDSEKEHLEYLDILFNRLKEAGYIISLKKSNIANSIVDFLGFQITNEGRGLTDTFKEKLENITAPTTLKQLQSILGLLNFARNFIPDFTELIAPLYALIPKSPKNYVPWQIEHSTTLETLITKLNGAEYLQGRKGDKTLIMKVNASYTTGYIRYYNEGEKKPISYVSIVFSKTELKFTELEKLLTTVHKGLLKALDLSMGQNIHVYSPIVSMQNIQKTPQTAKKALASRWLSWLSYLEDPRIRFFYDPQMPALKDLPAVDTGKDNKKHPSNFQHIFYTDGSAITSPTKEGHLNAGMGIVYFINKDGNLQKQQEWSISLGNHTAQFAEIAAFEFALKKCLPLGGNILVVTDSNYVAKAYNEELDVWASNGFVNNRKKPLKHISKWKSVADLKRLRPDVVVTHEPGHQKLDSSPHAYGNNLADQLATQASFKVHAGKRTADGSEFEKRTADGSEFESPKKKAKVE

SEQ ID NO: 6572 - protein, 2090 aa, synthetic construct
MPAAKRVKLDGGDKKYSIGLDIGTNSVGWAVITDEYKVPSKKFKVLGNTDRHSIKKNLIGALLFDSGETAEATRLKRTARRRYTRRKNRICYLQEIFSNEMAKVDDSFFHRLEESFLVEEDKKHERHPIFGNIVDEVAYHEKYPTIYHLRKKLVDSTDKADLRLIYLALAHMIKFRGHFLIEGDLNPDNSDVDKLFIQLVQTYNQLFEENPINASGVDAKAILSARLSKSRRLENLIAQLPGEKKNGLFGNLIALSLGLTPNFKSNFDLAEDAKLQLSKDTYDDDLDNLLAQIGDQYADLFLAAKNLSDAILLSDILRVNTEITKAPLSASMIKRYDEHHQDLTLLKALVRQQLPEKYKEIFFDQSKNGYAGYIDGGASQEEFYKFIKPILEKMDGTEELLVKLNREDLLRKQRTFDNGSIPHQIHLGELHAILRRQEDFYPFLKDNREKIEKILTFRIPYYVGPLARGNSRFAWMTRKSEETITPWNFEEVVDKGASAQSFIERMTNFDKNLPNEKVLPKHSLLYEYFTVYNELTKVKYVTEGMRKPAFLSGEQKKAIVDLLFKTNRKVTVKQLKEDYFKKIECFDSVEISGVEDRFNASLGTYHDLLKIIKDKDFLDNEENEDILEDIVLTLTLFEDREMIEERLKTYAHLFDDKVMKQLKRRRYTGWGRLSRKLINGIRDKQSGKTILDFLKSDGFANRNFMQLIHDDSLTFKEDIQKAQVSGQGDSLHEHIANLAGSPAIKKGILQTVKVVDELVKVMGRHKPENIVIEMARENQTTQKGQKNSRERMKRIEEGIKELGSQILKEHPVENTQLQNEKLYLYYLQNGRDMYVDQELDINRLSDYDVDHIVPQSFLKDDSIDNKVLTRSDKARGKSDNVPSEEVVKKMKNYWRQLLNAKLITQRKFDNLTKAERGGLSELDKAGFIKRQLVETRQITKHVAQILDSRMNTKYDENDKLIREVKVITLKSKLVSDFRKDFQFYKVREINNYHHAHDAYLNAVVGTALIKKYPKLESEFVYGDYKVYDVRKMIAKSEQEIGKATAKYFFYSNIMNFFKTEITLANGEIRKRPLIETNGETGEIVWDKGRDFATVRKVLSMPQVNIVKKTEVQTGGFSKESILPKRNSDKLIARKKDWDPKKYGGFDSPTVAYSVLVVAKVEKGKSKKLKSVKELLGITIMERSSFEKNPIDFLEAKGYKEVKKDLIIKLPKYSLFELENGRKRMLASAGELQKGNELALPSKYVNFLYLASHYEKLKGSPEDNEQKQLFVEQHKHYLDEIIEQISEFSKRVILADANLDKVLSAYNKHRDKPIREQAENIIHLFTLTNLGAPAAFKYFDTTIDRKRYTSTKEVLDATLIHQSITGLYETRIDLSQLGGDGGGGSGGGGGTLQLEEEYRLFEPESTQKQEMDIWLKNFPQAWAETGGMGTAHCQAPVLIQLKATATPISIRQYPMPHEAYQGIKPHIRRMLDQGILKPCQSPWNTPLLPVKKPGTEDYRPVQDLREVNKRVEDIHPTVPNPYNLLSTLPPSHPWYTVLDLKDAFFCLRLHSESQLLFAFEWRDPEIGLSGQLTWTRLPQGFKNSPTLFNEALHSDLADFRVRYPALVLLQYVDDLLLAAATRTECLEGTKALLETLGNKGYRASAKKAQICLQEVTYLGYSLKDGQRWLTKARKEAILSIPVPKNSRQVREFLGKAGYCRLFIPGFAELAAPLYPLTRPGTLFQWGTEQQLAFEDIKKALLSSPALGLPDITKPFELFIDENSGFAKGVLVQKLGPWKRPVAYLSKKLDTVASGWPPCLRMVAAIAILVKDAGKLTLGQPLTILTSHPVEALVRQPPNKWLSNARMTHYQAMLLDAERVHFGPTVSLNPATLLPLPSGGNHHDCLQILAETHGTRPDLTDQPLPDADLTWYTDGSSFIRNGEREAGAAVTTESEVIWAAPLPPGTSAQRAELIALTQALKMAEGKKLTVYTDSRYAFATTHVHGEIYRRRGWLTSEGKEIKNKNEILALLEALFLPKRLSIIHCPGHQKGDSPQAKGNRLADDTAKKAATETHSSLTVLPAGKRTADGSEFEKRTADGSEFESPKKKAKVE

SEQ ID NO: 6573 - protein, 2082 aa, synthetic construct
MPAAKRVKLDGGDKKYSIGLDIGTNSVGWAVITDEYKVPSKKFKVLGNTDRHSIKKNLIGALLFDSGETAEATRLKRTARRRYTRRKNRICYLQEIFSNEMAKVDDSFFHRLEESFLVEEDKKHERHPIFGNIVDEVAYHEKYPTIYHLRKKLVDSTDKADLRLIYLALAHMIKFRGHFLIEGDLNPDNSDVDKLFIQLVQTYNQLFEENPINASGVDAKAILSARLSKSRRLENLIAQLPGEKKNGLFGNLIALSLGLTPNFKSNFDLAEDAKLQLSKDTYDDDLDNLLAQIGDQYADLFLAAKNLSDAILLSDILRVNTEITKAPLSASMIKRYDEHHQDLTLLKALVRQQLPEKYKEIFFDQSKNGYAGYIDGGASQEEFYKFIKPILEKMDGTEELLVKLNREDLLRKQRTFDNGSIPHQIHLGELHAILRRQEDFYPFLKDNREKIEKILTFRIPYYVGPLARGNSRFAWMTRKSEETITPWNFEEVVDKGASAQSFIERMTNFDKNLPNEKVLPKHSLLYEYFTVYNELTKVKYVTEGMRKPAFLSGEQKKAIVDLLFKTNRKVTVKQLKEDYFKKIECFDSVEISGVEDRFNASLGTYHDLLKIIKDKDFLDNEENEDILEDIVLTLTLFEDREMIEERLKTYAHLFDDKVMKQLKRRRYTGWGRLSRKLINGIRDKQSGKTILDFLKSDGFANRNFMQLIHDDSLTFKEDIQKAQVSGQGDSLHEHIANLAGSPAIKKGILQTVKVVDELVKVMGRHKPENIVIEMARENQTTQKGQKNSRERMKRIEEGIKELGSQILKEHPVENTQLQNEKLYLYYLQNGRDMYVDQELDINRLSDYDVDHIVPQSFLKDDSIDNKVLTRSDKARGKSDNVPSEEVVKKMKNYWRQLLNAKLITQRKFDNLTKAERGGLSELDKAGFIKRQLVETRQITKHVAQILDSRMNTKYDENDKLIREVKVITLKSKLVSDFRKDFQFYKVREINNYHHAHDAYLNAVVGTALIKKYPKLESEFVYGDYKVYDVRKMIAKSEQEIGKATAKYFFYSNIMNFFKTEITLANGEIRKRPLIETNGETGEIVWDKGRDFATVRKVLSMPQVNIVKKTEVQTGGFSKESILPKRNSDKLIARKKDWDPKKYGGFDSPTVAYSVLVVAKVEKGKSKKLKSVKELLGITIMERSSFEKNPIDFLEAKGYKEVKKDLIIKLPKYSLFELENGRKRMLASAGELQKGNELALPSKYVNFLYLASHYEKLKGSPEDNEQKQLFVEQHKHYLDEIIEQISEFSKRVILADANLDKVLSAYNKHRDKPIREQAENIIHLFTLTNLGAPAAFKYFDTTIDRKRYTSTKEVLDATLIHQSITGLYETRIDLSQLGGDGGGGSGGGGGVPWLTQQPLQLTILVPLQEYQEKILSKTALPEDQKQQLKTLFVKYDNLWQHWENQVGHRKIRPHNIATGDYPPRPQKQYPINPKAKPSIQIVIDDLLKQGVLTPQNSTMNTPVYPVPKPDGRWRMVLDYREVNKTIPLTAAQNQHSAGILATIVRQKYKTTLDLANGFWAHPITPESYWLTAFTWQGKQYCWTRLPQGFLNSPALFNADVVDLLKEIPNVQVYVDDIYLSHDDPKEHVQQLEKVFQILLQAGYVVSLKKSEIGQKTVEFLGFNITKEGRGLTDTFKTKLLNITPPKDLKQLQSILGLLNFARNFIPNFAELVQPLYNLIAPAKGKYIEWSEENTKQLNMVIEALNTASNLEERLPEQRLVIKVNTSPSAGYVRYYNETGKKPIMYLNYVFSKAELKFSMLEKLLTTMHKALIKAMDLAMGQEILVYSPIVSMTKIQKTPLPERKALPIRWITWMTYLEDPRIQFHYDKTLPELKHIPDVYTSSQSPVKHPSQYEGVFYTDGSAIKSPDPTKSNNAGMGIVHATYKPEYQVLNQWSIPLGNHTAQMAEIAAVEFACKKALKIPGPVLVITDSFYVAESANKELPYWKSNGFVNNKKKPLKHISKWKSIAECLSMKPDITIQHEKGISLQIPVFILKGNALADKLATQGSYVVNAGKRTADGSEFEKRTADGSEFESPKKKAKVE

SEQ ID NO: 6574 - protein, 2171 aa, synthetic construct
MPAAKRVKLDGGDKKYSIGLDIGTNSVGWAVITDEYKVPSKKFKVLGNTDRHSIKKNLIGALLFDSGETAEATRLKRTARRRYTRRKNRICYLQEIFSNEMAKVDDSFFHRLEESFLVEEDKKHERHPIFGNIVDEVAYHEKYPTIYHLRKKLVDSTDKADLRLIYLALAHMIKFRGHFLIEGDLNPDNSDVDKLFIQLVQTYNQLFEENPINASGVDAKAILSARLSKSRRLENLIAQLPGEKKNGLFGNLIALSLGLTPNFKSNFDLAEDAKLQLSKDTYDDDLDNLLAQIGDQYADLFLAAKNLSDAILLSDILRVNTEITKAPLSASMIKRYDEHHQDLTLLKALVRQQLPEKYKEIFFDQSKNGYAGYIDGGASQEEFYKFIKPILEKMDGTEELLVKLNREDLLRKQRTFDNGSIPHQIHLGELHAILRRQEDFYPFLKDNREKIEKILTFRIPYYVGPLARGNSRFAWMTRKSEETITPWNFEEVVDKGASAQSFIERMTNFDKNLPNEKVLPKHSLLYEYFTVYNELTKVKYVTEGMRKPAFLSGEQKKAIVDLLFKTNRKVTVKQLKEDYFKKIECFDSVEISGVEDRFNASLGTYHDLLKIIKDKDFLDNEENEDILEDIVLTLTLFEDREMIEERLKTYAHLFDDKVMKQLKRRRYTGWGRLSRKLINGIRDKQSGKTILDFLKSDGFANRNFMQLIHDDSLTFKEDIQKAQVSGQGDSLHEHIANLAGSPAIKKGILQTVKVVDELVKVMGRHKPENIVIEMARENQTTQKGQKNSRERMKRIEEGIKELGSQILKEHPVENTQLQNEKLYLYYLQNGRDMYVDQELDINRLSDYDVDHIVPQSFLKDDSIDNKVLTRSDKARGKSDNVPSEEVVKKMKNYWRQLLNAKLITQRKFDNLTKAERGGLSELDKAGFIKRQLVETRQITKHVAQILDSRMNTKYDENDKLIREVKVITLKSKLVSDFRKDFQFYKVREINNYHHAHDAYLNAVVGTALIKKYPKLESEFVYGDYKVYDVRKMIAKSEQEIGKATAKYFFYSNIMNFFKTEITLANGEIRKRPLIETNGETGEIVWDKGRDFATVRKVLSMPQVNIVKKTEVQTGGFSKESILPKRNSDKLIARKKDWDPKKYGGFDSPTVAYSVLVVAKVEKGKSKKLKSVKELLGITIMERSSFEKNPIDFLEAKGYKEVKKDLIIKLPKYSLFELENGRKRMLASAGELQKGNELALPSKYVNFLYLASHYEKLKGSPEDNEQKQLFVEQHKHYLDEIIEQISEFSKRVILADANLDKVLSAYNKHRDKPIREQAENIIHLFTLTNLGAPAAFKYFDTTIDRKRYTSTKEVLDATLIHQSITGLYETRIDLSQLGGDGGGGSGGGGGMNPLQLLQPLPAEIKGTKLLAHWNSGATITCIPESFLEDEQPIKKTLIKTIHGEKQQNVYYVTFKVKGRKVEAEVIASPYEYILLSPTDVPWLTQQPLQLTILVPLQEYQEKILSKTALPEDQKQQLKTLFVKYDNLWQHWENQVGHRKIRPHNIATGDYPPRPQKQYPINPKAKPSIQIVIDDLLKQGVLTPQNSTMNTPVYPVPKPDGRWRMVLDYREVNKTIPLTAAQNQHSAGILATIVRQKYKTTLDLANGFWAHPITPESYWLTAFTWQGKQYCWTRLPQGFLNSPALFNADVVDLLKEIPNVQVYVDDIYLSHDDPKEHVQQLEKVFQILLQAGYVVSLKKSEIGQKTVEFLGFNITKEGRGLTDTFKTKLLNITPPKDLKQLQSILGKLNFARNFIPNFAELVQPLYNLIAPAKGKYIEWSEENTKQLNMVIEALNTASNLEERLPEQRLVIKVNTSPSAGYVRYYNETGKKPIMYLNYVFSKAELKFSMLEKLLTTMHKALIKAMDLAMGQEILVYSPIVSMTKIQKTPLPERKALPIRWITWMTYLEDPRIQFHYDKTLPELKHIPDVYTSSQSPVKHPSQYEGVFYTDGSAIKSPDPTKSNNAGMGIVHATYKPEYQVLNQWSIPLGNHTAQMAEIAAVEFACKKALKIPGPVLVITDSFYVAESANKELPYWKSNGFVNNKKKPLKHISKWKSIAECLSMKPDITIQHEKGISLQIPVFILKGNALADKLATQGSYVVNAGKRTADGSEFEKRTADGSEFESPKKKAKVE

SEQ ID NO: 6575 - protein, 2213 aa, synthetic construct
MPAAKRVKLDGGDKKYSIGLDIGTNSVGWAVITDEYKVPSKKFKVLGNTDRHSIKKNLIGALLFDSGETAEATRLKRTARRRYTRRKNRICYLQEIFSNEMAKVDDSFFHRLEESFLVEEDKKHERHPIFGNIVDEVAYHEKYPTIYHLRKKLVDSTDKADLRLIYLALAHMIKFRGHFLIEGDLNPDNSDVDKLFIQLVQTYNQLFEENPINASGVDAKAILSARLSKSRRLENLIAQLPGEKKNGLFGNLIALSLGLTPNFKSNFDLAEDAKLQLSKDTYDDDLDNLLAQIGDQYADLFLAAKNLSDAILLSDILRVNTEITKAPLSASMIKRYDEHHQDLTLLKALVRQQLPEKYKEIFFDQSKNGYAGYIDGGASQEEFYKFIKPILEKMDGTEELLVKLNREDLLRKQRTFDNGSIPHQIHLGELHAILRRQEDFYPFLKDNREKIEKILTFRIPYYVGPLARGNSRFAWMTRKSEETITPWNFEEVVDKGASAQSFIERMTNFDKNLPNEKVLPKHSLLYEYFTVYNELTKVKYVTEGMRKPAFLSGEQKKAIVDLLFKTNRKVTVKQLKEDYFKKIECFDSVEISGVEDRFNASLGTYHDLLKIIKDKDFLDNEENEDILEDIVLTLTLFEDREMIEERLKTYAHLFDDKVMKQLKRRRYTGWGRLSRKLINGIRDKQSGKTILDFLKSDGFANRNFMQLIHDDSLTFKEDIQKAQVSGQGDSLHEHIANLAGSPAIKKGILQTVKVVDELVKVMGRHKPENIVIEMARENQTTQKGQKNSRERMKRIEEGIKELGSQILKEHPVENTQLQNEKLYLYYLQNGRDMYVDQELDINRLSDYDVDHIVPQSFLKDDSIDNKVLTRSDKARGKSDNVPSEEVVKKMKNYWRQLLNAKLITQRKFDNLTKAERGGLSELDKAGFIKRQLVETRQITKHVAQILDSRMNTKYDENDKLIREVKVITLKSKLVSDFRKDFQFYKVREINNYHHAHDAYLNAVVGTALIKKYPKLESEFVYGDYKVYDVRKMIAKSEQEIGKATAKYFFYSNIMNFFKTEITLANGEIRKRPLIETNGETGEIVWDKGRDFATVRKVLSMPQVNIVKKTEVQTGGFSKESILPKRNSDKLIARKKDWDPKKYGGFDSPTVAYSVLVVAKVEKGKSKKLKSVKELLGITIMERSSFEKNPIDFLEAKGYKEVKKDLIIKLPKYSLFELENGRKRMLASAGELQKGNELALPSKYVNFLYLASHYEKLKGSPEDNEQKQLFVEQHKHYLDEIIEQISEFSKRVILADANLDKVLSAYNKHRDKPIREQAENIIHLFTLTNLGAPAAFKYFDTTIDRKRYTSTKEVLDATLIHQSITGLYETRIDLSQLGGDGGGGSGGGGGTLGDQGSRGSDPLPEPRVTLTVEGIPTEFLVNTGAEHSVLTKPMGKMGSKRTVVAGATGSKVYPWTTKRLLKIGQKQVTHSFLVIPECPAPLLGRDLLTKLKAQIQFSTEGPQVTWEDRPAMCLVLNLEEEYRLHEKPVPPSIDPSWLQLFPMVWAEKAGMGLANQVPPVVVELKSDASPVAVRQYPMSKEAREGIRPHIQRFLDLGILVPCQSPWNTPLLPVKKPGTNDYRPVQDLREVNKRVQDIHPTVPNPYNLLSSLPPSHTWYSVLDLKDAFFCLKLHPNSQPLFAFEWRDPEKGNTGQLTWTRLPQGFKNSPTLFNEALHRDLASFRALNPQVVMLQYVDDLLVAAPTYRDCKEGTRRLLQELSKLGYRVSAKKAQLCREEVTYLGYLLKGGKRWLTPARKATVMKIPTPTTPRQVREFLGKAGFCRLFIPGFASLAAPLYPLTRPKVPFTWTEAHQEAFGRIKEALLSAPALALPDLTKPFALYVDEKEGVARGVLTQTLGPWRRPVAYLSKKLDPVASGWPTCLKAIAAVALLLKDADKLTLGQNVLVIAPHNLESIVRQPPDRWMTNARMTHYQSLLLNERVSFAPPAILNPATLLPVESDDTPIHICSEILAEETGTRPDLRDQPLPGVPAWYTDGSSFIMDGRRQAGAAIVDNKRTVWASNLPEGTSAQKAELIALTQALRLAEGKSINIYTDSRYAFATAHVHGAIYKQRGWLTSAGKDIKNKEEILALLEAIHLPKRVAIIHCPGHQRGTDPVATGNRKADEAAKQAAQSTRILTETTKNAGKRTADGSEFEKRTADGSEFESPKKKAKVE

SEQ ID NO: 6576 - protein, 2091 aa, synthetic construct
MPAAKRVKLDGGDKKYSIGLDIGTNSVGWAVITDEYKVPSKKFKVLGNTDRHSIKKNLIGALLFDSGETAEATRLKRTARRRYTRRKNRICYLQEIFSNEMAKVDDSFFHRLEESFLVEEDKKHERHPIFGNIVDEVAYHEKYPTIYHLRKKLVDSTDKADLRLIYLALAHMIKFRGHFLIEGDLNPDNSDVDKLFIQLVQTYNQLFEENPINASGVDAKAILSARLSKSRRLENLIAQLPGEKKNGLFGNLIALSLGLTPNFKSNFDLAEDAKLQLSKDTYDDDLDNLLAQIGDQYADLFLAAKNLSDAILLSDILRVNTEITKAPLSASMIKRYDEHHQDLTLLKALVRQQLPEKYKEIFFDQSKNGYAGYIDGGASQEEFYKFIKPILEKMDGTEELLVKLNREDLLRKQRTFDNGSIPHQIHLGELHAILRRQEDFYPFLKDNREKIEKILTFRIPYYVGPLARGNSRFAWMTRKSEETITPWNFEEVVDKGASAQSFIERMTNFDKNLPNEKVLPKHSLLYEYFTVYNELTKVKYVTEGMRKPAFLSGEQKKAIVDLLFKTNRKVTVKQLKEDYFKKIECFDSVEISGVEDRFNASLGTYHDLLKIIKDKDFLDNEENEDILEDIVLTLTLFEDREMIEERLKTYAHLFDDKVMKQLKRRRYTGWGRLSRKLINGIRDKQSGKTILDFLKSDGFANRNFMQLIHDDSLTFKEDIQKAQVSGQGDSLHEHIANLAGSPAIKKGILQTVKVVDELVKVMGRHKPENIVIEMARENQTTQKGQKNSRERMKRIEEGIKELGSQILKEHPVENTQLQNEKLYLYYLQNGRDMYVDQELDINRLSDYDVDHIVPQSFLKDDSIDNKVLTRSDKARGKSDNVPSEEVVKKMKNYWRQLLNAKLITQRKFDNLTKAERGGLSELDKAGFIKRQLVETRQITKHVAQILDSRMNTKYDENDKLIREVKVITLKSKLVSDFRKDFQFYKVREINNYHHAHDAYLNAVVGTALIKKYPKLESEFVYGDYKVYDVRKMIAKSEQEIGKATAKYFFYSNIMNFFKTEITLANGEIRKRPLIETNGETGEIVWDKGRDFATVRKVLSMPQVNIVKKTEVQTGGFSKESILPKRNSDKLIARKKDWDPKKYGGFDSPTVAYSVLVVAKVEKGKSKKLKSVKELLGITIMERSSFEKNPIDFLEAKGYKEVKKDLIIKLPKYSLFELENGRKRMLASAGELQKGNELALPSKYVNFLYLASHYEKLKGSPEDNEQKQLFVEQHKHYLDEIIEQISEFSKRVILADANLDKVLSAYNKHRDKPIREQAENIIHLFTLTNLGAPAAFKYFDTTIDRKRYTSTKEVLDATLIHQSITGLYETRIDLSQLGGDGGGGSGGGGGTLNLEDEYRLYETSAEPEVSPGSTWLSDFPQAWAETGGMGLAVRQAPLIIPLKATSTPVSIKQYPMSQEAKLGIKPHIQRLLDQGILVPCQSPWNTPLLPVKKPGTNDYRPVQDLREVNKRVEDIHPTVPNPYNLLSGLPPSHRWYTVLDLKDAFFCLRLHPTSQPLFAFEWRDPGMGISGQLTWTRLPQGFKNSPTLFNEALHRDLADFRIQHPDLILLQYVDDILLAATSELDCQQGTRALLLTLGNLGYRASAKKAQLCQKQVKYLGYLLKEGQRWLTEARKETVMGQPTPKTPRQLREFLGTAGFCRLWIPGFAEMAAPLYPLTKPGTLFNWGPDQQKAYQEIKQALLTAPALGLPDLTKPFELFVDEKQGYAKGVLTQKLGPWRRPVAYLSKKLDPVAAGWPPCLRMVAAIAVLRKDAGKLTMGQPLVILAPHAVEALVKQPPDRWLSNARMTHYQAMLLDTDRVQFGPVVALNPATLLPLPEEGAPHDCLEILAETHGTRPDLTDQPIPDADHTWYTDGSSFLQEGQRKAGAAVTTETEVIWARALPAGTSAQRAELIALTQALKMAEGKRLNVYTDSRYAFATAHIHGEIYRRRGWLTSEGREIKNKSEILALLKALFLPKRLSIIHCLGHQKGDSAEARGNRLADQAAREAAIKTPPDTSTLLAGKRTADGSEFEKRTADGSEFESPKKKAKVE

SEQ ID NO: 6577 - protein, 2091 aa, synthetic construct
MPAAKRVKLDGGDKKYSIGLDIGTNSVGWAVITDEYKVPSKKFKVLGNTDRHSIKKNLIGALLFDSGETAEATRLKRTARRRYTRRKNRICYLQEIFSNEMAKVDDSFFHRLEESFLVEEDKKHERHPIFGNIVDEVAYHEKYPTIYHLRKKLVDSTDKADLRLIYLALAHMIKFRGHFLIEGDLNPDNSDVDKLFIQLVQTYNQLFEENPINASGVDAKAILSARLSKSRRLENLIAQLPGEKKNGLFGNLIALSLGLTPNFKSNFDLAEDAKLQLSKDTYDDDLDNLLAQIGDQYADLFLAAKNLSDAILLSDILRVNTEITKAPLSASMIKRYDEHHQDLTLLKALVRQQLPEKYKEIFFDQSKNGYAGYIDGGASQEEFYKFIKPILEKMDGTEELLVKLNREDLLRKQRTFDNGSIPHQIHLGELHAILRRQEDFYPFLKDNREKIEKILTFRIPYYVGPLARGNSRFAWMTRKSEETITPWNFEEVVDKGASAQSFIERMTNFDKNLPNEKVLPKHSLLYEYFTVYNELTKVKYVTEGMRKPAFLSGEQKKAIVDLLFKTNRKVTVKQLKEDYFKKIECFDSVEISGVEDRFNASLGTYHDLLKIIKDKDFLDNEENEDILEDIVLTLTLFEDREMIEERLKTYAHLFDDKVMKQLKRRRYTGWGRLSRKLINGIRDKQSGKTILDFLKSDGFANRNFMQLIHDDSLTFKEDIQKAQVSGQGDSLHEHIANLAGSPAIKKGILQTVKVVDELVKVMGRHKPENIVIEMARENQTTQKGQKNSRERMKRIEEGIKELGSQILKEHPVENTQLQNEKLYLYYLQNGRDMYVDQELDINRLSDYDVDHIVPQSFLKDDSIDNKVLTRSDKARGKSDNVPSEEVVKKMKNYWRQLLNAKLITQRKFDNLTKAERGGLSELDKAGFIKRQLVETRQITKHVAQILDSRMNTKYDENDKLIREVKVITLKSKLVSDFRKDFQFYKVREINNYHHAHDAYLNAVVGTALIKKYPKLESEFVYGDYKVYDVRKMIAKSEQEIGKATAKYFFYSNIMNFFKTEITLANGEIRKRPLIETNGETGEIVWDKGRDFATVRKVLSMPQVNIVKKTEVQTGGFSKESILPKRNSDKLIARKKDWDPKKYGGFDSPTVAYSVLVVAKVEKGKSKKLKSVKELLGITIMERSSFEKNPIDFLEAKGYKEVKKDLIIKLPKYSLFELENGRKRMLASAGELQKGNELALPSKYVNFLYLASHYEKLKGSPEDNEQKQLFVEQHKHYLDEIIEQISEFSKRVILADANLDKVLSAYNKHRDKPIREQAENIIHLFTLTNLGAPAAFKYFDTTIDRKRYTSTKEVLDATLIHQSITGLYETRIDLSQLGGDGGGGSGGGGGTLGIEDEYRLHETSTEPDVSLGSTWLSDFPQAWAETGGMGLAVRQAPLIIPLKATSTPVSIQQYPMSHEARLGIKPHIQRLLDQGILVPCQSPWNTPLLPVKKPGTNDYRPVQDLREVNKRVEDIHPTVPNPYNLLSGLPPSHQWYTVLDLKDAFFCLRLHPTSQPLFAFEWRDPGMGISGQLTWTRLPQGFKNSPTLFNEALHRDLADFRIQHPDLILLQYVDDILLAATSELDCQQGTRALLQTLGDLGYRASAKKAQICQKQVKYLGYLLREGQRWLTEARKETVMGQPVPKTPRQLREFLGTAGFCRLWIPGFAEMAAPLYPLTKPGTLFSWGPDQQKAYQEIKQALLTAPALGLPDLTKPFELFVDEKQGYAKGVLTQKLGPWRRPVAYLSKKLDPVAAGWPPCLRMVAAIAVLTKDAGKLTMGQPLVILAPHAVEALVKQPPDRWLSNARMTHYQAMLLDTDRVQFGPVVALNPATLLPLPEEGAPHDCLEILAETHGTRPDLTDQPIPDADHTWYTDGSSFLQEGQRKAGAAVTTETEVIWAGALPAGTSAQRAELIALTQALKMAEGKRLNVYTDSRYAFATAHIHGEIYRRRGWLTSEGREIKNKSEILALLKALFLPKRLSIIHCLGHQKGDSAEARGNRLADQAAREAAIKTPPDTSTLLAGKRTADGSEFEKRTADGSEFESPKKKAKVE

SEQ ID NO: 6578 - protein, 2091 aa, synthetic construct
MPAAKRVKLDGGDKKYSIGLDIGTNSVGWAVITDEYKVPSKKFKVLGNTDRHSIKKNLIGALLFDSGETAEATRLKRTARRRYTRRKNRICYLQEIFSNEMAKVDDSFFHRLEESFLVEEDKKHERHPIFGNIVDEVAYHEKYPTIYHLRKKLVDSTDKADLRLIYLALAHMIKFRGHFLIEGDLNPDNSDVDKLFIQLVQTYNQLFEENPINASGVDAKAILSARLSKSRRLENLIAQLPGEKKNGLFGNLIALSLGLTPNFKSNFDLAEDAKLQLSKDTYDDDLDNLLAQIGDQYADLFLAAKNLSDAILLSDILRVNTEITKAPLSASMIKRYDEHHQDLTLLKALVRQQLPEKYKEIFFDQSKNGYAGYIDGGASQEEFYKFIKPILEKMDGTEELLVKLNREDLLRKQRTFDNGSIPHQIHLGELHAILRRQEDFYPFLKDNREKIEKILTFRIPYYVGPLARGNSRFAWMTRKSEETITPWNFEEVVDKGASAQSFIERMTNFDKNLPNEKVLPKHSLLYEYFTVYNELTKVKYVTEGMRKPAFLSGEQKKAIVDLLFKTNRKVTVKQLKEDYFKKIECFDSVEISGVEDRFNASLGTYHDLLKIIKDKDFLDNEENEDILEDIVLTLTLFEDREMIEERLKTYAHLFDDKVMKQLKRRRYTGWGRLSRKLINGIRDKQSGKTILDFLKSDGFANRNFMQLIHDDSLTFKEDIQKAQVSGQGDSLHEHIANLAGSPAIKKGILQTVKVVDELVKVMGRHKPENIVIEMARENQTTQKGQKNSRERMKRIEEGIKELGSQILKEHPVENTQLQNEKLYLYYLQNGRDMYVDQELDINRLSDYDVDHIVPQSFLKDDSIDNKVLTRSDKARGKSDNVPSEEVVKKMKNYWRQLLNAKLITQRKFDNLTKAERGGLSELDKAGFIKRQLVETRQITKHVAQILDSRMNTKYDENDKLIREVKVITLKSKLVSDFRKDFQFYKVREINNYHHAHDAYLNAVVGTALIKKYPKLESEFVYGDYKVYDVRKMIAKSEQEIGKATAKYFFYSNIMNFFKTEITLANGEIRKRPLIETNGETGEIVWDKGRDFATVRKVLSMPQVNIVKKTEVQTGGFSKESILPKRNSDKLIARKKDWDPKKYGGFDSPTVAYSVLVVAKVEKGKSKKLKSVKELLGITIMERSSFEKNPIDFLEAKGYKEVKKDLIIKLPKYSLFELENGRKRMLASAGELQKGNELALPSKYVNFLYLASHYEKLKGSPEDNEQKQLFVEQHKHYLDEIIEQISEFSKRVILADANLDKVLSAYNKHRDKPIREQAENIIHLFTLTNLGAPAAFKYFDTTIDRKRYTSTKEVLDATLIHQSITGLYETRIDLSQLGGDGGGGSGGGGGTLNIEDEHRLHETSKEPDVSLGSTWLSDFPQAWAETGGMGLAVRQAPLIIPLKATSTPVSIKQYPMSQEARLGIKPHIQRLLDQGILVPCQSPWNTPLLPVKKPGTNDYRPVQDLREVNKRVEDIHPTVPNPYNLLSGLPPSHQWYTVLDLKDAFFCLRLHPTSQPLFAFEWRDPEMGISGQLTWTRLPQGFKNSPTLFNEALHRDLADFRIQHPDLILLQYVDDLLLAATSELDCQQGTRALLQTLGNLGYRASAKKAQICQKQVKYLGYLLKEGQRWLTEARKETVMGQPTPKTPRQLREFLGTAGFCRLWIPGFAEMAAPLYPLTKPGTLFNWGPDQQKAYQEIKQALLTAPALGLPDLTKPFELFVDEKQGYAKGVLTQKLGPWRRPVAYLSKKLDPVAAGWPPCLRMVAAIAVLTKDAGKLTMGQPLVILAPHAVEALVKQPPDRWLSNARMTHYQALLLDTDRVQFGPVVALNPATLLPLPEEGLQHNCLDILAEAHGTRPDLTDQPLPDADHTWYTDGSSLLQEGQRKAGAAVTTETEVIWAKALPAGTSAQRAELIALTQALKMAEGKKLNVYTDSRYAFATAHIHGEIYRRRGWLTSEGKEIKNKDEILALLKALFLPKRLSIIHCPGHQKGHSAEARGNRMADQAARKAAITETPDTSTLLAGKRTADGSEFEKRTADGSEFESPKKKAKVE

SEQ ID NO: 6579 - protein, 2091 aa, synthetic construct; identical to SEQ ID NO: 6578

SEQ ID NO: 6580 - protein, 2082 aa, synthetic construct
MPAAKRVKLDGGDKKYSIGLDIGTNSVGWAVITDEYKVPSKKFKVLGNTDRHSIKKNLIGALLFDSGETAEATRLKRTARRRYTRRKNRICYLQEIFSNEMAKVDDSFFHRLEESFLVEEDKKHERHPIFGNIVDEVAYHEKYPTIYHLRKKLVDSTDKADLRLIYLALAHMIKFRGHFLIEGDLNPDNSDVDKLFIQLVQTYNQLFEENPINASGVDAKAILSARLSKSRRLENLIAQLPGEKKNGLFGNLIALSLGLTPNFKSNFDLAEDAKLQLSKDTYDDDLDNLLAQIGDQYADLFLAAKNLSDAILLSDILRVNTEITKAPLSASMIKRYDEHHQDLTLLKALVRQQLPEKYKEIFFDQSKNGYAGYIDGGASQEEFYKFIKPILEKMDGTEELLVKLNREDLLRKQRTFDNGSIPHQIHLGELHAILRRQEDFYPFLKDNREKIEKILTFRIPYYVGPLARGNSRFAWMTRKSEETITPWNFEEVVDKGASAQSFIERMTNFDKNLPNEKVLPKHSLLYEYFTVYNELTKVKYVTEGMRKPAFLSGEQKKAIVDLLFKTNRKVTVKQLKEDYFKKIECFDSVEISGVEDRFNASLGTYHDLLKIIKDKDFLDNEENEDILEDIVLTLTLFEDREMIEERLKTYAHLFDDKVMKQLKRRRYTGWGRLSRKLINGIRDKQSGKTILDFLKSDGFANRNFMQLIHDDSLTFKEDIQKAQVSGQGDSLHEHIANLAGSPAIKKGILQTVKVVDELVKVMGRHKPENIVIEMARENQTTQKGQKNSRERMKRIEEGIKELGSQILKEHPVENTQLQNEKLYLYYLQNGRDMYVDQELDINRLSDYDVDHIVPQSFLKDDSIDNKVLTRSDKARGKSDNVPSEEVVKKMKNYWRQLLNAKLITQRKFDNLTKAERGGLSELDKAGFIKRQLVETRQITKHVAQILDSRMNTKYDENDKLIREVKVITLKSKLVSDFRKDFQFYKVREINNYHHAHDAYLNAVVGTALIKKYPKLESEFVYGDYKVYDVRKMIAKSEQEIGKATAKYFFYSNIMNFFKTEITLANGEIRKRPLIETNGETGEIVWDKGRDFATVRKVLSMPQVNIVKKTEVQTGGFSKESILPKRNSDKLIARKKDWDPKKYGGFDSPTVAYSVLVVAKVEKGKSKKLKSVKELLGITIMERSSFEKNPIDFLEAKGYKEVKKDLIIKLPKYSLFELENGRKRMLASAGELQKGNELALPSKYVNFLYLASHYEKLKGSPEDNEQKQLFVEQHKHYLDEIIEQISEFSKRVILADANLDKVLSAYNKHRDKPIREQAENIIHLFTLTNLGAPAAFKYFDTTIDRKRYTSTKEVLDATLIHQSITGLYETRIDLSQLGGDGGGGSGGGGGIPWLMKKPLQLTTLVPLQEYEERLLKQTMLTGSYKEKLQSLFLKYDALWQHWENQVGHRRIKPHHIATGTVNPRPQKQYPINPKAKASIQTVINDLLKQGVLIQQNSIMNTPVYPVPKPDGKWRMVLDYREVNKTIPLIAAQNQHSAGILSSIFRGKYKTTLDLSNGFWAHSITPESYWLTAFTWLGQQYCWTRLPQGFLNSPALFNADVVDLLKEVPNVQVYVDDIYISHDDPREHLEQLEKVFSLLLNAGYVVSLKKSEIAQHEVEFLGFNITKEGRGLTETFKQKLLNITPPRDLKQLQSILGLLNFARNFIPNFSELVKPLYNIIATAPGKYITWTTDNSQQLQNIISMLNSAENLEERNPEVRLIMKVNTSPSAGYIRFYNEFAKRPIMYLNYVYTKAEVKFTNTEKLLTTIHKGLIKALDLGMGQEILVYSPIVSMTKIQKTPLPERKALPIRWITWMSYLEDPRIQFHYDKTLPELQQVPTVTDDIIAKIKHPSEFSMVFYTDGSAIKHPNVNKSHNAGMGIAQVQFKPEFTVINTWSIPLGDHTAQLAEVAAVEFACKKALKIDGPVLIVTDSFYVAESVNKELPYWQSNGFFNNKKKPLKHVSKWKSIADCIQLKPDIIIIHEKGHQPTASTFHTEGNNLADKLATQGSYVVNAGKRTADGSEFEKRTADGSEFESPKKKAKVE

SEQ ID NO: 6581 - protein, 2089 aa, synthetic construct
MPAAKRVKLDGGDKKYSIGLDIGTNSVGWAVITDEYKVPSKKFKVLGNTDRHSIKKNLIGALLFDSGETAEATRLKRTARRRYTRRKNRICYLQEIFSNEMAKVDDSFFHRLEESFLVEEDKKHERHPIFGNIVDEVAYHEKYPTIYHLRKKLVDSTDKADLRLIYLALAHMIKFRGHFLIEGDLNPDNSDVDKLFIQLVQTYNQLFEENPINASGVDAKAILSARLSKSRRLENLIAQLPGEKKNGLFGNLIALSLGLTPNFKSNFDLAEDAKLQLSKDTYDDDLDNLLAQIGDQYADLFLAAKNLSDAILLSDILRVNTEITKAPLSASMIKRYDEHHQDLTLLKALVRQQLPEKYKEIFFDQSKNGYAGYIDGGASQEEFYKFIKPILEKMDGTEELLVKLNREDLLRKQRTFDNGSIPHQIHLGELHAILRRQEDFYPFLKDNREKIEKILTFRIPYYVGPLARGNSRFAWMTRKSEETITPWNFEEVVDKGASAQSFIERMTNFDKNLPNEKVLPKHSLLYEYFTVYNELTKVKYVTEGMRKPAFLSGEQKKAIVDLLFKTNRKVTVKQLKEDYFKKIECFDSVEISGVEDRFNASLGTYHDLLKIIKDKDFLDNEENEDILEDIVLTLTLFEDREMIEERLKTYAHLFDDKVMKQLKRRRYTGWGRLSRKLINGIRDKQSGKTILDFLKSDGFANRNFMQLIHDDSLTFKEDIQKAQVSGQGDSLHEHIANLAGSPAIKKGILQTVKVVDELVKVMGRHKPENIVIEMARENQTTQKGQKNSRERMKRIEEGIKELGSQILKEHPVENTQLQNEKLYLYYLQNGRDMYVDQELDINRLSDYDVDHIVPQSFLKDDSIDNKVLTRSDKARGKSDNVPSEEVVKKMKNYWRQLLNAKLITQRKFDNLTKAERGGLSELDKAGFIKRQLVETRQITKHVAQILDSRMNTKYDENDKLIREVKVITLKSKLVSDFRKDFQFYKVREINNYHHAHDAYLNAVVGTALIKKYPKLESEFVYGDYKVYDVRKMIAKSEQEIGKATAKYFFYSNIMNFFKTEITLANGEIRKRPLIETNGETGEIVWDKGRDFATVRKVLSMPQVNIVKKTEVQTGGFSKESILPKRNSDKLIARKKDWDPKKYGGFDSPTVAYSVLVVAKVEKGKSKKLKSVKELLGITIMERSSFEKNPIDFLEAKGYKEVKKDLIIKLPKYSLFELENGRKRMLASAGELQKGNELALPSKYVNFLYLASHYEKLKGSPEDNEQKQLFVEQHKHYLDEIIEQISEFSKRVILADANLDKVLSAYNKHRDKPIREQAENIIHLFTLTNLGAPAAFKYFDTTIDRKRYTSTKEVLDATLIHQSITGLYETRIDLSQLGGDGGGGSGGGGGVLNLEEEYRLHEKPVPSSIDPSWLQLFPTVWAERAGMGLANQVPPVVVELRSGASPVAVRQYPMSKEAREGIRPHIQRFLDLGVLVPCQSPWNTPLLPVKKPGTNDYRPVQDLREINKRVQDIHPTVPNPYNLLSSLPPSHTWYSVLDLKDAFFCLKLHPNSQPLFAFEWRDPEKGNTGQLTWTRLPQGFKNSPTLFNEALHRDLAPFRALNPQVVLLQYVDDLLVAAPTYRDCKEGTQKLLQELSKLGYRVSAKKAQLCQKEVTYLGYLLKEGKRWLTPARKATVMKIPPPTTPRQVREFLGKAGFCRLFIPGFASLAAPLYPLTKPSIPFIWTEEHQKAFDRIKEALLSAPALALPDLTKPFTLYVDERAGVARGVLTQTLGPWRRPVAYLSKKLDPVASGWPTCLKAVAAVALLLKDADKLTLGQNVTVIASHSLESIVRQPPDRWMTNARMTHYQSLLLNERVSFAPPAVLNPATLLPVESEATPVHRCSEILAEETGTRRDLKDQPLPGVPAWYTDGSSFIAEGKRRAGAAIVDGKRTVWASSLPEGTSAQKAELVALTQALRLAEGKDINIYTDSRYAFATAHIHGAIYKQRGWLTSAGKDIKNKEEILALLEAIHLPKRVAIIHCPGHQKGNDPVATGNRRADEAAKQAALSTRVLAETTKPAGKRTADGSEFEKRTADGSEFESPKKKAKVE

SEQ ID NO: 6582 - protein, 2091 aa, synthetic construct
MPAAKRVKLDGGDKKYSIGLDIGTNSVGWAVITDEYKVPSKKFKVLGNTDRHSIKKNLIGALLFDSGETAEATRLKRTARRRYTRRKNRICYLQEIFSNEMAKVDDSFFHRLEESFLVEEDKKHERHPIFGNIVDEVAYHEKYPTIYHLRKKLVDSTDKADLRLIYLALAHMIKFRGHFLIEGDLNPDNSDVDKLFIQLVQTYNQLFEENPINASGVDAKAILSARLSKSRRLENLIAQLPGEKKNGLFGNLIALSLGLTPNFKSNFDLAEDAKLQLSKDTYDDDLDNLLAQIGDQYADLFLAAKNLSDAILLSDILRVNTEITKAPLSASMIKRYDEHHQDLTLLKALVRQQLPEKYKEIFFDQSKNGYAGYIDGGASQEEFYKFIKPILEKMDGTEELLVKLNREDLLRKQRTFDNGSIPHQIHLGELHAILRRQEDFYPFLKDNREKIEKILTFRIPYYVGPLARGNSRFAWMTRKSEETITPWNFEEVVDKGASAQSFIERMTNFDKNLPNEKVLPKHSLLYEYFTVYNELTKVKYVTEGMRKPAFLSGEQKKAIVDLLFKTNRKVTVKQLKEDYFKKIECFDSVEISGVEDRFNASLGTYHDLLKIIKDKDFLDNEENEDILEDIVLTLTLFEDREMIEERLKTYAHLFDDKVMKQLKRRRYTGWGRLSRKLINGIRDKQSGKTILDFLKSDGFANRNFMQLIHDDSLTFKEDIQKAQVSGQGDSLHEHIANLAGSPAIKKGILQTVKVVDELVKVMGRHKPENIVIEMARENQTTQKGQKNSRERMKRIEEGIKELGSQILKEHPVENTQLQNEKLYLYYLQNGRDMYVDQELDINRLSDYDVDHIVPQSFLKDDSIDNKVLTRSDKARGKSDNVPSEEVVKKMKNYWRQLLNAKLITQRKFDNLTKAERGGLSELDKAGFIKRQLVETRQITKHVAQILDSRMNTKYDENDKLIREVKVITLKSKLVSDFRKDFQFYKVREINNYHHAHDAYLNAVVGTALIKKYPKLESEFVYGDYKVYDVRKMIAKSEQEIGKATAKYFFYSNIMNFFKTEITLANGEIRKRPLIETNGETGEIVWDKGRDFATVRKVLSMPQVNIVKKTEVQTGGFSKESILPKRNSDKLIARKKDWDPKKYGGFDSPTVAYSVLVVAKVEKGKSKKLKSVKELLGITIMERSSFEKNPIDFLEAKGYKEVKKDLIIKLPKYSLFELENGRKRMLASAGELQKGNELALPSKYVNFLYLASHYEKLKGSPEDNEQKQLFVEQHKHYLDEIIEQISEFSKRVILADANLDKVLSAYNKHRDKPIREQAENIIHLFTLTNLGAPAAFKYFDTTIDRKRYTSTKEVLDATLIHQSITGLYETRIDLSQLGGDGGGGSGGGGGTLNIEDEYRLHETSKEPDVPLGSTWLSDFPQAWAETGGMGLAVRQAPLIIPLKATSTPVSIKQYPMSQEARLGIKPHIQRLLDQGILVPCQSPWNTPLLPVKKPGTNDYRPVQDLREVNKRVEDIHPTVPNPYNLLSGLPPSHQWYTVLDLKDAFFCLRLHPTSQPLFAFEWRDPEMGISGQLTWTRLPQGFKNSPTLFNEALHRDLADFRIQHPDLILLQYVDDLLLAATSEQDCQRGTRALLQTLGNLGYRASAKKAQICQKQVKYLGYLLKEGQRWLTEARKETVMGQPTPKTPRQLREFLGTAGFCRLWIPGFAEMAAPLYPLTKPGTLFNWGPDQQKAYQEIKQALLTAPALGLPDLTKPFELFVDEKQGYAKGVLTQKLGPWRRPVAYLSKKLDPVAAGWPPCLRMVAAIAVLTKDAGKLTMGQPLVILAPHAVEALVKQPPDRWLSNARMTHYQAMLLDTDRVQFGPVVALNPATLLPLPEKEAPHDCLEILAETHGTRPDLTDQPIPDADYTWYTDGSSFLQEGQRRAGAAVTTETEVIWARALPAGTSAQRAELIALTQALKMAEGKKLNVYTDSRYAFATAHVHGEIYRRRGWLTSEGREIKNKNEILALLKALFLPKRLSIIHCPGHQKGNSAEARGNRMADQAAREAAMKAVLETSTLLAGKRTADGSEFEKRTADGSEFESPKKKAKVE

SEQ ID NO: 6583 - protein, 2091 aa, synthetic construct
MPAAKRVKLDGGDKKYSIGLDIGTNSVGWAVITDEYKVPSKKFKVLGNTDRHSIKKNLIGALLFDSGETAEATRLKRTARRRYTRRKNRICYLQEIFSNEMAKVDDSFFHRLEESFLVEEDKKHERHPIFGNIVDEVAYHEKYPTIYHLRKKLVDSTDKADLRLIYLALAHMIKFRGHFLIEGDLNPDNSDVDKLFIQLVQTYNQLFEENPINASGVDAKAILSARLSKSRRLENLIAQLPGEKKNGLFGNLIALSLGLTPNFKSNFDLAEDAKLQLSKDTYDDDLDNLLAQIGDQYADLFLAAKNLSDAILLSDILRVNTEITKAPLSASMIKRYDEHHQDLTLLKALVRQQLPEKYKEIFFDQSKNGYAGYIDGGASQEEFYKFIKPILEKMDGTEELLVKLNREDLLRKQRTFDNGSIPHQIHLGELHAILRRQEDFYPFLKDNREKIEKILTFRIPYYVGPLARGNSRFAWMTRKSEETITPWNFEEVVDKGASAQSFIERMTNFDKNLPNEKVLPKHSLLYEYFTVYNELTKVKYVTEGMRKPAFLSGEQKKAIVDLLFKTNRKVTVKQLKEDYFKKIECFDSVEISGVEDRFNASLGTYHDLLKIIKDKDFLDNEENEDILEDIVLTLTLFEDREMIEERLKTYAHLFDDKVMKQLKRRRYTGWGRLSRKLINGIRDKQSGKTILDFLKSDGFANRNFMQLIHDDSLTFKEDIQKAQVSGQGDSLHEHIANLAGSPAIKKGILQTVKVVDELVKVMGRHKPENIVIEMARENQTTQKGQKNSRERMKRIEEGIKELGSQILKEHPVENTQLQNEKLYLYYLQNGRDMYVDQELDINRLSDYDVDHIVPQSFLKDDSIDNKVLTRSDKARGKSDNVPSEEVVKKMKNYWRQLLNAKLITQRKFDNLTKAERGGLSELDKAGFIKRQLVETRQITKHVAQILDSRMNTKYDENDKLIREVKVITLKSKLVSDFRKDFQFYKVREINNYHHAHDAYLNAVVGTALIKKYPKLESEFVYGDYKVYDVRKMIAKSEQEIGKATAKYFFYSNIMNFFKTEITLANGEIRKRPLIETNGETGEIVWDKGRDFATVRKVLSMPQVNIVKKTEVQTGGFSKESILPKRNSDKLIARKKDWDPKKYGGFDSPTVAYSVLVVAKVEKGKSKKLKSVKELLGITIMERSSFEKNPIDFLEAKGYKEVKKDLIIKLPKYSLFELENGRKRMLASAGELQKGNELALPSKYVNFLYLASHYEKLKGSPEDNEQKQLFVEQHKHYLDEIIEQISEFSKRVILADANLDKVLSAYNKHRDKPIREQAENIIHLFTLTNLGAPAAFKYFDTTIDRKRYTSTKEVLDATLIHQSITGLYETRIDLSQLGGDGGGGSGGGGGTLNIEDEYRLHETSKEPDVPLGSTWLSDFPQAWAETGGMGLAVRQAPLIIPLKATSTPVSIKQYPMSQEARLGIKPHIQRLLDQGILVPCQSPWNTPLLPVKKPGTNDYRPVQDLREVNKRVEDIHPTVPNPYNLLSGLPPSHQWYTVLDLKDAFFCLRLHPTSQPLFAFEWRDPEMGISGQLTWTRLPQGFKNSPTLFNEALHRDLADFRIQHPDLILLQYVDDLLLAATSEQDCQRGTRALLQTLGNLGYRASAKKAQICQKQVKYLGYLLKEGQRWLTEARKETVMGQPTPKTPRQLREFLGKAGFCRLFIPGFAEMAAPLYPLTKPGTLFNWGPDQQKAYQEIKQALLTAPALGLPDLTKPFELFVDEKQGYAKGVLTQKLGPWRRPVAYLSKKLDPVAAGWPPCLRMVAAIAVLTKDAGKLTMGQPLVILAPHAVEALVKQPPDRWLSNARMTHYQAMLLDTDRVQFGPVVALNPATLLPLPEKEAPHDCLEILAETHGTRPDLTDQPIPDADYTWYTDGSSFLQEGQRRAGAAVTTETEVIWARALPAGTSAQRAELIALTQALKMAEGKKLNVYTDSRYAFATAHVHGEIYRRRGWLTSEGREIKNKNEILALLKALFLPKRLSIIHCPGHQKGNSAEARGNRMADQAAREAAMKAVLETSTLLAGKRTADGSEFEKRTADGSEFESPKKKAKVE

SEQ ID NO: 6584 - protein, 2093 aa, synthetic construct
MPAAKRVKLDGGDKKYSIGLDIGTNSVGWAVITDEYKVPSKKFKVLGNTDRHSIKKNLIGALLFDSGETAEATRLKRTARRRYTRRKNRICYLQEIFSNEMAKVDDSFFHRLEESFLVEEDKKHERHPIFGNIVDEVAYHEKYPTIYHLRKKLVDSTDKADLRLIYLALAHMIKFRGHFLIEGDLNPDNSDVDKLFIQLVQTYNQLFEENPINASGVDAKAILSARLSKSRRLENLIAQLPGEKKNGLFGNLIALSLGLTPNFKSNFDLAEDAKLQLSKDTYDDDLDNLLAQIGDQYADLFLAAKNLSDAILLSDILRVNTEITKAPLSASMIKRYDEHHQDLTLLKALVRQQLPEKYKEIFFDQSKNGYAGYIDGGASQEEFYKFIKPILEKMDGTEELLVKLNREDLLRKQRTFDNGSIPHQIHLGELHAILRRQEDFYPFLKDNREKIEKILTFRIPYYVGPLARGNSRFAWMTRKSEETITPWNFEEVVDKGASAQSFIERMTNFDKNLPNEKVLPKHSLLYEYFTVYNELTKVKYVTEGMRKPAFLSGEQKKAIVDLLFKTNRKVTVKQLKEDYFKKIECFDSVEISGVEDRFNASLGTYHDLLKIIKDKDFLDNEENEDILEDIVLTLTLFEDREMIEERLKTYAHLFDDKVMKQLKRRRYTGWGRLSRKLINGIRDKQSGKTILDFLKSDGFANRNFMQLIHDDSLTFKEDIQKAQVSGQGDSLHEHIANLAGSPAIKKGILQTVKVVDELVKVMGRHKPENIVIEMARENQTTQKGQKNSRERMKRIEEGIKELGSQILKEHPVENTQLQNEKLYLYYLQNGRDMYVDQELDINRLSDYDVDHIVPQSFLKDDSIDNKVLTRSDKARGKSDNVPSEEVVKKMKNYWRQLLNAKLITQRKFDNLTKAERGGLSELDKAGFIKRQLVETRQITKHVAQILDSRMNTKYDENDKLIREVKVITLKSKLVSDFRKDFQFYKVREINNYHHAHDAYLNAVVGTALIKKYPKLESEFVYGDYKVYDVRKMIAKSEQEIGKATAKYFFYSNIMNFFKTEITLANGEIRKRPLIETNGETGEIVWDKGRDFATVRKVLSMPQVNIVKKTEVQTGGFSKESILPKRNSDKLIARKKDWDPKKYGGFDSPTVAYSVLVVAKVEKGKSKKLKSVKELLGITIMERSSFEKNPIDFLEAKGYKEVKKDLIIKLPKYSLFELENGRKRMLASAGELQKGNELALPSKYVNFLYLASHYEKLKGSPEDNEQKQLFVEQHKHYLDEIIEQISEFSKRVILADANLDKVLSAYNKHRDKPIREQAENIIHLFTLTNLGAPAAFKYFDTTIDRKRYTSTKEVLDATLIHQSITGLYETRIDLSQLGGDGGGGGGGSGGTAPLEEEYRLFLEAPIQNVTLLEQWKREIPKVWAEINPPGLASTQAPIHVQLLSTALPVRVRQYPITLEAKRSLRETIRKFRAAGILRPVHSPWNTPLLPVRKSGTSEYRMVQDLREVNKRVETIHPTVPNPYTLLSLLPPDRIWYSVLDLKDAFFCIPLAPESQLIFAFEWADAEEGESGQLTWTRLPQGFKNSPTLFNEALNRDLQGFRLDHPSVSLLQYVDDLLIAADTQAACLSATRDLLMTLAELGYRVSGKKAQLCQEEVTYLGFKIHKGSRSLSNSRTQAILQIPVPKTKRQVREFLGTIGYCRLWIPGFAELAQPLYAATRPGNDPLVWGEKEEEAFQSLKLALTQPPALALPSLDKPFQLFVEETSGAAKGVLTQALGPWKRPVAYLSKRLDPVAAGWPRCLRAIAAAALLTREASKLTFGQDIEITSSHNLESLLRSPPDKWLTNARITQYQVLLLDPPRVRFKQTAALNPATLLPETDDTLPIHHCLDTLDSLTSTRPDLTDQPLAQAEATLFTDGSSYIRDGKRYAGAAVVTLDSVIWAEPLPIGTSAQKAELIALTKALEWSKDKSVNIYTDSRYAFATLHVHGMIYRERGWLTAGGKAIKNAPEILALLTAVWLPKRVAVMHCKGHQKDDAPTSTGNRRADEVAREVAIRPLSTQATISAGKRTADGSEFEKRTADGSEFESPKKKAKVE

SEQ ID NO: 6585 - protein, 2093 aa, synthetic construct
MPAAKRVKLDGGDKKYSIGLDIGTNSVGWAVITDEYKVPSKKFKVLGNTDRHSIKKNLIGALLFDSGETAEATRLKRTARRRYTRRKNRICYLQEIFSNEMAKVDDSFFHRLEESFLVEEDKKHERHPIFGNIVDEVAYHEKYPTIYHLRKKLVDSTDKADLRLIYLALAHMIKFRGHFLIEGDLNPDNSDVDKLFIQLVQTYNQLFEENPINASGVDAKAILSARLSKSRRLENLIAQLPGEKKNGLFGNLIALSLGLTPNFKSNFDLAEDAKLQLSKDTYDDDLDNLLAQIGDQYADLFLAAKNLSDAILLSDILRVNTEITKAPLSASMIKRYDEHHQDLTLLKALVRQQLPEKYKEIFFDQSKNGYAGYIDGGASQEEFYKFIKPILEKMDGTEELLVKLNREDLLRKQRTFDNGSIPHQIHLGELHAILRRQEDFYPFLKDNREKIEKILTFRIPYYVGPLARGNSRFAWMTRKSEETITPWNFEEVVDKGASAQSFIERMTNFDKNLPNEKVLPKHSLLYEYFTVYNELTKVKYVTEGMRKPAFLSGEQKKAIVDLLFKTNRKVTVKQLKEDYFKKIECFDSVEISGVEDRFNASLGTYHDLLKIIKDKDFLDNEENEDILEDIVLTLTLFEDREMIEERLKTYAHLFDDKVMKQLKRRRYTGWGRLSRKLINGIRDKQSGKTILDFLKSDGFANRNFMQLIHDDSLTFKEDIQKAQVSGQGDSLHEHIANLAGSPAIKKGILQTVKVVDELVKVMGRHKPENIVIEMARENQTTQKGQKNSRERMKRIEEGIKELGSQILKEHPVENTQLQNEKLYLYYLQNGRDMYVDQELDINRLSDYDVDHIVPQSFLKDDSIDNKVLTRSDKARGKSDNVPSEEVVKKMKNYWRQLLNAKLITQRKFDNLTKAERGGLSELDKAGFIKRQLVETRQITKHVAQILDSRMNTKYDENDKLIREVKVITLKSKLVSDFRKDFQFYKVREINNYHHAHDAYLNAVVGTALIKKYPKLESEFVYGDYKVYDVRKMIAKSEQEIGKATAKYFFYSNIMNFFKTEITLANGEIRKRPLIETNGETGEIVWDKGRDFATVRKVLSMPQVNIVKKTEVQTGGFSKESILPKRNSDKLIARKKDWDPKKYGGFDSPTVAYSVLVVAKVEKGKSKKLKSVKELLGITIMERSSFEKNPIDFLEAKGYKEVKKDLIIKLPKYSLFELENGRKRMLASAGELQKGNELALPSKYVNFLYLASHYEKLKGSPEDNEQKQLFVEQHKHYLDEIIEQISEFSKRVILADANLDKVLSAYNKHRDKPIREQAENIIHLFTLTNLGAPAAFKYFDTTIDRKRYTSTKEVLDATLIHQSITGLYETRIDLSQLGGDGGGGGGGSGGTAPLEEEYRLFLEAPIQNVTLLEQWKREIPKVWAEINPPGLASTQAPIHVQLLSTALPVRVRQYPITLEAKRSLRETIRKFRAAGILRPVHSPWNTPLLPVRKSGTSEYRMVQDLREVNKRVETIHPTVPNPYTLLSLLPPDRIWYSVLDLKDAFFCIPLAPESQLIFAFEWADAEEGESGQLTWTRLPQGFKNSPTLFNEALNRDLQGFRLDHPSVSLLQYVDDLLIAADTQAACLSATRDLLMTLAELGYRVSGKKAQLCQEEVTYLGFKIHKGSRSLSNSRTQAILQIPVPKTKRQVREFLGKIGYCRLFIPGFAELAQPLYAATRPGNDPLVWGEKEEEAFQSLKLALTQPPALALPSLDKPFQLFVEETSGAAKGVLTQALGPWKRPVAYLSKRLDPVAAGWPRCLRAIAAAALLTREASKLTFGQDIEITSSHNLESLLRSPPDKWLTNARITQYQVLLLDPPRVRFKQTAALNPATLLPETDDTLPIHHCLDTLDSLTSTRPDLTDQPLAQAEATLFTDGSSYIRDGKRYAGAAVVTLDSVIWAEPLPIGTSAQKAELIALTKALEWSKDKSVNIYTDSRYAFATLHVHGMIYRERGWLTAGGKAIKNAPEILALLTAVWLPKRVAVMHCKGHQKDDAPTSTGNRRADEVAREVAIRPLSTQATISAGKRTADGSEFEKRTADGSEFESPKKKAKVE

SEQ ID NO: 6586 - protein, 2097 aa, synthetic construct
MPAAKRVKLDGGDKKYSIGLDIGTNSVGWAVITDEYKVPSKKFKVLGNTDRHSIKKNLIGALLFDSGETAEATRLKRTARRRYTRRKNRICYLQEIFSNEMAKVDDSFFHRLEESFLVEEDKKHERHPIFGNIVDEVAYHEKYPTIYHLRKKLVDSTDKADLRLIYLALAHMIKFRGHFLIEGDLNPDNSDVDKLFIQLVQTYNQLFEENPINASGVDAKAILSARLSKSRRLENLIAQLPGEKKNGLFGNLIALSLGLTPNFKSNFDLAEDAKLQLSKDTYDDDLDNLLAQIGDQYADLFLAAKNLSDAILLSDILRVNTEITKAPLSASMIKRYDEHHQDLTLLKALVRQQLPEKYKEIFFDQSKNGYAGYIDGGASQEEFYKFIKPILEKMDGTEELLVKLNREDLLRKQRTFDNGSIPHQIHLGELHAILRRQEDFYPFLKDNREKIEKILTFRIPYYVGPLARGNSRFAWMTRKSEETITPWNFEEVVDKGASAQSFIERMTNFDKNLPNEKVLPKHSLLYEYFTVYNELTKVKYVTEGMRKPAFLSGEQKKAIVDLLFKTNRKVTVKQLKEDYFKKIECFDSVEISGVEDRFNASLGTYHDLLKIIKDKDFLDNEENEDILEDIVLTLTLFEDREMIEERLKTYAHLFDDKVMKQLKRRRYTGWGRLSRKLINGIRDKQSGKTILDFLKSDGFANRNFMQLIHDDSLTFKEDIQKAQVSGQGDSLHEHIANLAGSPAIKKGILQTVKVVDELVKVMGRHKPENIVIEMARENQTTQKGQKNSRERMKRIEEGIKELGSQILKEHPVENTQLQNEKLYLYYLQNGRDMYVDQELDINRLSDYDVDHIVPQSFLKDDSIDNKVLTRSDKARGKSDNVPSEEVVKKMKNYWRQLLNAKLITQRKFDNLTKAERGGLSELDKAGFIKRQLVETRQITKHVAQILDSRMNTKYDENDKLIREVKVITLKSKLVSDFRKDFQFYKVREINNYHHAHDAYLNAVVGTALIKKYPKLESEFVYGDYKVYDVRKMIAKSEQEIGKATAKYFFYSNIMNFFKTEITLANGEIRKRPLIETNGETGEIVWDKGRDFATVRKVLSMPQVNIVKKTEVQTGGFSKESILPKRNSDKLIARKKDWDPKKYGGFDSPTVAYSVLVVAKVEKGKSKKLKSVKELLGITIMERSSFEKNPIDFLEAKGYKEVKKDLIIKLPKYSLFELENGRKRMLASAGELQKGNELALPSKYVNFLYLASHYEKLKGSPEDNEQKQLFVEQHKHYLDEIIEQISEFSKRVILADANLDKVLSAYNKHRDKPIREQAENIIHLFTLTNLGAPAAFKYFDTTIDRKRYTSTKEVLDATLIHQSITGLYETRIDLSQLGGDGGGGGGGSGGTVSLQDEHRLFDIPVTTSLPDVWLQDFPQAWAETGGLGRAKCQAPIIIDLKPTAVPVSIKQYPMSLEAHMGIRQHIIKFLELGVLRPCRSPWNTPLLPVKKPGTQDYRPVQDLREINKRTVDIHPTVPNPYNLLSTLKPDYSWYTVLDLKDAFFCLPLAPQSQELFAFEWKDPERGISGQLTWTRLPQGFKNSPTLFNEALHRDLTDFRTQHPEVTLLQYVDDLLLAAPTKKACTQGTRHLLQELGEKGYRASAKKAQICQTKVTYLGYILSEGKRWLTPGRIETVARIPPPRNPREVREFLGTAGFCRLWIPGFAELAAPLYALTKPSTPFTWQTEHQLAFEALKKALLSAPALGLPDTSKPFTLFLDERQGIAKGVLTQKLGPWKRPVAYLSKKLDPVAAGWPPCLRIMAATAMLVKDSAKLTLGQPLTVITPHTLEAIVRQPPDRWITNARLTHYQALLLDTDRVQFGPPVTLNPATLLPVPENQPSPHDCRQVLAETHGTREDLKDQELPDADHTWYTDGSSYLDSGTRRAGAAVVDGHNTIWAQSLPPGTSAQKAELIALTKALELSKGKKANIYTDSRYAFATAHTHGSIYERRGWLTSEGKEIKNKAEIIALLKALFLPQEVAIIHCPGHQKGQDPVAVGNRQADRVARQAAMAEVLTLATEPDNTSHITAGKRTADGSEFEKRTADGSEFESPKKKAKVE

SEQ ID NO: 6587 - protein, 2090 aa, synthetic construct
MPAAKRVKLDGGDKKYSIGLDIGTNSVGWAVITDEYKVPSKKFKVLGNTDRHSIKKNLIGALLFDSGETAEATRLKRTARRRYTRRKNRICYLQEIFSNEMAKVDDSFFHRLEESFLVEEDKKHERHPIFGNIVDEVAYHEKYPTIYHLRKKLVDSTDKADLRLIYLALAHMIKFRGHFLIEGDLNPDNSDVDKLFIQLVQTYNQLFEENPINASGVDAKAILSARLSKSRRLENLIAQLPGEKKNGLFGNLIALSLGLTPNFKSNFDLAEDAKLQLSKDTYDDDLDNLLAQIGDQYADLFLAAKNLSDAILLSDILRVNTEITKAPLSASMIKRYDEHHQDLTLLKALVRQQLPEKYKEIFFDQSKNGYAGYIDGGASQEEFYKFIKPILEKMDGTEELLVKLNREDLLRKQRTFDNGSIPHQIHLGELHAILRRQEDFYPFLKDNREKIEKILTFRIPYYVGPLARGNSRFAWMTRKSEETITPWNFEEVVDKGASAQSFIERMTNFDKNLPNEKVLPKHSLLYEYFTVYNELTKVKYVTEGMRKPAFLSGEQKKAIVDLLFKTNRKVTVKQLKEDYFKKIECFDSVEISGVEDRFNASLGTYHDLLKIIKDKDFLDNEENEDILEDIVLTLTLFEDREMIEERLKTYAHLFDDKVMKQLKRRRYTGWGRLSRKLINGIRDKQSGKTILDFLKSDGFANRNFMQLIHDDSLTFKEDIQKAQVSGQGDSLHEHIANLAGSPAIKKGILQTVKVVDELVKVMGRHKPENIVIEMARENQTTQKGQKNSRERMKRIEEGIKELGSQILKEHPVENTQLQNEKLYLYYLQNGRDMYVDQELDINRLSDYDVDHIVPQSFLKDDSIDNKVLTRSDKARGKSDNVPSEEVVKKMKNYWRQLLNAKLITQRKFDNLTKAERGGLSELDKAGFIKRQLVETRQITKHVAQILDSRMNTKYDENDKLIREVKVITLKSKLVSDFRKDFQFYKVREINNYHHAHDAYLNAVVGTALIKKYPKLESEFVYGDYKVYDVRKMIAKSEQEIGKATAKYFFYSNIMNFFKTEITLANGEIRKRPLIETNGETGEIVWDKGRDFATVRKVLSMPQVNIVKKTEVQTGGFSKESILPKRNSDKLIARKKDWDPKKYGGFDSPTVAYSVLVVAKVEKGKSKKLKSVKELLGITIMERSSFEKNPIDFLEAKGYKEVKKDLIIKLPKYSLFELENGRKRMLASAGELQKGNELALPSKYVNFLYLASHYEKLKGSPEDNEQKQLFVEQHKHYLDEIIEQISEFSKRVILADANLDKVLSAYNKHRDKPIREQAENIIHLFTLTNLGAPAAFKYFDTTIDRKRYTSTKEVLDATLIHQSITGLYETRIDLSQLGGDGGGGGGGSGGTLQLEEEYRLFEPESTQKQEMDIWLKNFPQAWAETGGMGTAHCQAPVLIQLKATATPISIRQYPMPHEAYQGIKPHIRRMLDQGILKPCQSPWNTPLLPVKKPGTEDYRPVQDLREVNKRVEDIHPTVPNPYNLLSTLPPSHPWYTVLDLKDAFFCLRLHSESQLLFAFEWRDPEIGLSGQLTWTRLPQGFKNSPTLFNEALHSDLADFRVRYPALVLLQYVDDLLLAAATRTECLEGTKALLETLGNKGYRASAKKAQICLQEVTYLGYSLKDGQRWLTKARKEAILSIPVPKNSRQVREFLGTAGYCRLWIPGFAELAAPLYPLTRPGTLFQWGTEQQLAFEDIKKALLSSPALGLPDITKPFELFIDENSGFAKGVLVQKLGPWKRPVAYLSKKLDTVASGWPPCLRMVAAIAILVKDAGKLTLGQPLTILTSHPVEALVRQPPNKWLSNARMTHYQAMLLDAERVHFGPTVSLNPATLLPLPSGGNHHDCLQILAETHGTRPDLTDQPLPDADLTWYTDGSSFIRNGEREAGAAVTTESEVIWAAPLPPGTSAQRAELIALTQALKMAEGKKLTVYTDSRYAFATTHVHGEIYRRRGWLTSEGKEIKNKNEILALLEALFLPKRLSIIHCPGHQKGDSPQAKGNRLADDTAKKAATETHSSLTVLPAGKRTADGSEFEKRTADGSEFESPKKKAKVE

SEQ ID NO: 6588 - protein, 2213 aa, synthetic construct
MPAAKRVKLDGGDKKYSIGLDIGTNSVGWAVITDEYKVPSKKFKVLGNTDRHSIKKNLIGALLFDSGETAEATRLKRTARRRYTRRKNRICYLQEIFSNEMAKVDDSFFHRLEESFLVEEDKKHERHPIFGNIVDEVAYHEKYPTIYHLRKKLVDSTDKADLRLIYLALAHMIKFRGHFLIEGDLNPDNSDVDKLFIQLVQTYNQLFEENPINASGVDAKAILSARLSKSRRLENLIAQLPGEKKNGLFGNLIALSLGLTPNFKSNFDLAEDAKLQLSKDTYDDDLDNLLAQIGDQYADLFLAAKNLSDAILLSDILRVNTEITKAPLSASMIKRYDEHHQDLTLLKALVRQQLPEKYKEIFFDQSKNGYAGYIDGGASQEEFYKFIKPILEKMDGTEELLVKLNREDLLRKQRTFDNGSIPHQIHLGELHAILRRQEDFYPFLKDNREKIEKILTFRIPYYVGPLARGNSRFAWMTRKSEETITPWNFEEVVDKGASAQSFIERMTNFDKNLPNEKVLPKHSLLYEYFTVYNELTKVKYVTEGMRKPAFLSGEQKKAIVDLLFKTNRKVTVKQLKEDYFKKIECFDSVEISGVEDRFNASLGTYHDLLKIIKDKDFLDNEENEDILEDIVLTLTLFEDREMIEERLKTYAHLFDDKVMKQLKRRRYTGWGRLSRKLINGIRDKQSGKTILDFLKSDGFANRNFMQLIHDDSLTFKEDIQKAQVSGQGDSLHEHIANLAGSPAIKKGILQTVKVVDELVKVMGRHKPENIVIEMARENQTTQKGQKNSRERMKRIEEGIKELGSQILKEHPVENTQLQNEKLYLYYLQNGRDMYVDQELDINRLSDYDVDHIVPQSFLKDDSIDNKVLTRSDKARGKSDNVPSEEVVKKMKNYWRQLLNAKLITQRKFDNLTKAERGGLSELDKAGFIKRQLVETRQITKHVAQILDSRMNTKYDENDKLIREVKVITLKSKLVSDFRKDFQFYKVREINNYHHAHDAYLNAVVGTALIKKYPKLESEFVYGDYKVYDVRKMIAKSEQEIGKATAKYFFYSNIMNFFKTEITLANGEIRKRPLIETNGETGEIVWDKGRDFATVRKVLSMPQVNIVKKTEVQTGGFSKESILPKRNSDKLIARKKDWDPKKYGGFDSPTVAYSVLVVAKVEKGKSKKLKSVKELLGITIMERSSFEKNPIDFLEAKGYKEVKKDLIIKLPKYSLFELENGRKRMLASAGELQKGNELALPSKYVNFLYLASHYEKLKGSPEDNEQKQLFVEQHKHYLDEIIEQISEFSKRVILADANLDKVLSAYNKHRDKPIREQAENIIHLFTLTNLGAPAAFKYFDTTIDRKRYTSTKEVLDATLIHQSITGLYETRIDLSQLGGDGGGGGGGSGGTLGDQGSRGSDPLPEPRVTLTVEGIPTEFLVNTGAEHSVLTKPMGKMGSKRTVVAGATGSKVYPWTTKRLLKIGQKQVTHSFLVIPECPAPLLGRDLLTKLKAQIQFSTEGPQVTWEDRPAMCLVLNLEEEYRLHEKPVPPSIDPSWLQLFPMVWAEKAGMGLANQVPPVVVELKSDASPVAVRQYPMSKEAREGIRPHIQRFLDLGILVPCQSPWNTPLLPVKKPGTNDYRPVQDLREVNKRVQDIHPTVPNPYNLLSSLPPSHTWYSVLDLKDAFFCLKLHPNSQPLFAFEWRDPEKGNTGQLTWTRLPQGFKNSPTLFNEALHRDLASFRALNPQVVMLQYVDDLLVAAPTYRDCKEGTRRLLQELSKLGYRVSAKKAQLCREEVTYLGYLLKGGKRWLTPARKATVMKIPTPTTPRQVREFLGKAGFCRLFIPGFASLAAPLYPLTRPKVPFTWTEAHQEAFGRIKEALLSAPALALPDLTKPFALYVDEKEGVARGVLTQTLGPWRRPVAYLSKKLDPVASGWPTCLKAIAAVALLLKDADKLTLGQNVLVIAPHNLESIVRQPPDRWMTNARMTHYQSLLLNERVSFAPPAILNPATLLPVESDDTPIHICSEILAEETGTRPDLRDQPLPGVPAWYTDGSSFIMDGRRQAGAAIVDNKRTVWASNLPEGTSAQKAELIALTQALRLAEGKSINIYTDSRYAFATAHVHGAIYKQRGWLTSAGKDIKNKEEILALLEAIHLPKRVAIIHCPGHQRGTDPVATGNRKADEAAKQAAQSTRILTETTKNAGKRTADGSEFEKRTADGSEFESPKKKAKVE

SEQ ID NO: 6589 - protein, 2091 aa, synthetic construct; identical to SEQ ID NO: 4511

SEQ ID NO: 6590 - protein, 2091 aa, synthetic construct
MPAAKRVKLDGGDKKYSIGLDIGTNSVGWAVITDEYKVPSKKFKVLGNTDRHSIKKNLIGALLFDSGETAEATRLKRTARRRYTRRKNRICYLQEIFSNEMAKVDDSFFHRLEESFLVEEDKKHERHPIFGNIVDEVAYHEKYPTIYHLRKKLVDSTDKADLRLIYLALAHMIKFRGHFLIEGDLNPDNSDVDKLFIQLVQTYNQLFEENPINASGVDAKAILSARLSKSRRLENLIAQLPGEKKNGLFGNLIALSLGLTPNFKSNFDLAEDAKLQLSKDTYDDDLDNLLAQIGDQYADLFLAAKNLSDAILLSDILRVNTEITKAPLSASMIKRYDEHHQDLTLLKALVRQQLPEKYKEIFFDQSKNGYAGYIDGGASQEEFYKFIKPILEKMDGTEELLVKLNREDLLRKQRTFDNGSIPHQIHLGELHAILRRQEDFYPFLKDNREKIEKILTFRIPYYVGPLARGNSRFAWMTRKSEETITPWNFEEVVDKGASAQSFIERMTNFDKNLPNEKVLPKHSLLYEYFTVYNELTKVKYVTEGMRKPAFLSGEQKKAIVDLLFKTNRKVTVKQLKEDYFKKIECFDSVEISGVEDRFNASLGTYHDLLKIIKDKDFLDNEENEDILEDIVLTLTLFEDREMIEERLKTYAHLFDDKVMKQLKRRRYTGWGRLSRKLINGIRDKQSGKTILDFLKSDGFANRNFMQLIHDDSLTFKEDIQKAQVSGQGDSLHEHIANLAGSPAIKKGILQTVKVVDELVKVMGRHKPENIVIEMARENQTTQKGQKNSRERMKRIEEGIKELGSQILKEHPVENTQLQNEKLYLYYLQNGRDMYVDQELDINRLSDYDVDHIVPQSFLKDDSIDNKVLTRSDKARGKSDNVPSEEVVKKMKNYWRQLLNAKLITQRKFDNLTKAERGGLSELDKAGFIKRQLVETRQITKHVAQILDSRMNTKYDENDKLIREVKVITLKSKLVSDFRKDFQFYKVREINNYHHAHDAYLNAVVGTALIKKYPKLESEFVYGDYKVYDVRKMIAKSEQEIGKATAKYFFYSNIMNFFKTEITLANGEIRKRPLIETNGETGEIVWDKGRDFATVRKVLSMPQVNIVKKTEVQTGGFSKESILPKRNSDKLIARKKDWDPKKYGGFDSPTVAYSVLVVAKVEKGKSKKLKSVKELLGITIMERSSFEKNPIDFLEAKGYKEVKKDLIIKLPKYSLFELENGRKRMLASAGELQKGNELALPSKYVNFLYLASHYEKLKGSPEDNEQKQLFVEQHKHYLDEIIEQISEFSKRVILADANLDKVLSAYNKHRDKPIREQAENIIHLFTLTNLGAPAAFKYFDTTIDRKRYTSTKEVLDATLIHQSITGLYETRIDLSQLGGDGGGGGGGSGGTLGIEDEYRLHETSTEPDVSLGSTWLSDFPQAWAETGGMGLAVRQAPLIIPLKATSTPVSIQQYPMSHEARLGIKPHIQRLLDQGILVPCQSPWNTPLLPVKKPGTNDYRPVQDLREVNKRVEDIHPTVPNPYNLLSGLPPSHQWYTVLDLKDAFFCLRLHPTSQPLFAFEWRDPGMGISGQLTWTRLPQGFKNSPTLFNEALHRDLADFRIQHPDLILLQYVDDILLAATSELDCQQGTRALLQTLGDLGYRASAKKAQICQKQVKYLGYLLREGQRWLTEARKETVMGQPVPKTPRQLREFLGTAGFCRLWIPGFAEMAAPLYPLTKPGTLFSWGPDQQKAYQEIKQALLTAPALGLPDLTKPFELFVDEKQGYAKGVLTQKLGPWRRPVAYLSKKLDPVAAGWPPCLRMVAAIAVLTKDAGKLTMGQPLVILAPHAVEALVKQPPDRWLSNARMTHYQAMLLDTDRVQFGPVVALNPATLLPLPEEGAPHDCLEILAETHGTRPDLTDQPIPDADHTWYTDGSSFLQEGQRKAGAAVTTETEVIWAGALPAGTSAQRAELIALTQALKMAEGKRLNVYTDSRYAFATAHIHGEIYRRRGWLTSEGREIKNKSEILALLKALFLPKRLSIIHCLGHQKGDSAEARGNRLADQAAREAAIKTPPDTSTLLAGKRTADGSEFEKRTADGSEFESPKKKAKVE

SEQ ID NO: 6591 - protein, 2091 aa, synthetic construct; identical to SEQ ID NO: 4511

SEQ ID NO: 6592 - protein, 2091 aa, synthetic construct
MPAAKRVKLDGGDKKYSIGLDIGTNSVGWAVITDEYKVPSKKFKVLGNTDRHSIKKNLIGALLFDSGETAEATRLKRTARRRYTRRKNRICYLQEIFSNEMAKVDDSFFHRLEESFLVEEDKKHERHPIFGNIVDEVAYHEKYPTIYHLRKKLVDSTDKADLRLIYLALAHMIKFRGHFLIEGDLNPDNSDVDKLFIQLVQTYNQLFEENPINASGVDAKAILSARLSKSRRLENLIAQLPGEKKNGLFGNLIALSLGLTPNFKSNFDLAEDAKLQLSKDTYDDDLDNLLAQIGDQYADLFLAAKNLSDAILLSDILRVNTEITKAPLSASMIKRYDEHHQDLTLLKALVRQQLPEKYKEIFFDQSKNGYAGYIDGGASQEEFYKFIKPILEKMDGTEELLVKLNREDLLRKQRTFDNGSIPHQIHLGELHAILRRQEDFYPFLKDNREKIEKILTFRIPYYVGPLARGNSRFAWMTRKSEETITPWNFEEVVDKGASAQSFIERMTNFDKNLPNEKVLPKHSLLYEYFTVYNELTKVKYVTEGMRKPAFLSGEQKKAIVDLLFKTNRKVTVKQLKEDYFKKIECFDSVEISGVEDRFNASLGTYHDLLKIIKDKDFLDNEENEDILEDIVLTLTLFEDREMIEERLKTYAHLFDDKVMKQLKRRRYTGWGRLSRKLINGIRDKQSGKTILDFLKSDGFANRNFMQLIHDDSLTFKEDIQKAQVSGQGDSLHEHIANLAGSPAIKKGILQTVKVVDELVKVMGRHKPENIVIEMARENQTTQKGQKNSRERMKRIEEGIKELGSQILKEHPVENTQLQNEKLYLYYLQNGRDMYVDQELDINRLSDYDVDHIVPQSFLKDDSIDNKVLTRSDKARGKSDNVPSEEVVKKMKNYWRQLLNAKLITQRKFDNLTKAERGGLSELDKAGFIKRQLVETRQITKHVAQILDSRMNTKYDENDKLIREVKVITLKSKLVSDFRKDFQFYKVREINNYHHAHDAYLNAVVGTALIKKYPKLESEFVYGDYKVYDVRKMIAKSEQEIGKATAKYFFYSNIMNFFKTEITLANGEIRKRPLIETNGETGEIVWDKGRDFATVRKVLSMPQVNIVKKTEVQTGGFSKESILPKRNSDKLIARKKDWDPKKYGGFDSPTVAYSVLVVAKVEKGKSKKLKSVKELLGITIMERSSFEKNPIDFLEAKGYKEVKKDLIIKLPKYSLFELENGRKRMLASAGELQKGNELALPSKYVNFLYLASHYEKLKGSPEDNEQKQLFVEQHKHYLDEIIEQISEFSKRVILADANLDKVLSAYNKHRDKPIREQAENIIHLFTLTNLGAPAAFKYFDTTIDRKRYTSTKEVLDATLIHQSITGLYETRIDLSQLGGDGGGGGGGSGGTLNIEDEYRLHETSKGPDVPLGSTWLSDFPQAWAETGGMGLAFRQAPLIISLKATSTPVSIKQYPMSQEARLGIKPHIQRLLDQGILVPCQSPWNTPLLPVKKPGTNDYRPVQDLREVNKRVEDIHPTVPNPYNLLSGLPPSHQWYTVLDLKDAFFCLRLHPTSQSLFAFEWKDPEMGISGQLTWTRLPQGFKNSPTLFDEALHRDLADFRIQHPDLILLQYVDDLLLAATSELDCQQGTRALLQTLGDLGYRASAKKAQICQKQVKYLGYLLKEGQRWLTEARKETVMGQPTPKTPRQLREFLGTAGLCRLWIPGFAEMAAPLYPLTKTGTLFKWGPDQQKAYQEIKQALLTAPALGLPDLTKPFELFVDEKQGYAKGVLTQKLGPWRRPVAYLSKKLDPVAAGWPPCLRMVAAIAVLTKDVGKLTMGQPLVILAPHAVEALVKQPPDRWLSNARMTHYQALLLDTDRVQFGPIVALNPATLLPLPEEGLQHDCLDILAEAHGTRPDLTDQPLPDADHTWYTDGSSFLQEGQRRAGAAVTTETEVIWAKALPAGTSAQRAELIALTQALKMAAGKKLNVYTDSRYAFATAHIHGEIYRRRGLLTSEGKEIKNKDEILALLKALFLPKRLSIIHCPGHQKGNHAEARGNRMADQAAREVATRETPETSTLLAGKRTADGSEFEKRTADGSEFESPKKKAKVE

SEQ ID NO: 6593 - protein, 2091 aa, synthetic construct
MPAAKRVKLDGGDKKYSIGLDIGTNSVGWAVITDEYKVPSKKFKVLGNTDRHSIKKNLIGALLFDSGETAEATRLKRTARRRYTRRKNRICYLQEIFSNEMAKVDDSFFHRLEESFLVEEDKKHERHPIFGNIVDEVAYHEKYPTIYHLRKKLVDSTDKADLRLIYLALAHMIKFRGHFLIEGDLNPDNSDVDKLFIQLVQTYNQLFEENPINASGVDAKAILSARLSKSRRLENLIAQLPGEKKNGLFGNLIALSLGLTPNFKSNFDLAEDAKLQLSKDTYDDDLDNLLAQIGDQYADLFLAAKNLSDAILLSDILRVNTEITKAPLSASMIKRYDEHHQDLTLLKALVRQQLPEKYKEIFFDQSKNGYAGYIDGGASQEEFYKFIKPILEKMDGTEELLVKLNREDLLRKQRTFDNGSIPHQIHLGELHAILRRQEDFYPFLKDNREKIEKILTFRIPYYVGPLARGNSRFAWMTRKSEETITPWNFEEVVDKGASAQSFIERMTNFDKNLPNEKVLPKHSLLYEYFTVYNELTKVKYVTEGMRKPAFLSGEQKKAIVDLLFKTNRKVTVKQLKEDYFKKIECFDSVEISGVEDRFNASLGTYHDLLKIIKDKDFLDNEENEDILEDIVLTLTLFEDREMIEERLKTYAHLFDDKVMKQLKRRRYTGWGRLSRKLINGIRDKQSGKTILDFLKSDGFANRNFMQLIHDDSLTFKEDIQKAQVSGQGDSLHEHIANLAGSPAIKKGILQTVKVVDELVKVMGRHKPENIVIEMARENQTTQKGQKNSRERMKRIEEGIKELGSQILKEHPVENTQLQNEKLYLYYLQNGRDMYVDQELDINRLSDYDVDHIVPQSFLKDDSIDNKVLTRSDKARGKSDNVPSEEVVKKMKNYWRQLLNAKLITQRKFDNLTKAERGGLSELDKAGFIKRQLVETRQITKHVAQILDSRMNTKYDENDKLIREVKVITLKSKLVSDFRKDFQFYKVREINNYHHAHDAYLNAVVGTALIKKYPKLESEFVYGDYKVYDVRKMIAKSEQEIGKATAKYFFYSNIMNFFKTEITLANGEIRKRPLIETNGETGEIVWDKGRDFATVRKVLSMPQVNIVKKTEVQTGGFSKESILPKRNSDKLIARKKDWDPKKYGGFDSPTVAYSVLVVAKVEKGKSKKLKSVKELLGITIMERSSFEKNPIDFLEAKGYKEVKKDLIIKLPKYSLFELENGRKRMLASAGELQKGNELALPSKYVNFLYLASHYEKLKGSPEDNEQKQLFVEQHKHYLDEIIEQISEFSKRVILADANLDKVLSAYNKHRDKPIREQAENIIHLFTLTNLGAPAAFKYFDTTIDRKRYTSTKEVLDATLIHQSITGLYETRIDLSQLGGDGGGGGGGSGGTLNIEDEYRLHETSKGPDVPLGSTWLSDFPQAWAETGGMGLAVRQAPLIIPLKATSTPVSIKQYPMSQEARLGIKPHIQRLLDQGILVPCQSPWNTPLLPVKKPGTNDYRPVQDLREVNKRVEDIHPTVPNPYNLLSGLPPSHQWYTVLDLKDAFFCLRLHPTSQSLFAFEWRDPEMGISGQLTWTRLPQGFKNSPTLFNEALHRDLADFRIQHPDLILLQYVDDLLLAATSELDCQQGTRALLQTLGDLGYRASAKKAQICQKQVKYLGYLLKEGQRWLTEARKETVMGQPTPKTPRQLREFLGTAGFCRLWIPGFAEMAAPLYPLTKPGTLFEWGPDQQKAYQEIKQALLTAPALGLPDLTKPFELFVDEKQGYAKGVLTQKLGPWRRPVAYLSKKLDPVAAGWPPCLRMVAAIAVLTKDAGKLTMGQPLVILAPHAVEALVKQPPDRWLSNARMTHYQALLLDTDRVQFGPIVALNPATLLPLPEEGLQHDCLDILAEAHGTRPDLTDQPLPDADHTWYTDGSSFLQEGQRKAGAAVTTETEVVWAKALPAGTSAQRAELIALTQALKMAEGKKLNVYTDSRYAFATAHIHGEIYRRRGWLTSEGKEIKNKDEILALLKALFLPKRLSIIHCPGHQKGNRAEARGNRMADQAAREVATRETPETSTLLAGKRTADGSEFEKRTADGSEFESPKKKAKVE

SEQ ID NO: 6594 - protein, 2091 aa, synthetic construct
MPAAKRVKLDGGDKKYSIGLDIGTNSVGWAVITDEYKVPSKKFKVLGNTDRHSIKKNLIGALLFDSGETAEATRLKRTARRRYTRRKNRICYLQEIFSNEMAKVDDSFFHRLEESFLVEEDKKHERHPIFGNIVDEVAYHEKYPTIYHLRKKLVDSTDKADLRLIYLALAHMIKFRGHFLIEGDLNPDNSDVDKLFIQLVQTYNQLFEENPINASGVDAKAILSARLSKSRRLENLIAQLPGEKKNGLFGNLIALSLGLTPNFKSNFDLAEDAKLQLSKDTYDDDLDNLLAQIGDQYADLFLAAKNLSDAILLSDILRVNTEITKAPLSASMIKRYDEHHQDLTLLKALVRQQLPEKYKEIFFDQSKNGYAGYIDGGASQEEFYKFIKPILEKMDGTEELLVKLNREDLLRKQRTFDNGSIPHQIHLGELHAILRRQEDFYPFLKDNREKIEKILTFRIPYYVGPLARGNSRFAWMTRKSEETITPWNFEEVVDKGASAQSFIERMTNFDKNLPNEKVLPKHSLLYEYFTVYNELTKVKYVTEGMRKPAFLSGEQKKAIVDLLFKTNRKVTVKQLKEDYFKKIECFDSVEISGVEDRFNASLGTYHDLLKIIKDKDFLDNEENEDILEDIVLTLTLFEDREMIEERLKTYAHLFDDKVMKQLKRRRYTGWGRLSRKLINGIRDKQSGKTILDFLKSDGFANRNFMQLIHDDSLTFKEDIQKAQVSGQGDSLHEHIANLAGSPAIKKGILQTVKVVDELVKVMGRHKPENIVIEMARENQTTQKGQKNSRERMKRIEEGIKELGSQILKEHPVENTQLQNEKLYLYYLQNGRDMYVDQELDINRLSDYDVDHIVPQSFLKDDSIDNKVLTRSDKARGKSDNVPSEEVVKKMKNYWRQLLNAKLITQRKFDNLTKAERGGLSELDKAGFIKRQLVETRQITKHVAQILDSRMNTKYDENDKLIREVKVITLKSKLVSDFRKDFQFYKVREINNYHHAHDAYLNAVVGTALIKKYPKLESEFVYGDYKVYDVRKMIAKSEQEIGKATAKYFFYSNIMNFFKTEITLANGEIRKRPLIETNGETGEIVWDKGRDFATVRKVLSMPQVNIVKKTEVQTGGFSKESILPKRNSDKLIARKKDWDPKKYGGFDSPTVAYSVLVVAKVEKGKSKKLKSVKELLGITIMERSSFEKNPIDFLEAKGYKEVKKDLIIKLPKYSLFELENGRKRMLASAGELQKGNELALPSKYVNFLYLASHYEKLKGSPEDNEQKQLFVEQHKHYLDEIIEQISEFSKRVILADANLDKVLSAYNKHRDKPIREQAENIIHLFTLTNLGAPAAFKYFDTTIDRKRYTSTKEVLDATLIHQSITGLYETRIDLSQLGGDGGGGGGGSGGTLNIEDEYRLHETSKGPDVPLGSTWLSDFPQAWAETGGMGLAVRQAPLIIPLKATSTPVSIKQYPMSQEARLGIKPHIQRLLDQGILVPCQSPWNTPLLPVKKPGTNDYRPVQDLREVNKRVEDIHPTVPNPYNLLSGLPPSHQWYTVLDLKDAFFCLRLHPTSQSLFAFEWRDPEMGISGQLTWTRLPQGFKNSPTLFNEALHRDLADFRIQHPDLILLQYVDDLLLAATSELDCQQGTRALLQTLGDLGYRASAKKAQICQKQVKYLGYLLKEGQRWLTEARKETVMGQPTPKTPRQLREFLGKAGFCRLFIPGFAEMAAPLYPLTKPGTLFEWGPDQQKAYQEIKQALLTAPALGLPDLTKPFELFVDEKQGYAKGVLTQKLGPWRRPVAYLSKKLDPVAAGWPPCLRMVAAIAVLTKDAGKLTMGQPLVILAPHAVEALVKQPPDRWLSNARMTHYQALLLDTDRVQFGPIVALNPATLLPLPEEGLQHDCLDILAEAHGTRPDLTDQPLPDADHTWYTDGSSFLQEGQRKAGAAVTTETEVVWAKALPAGTSAQRAELIALTQALKMAEGKKLNVYTDSRYAFATAHIHGEIYRRRGWLTSEGKEIKNKDEILALLKALFLPKRLSIIHCPGHQKGNRAEARGNRMADQAAREVATRETPETSTLLAGKRTADGSEFEKRTADGSEFESPKKKAKVE

SEQ ID NO: 6595 - protein, 2111 aa, synthetic construct
MPAAKRVKLDGGDKKYSIGLDIGTNSVGWAVITDEYKVPSKKFKVLGNTDRHSIKKNLIGALLFDSGETAEATRLKRTARRRYTRRKNRICYLQEIFSNEMAKVDDSFFHRLEESFLVEEDKKHERHPIFGNIVDEVAYHEKYPTIYHLRKKLVDSTDKADLRLIYLALAHMIKFRGHFLIEGDLNPDNSDVDKLFIQLVQTYNQLFEENPINASGVDAKAILSARLSKSRRLENLIAQLPGEKKNGLFGNLIALSLGLTPNFKSNFDLAEDAKLQLSKDTYDDDLDNLLAQIGDQYADLFLAAKNLSDAILLSDILRVNTEITKAPLSASMIKRYDEHHQDLTLLKALVRQQLPEKYKEIFFDQSKNGYAGYIDGGASQEEFYKFIKPILEKMDGTEELLVKLNREDLLRKQRTFDNGSIPHQIHLGELHAILRRQEDFYPFLKDNREKIEKILTFRIPYYVGPLARGNSRFAWMTRKSEETITPWNFEEVVDKGASAQSFIERMTNFDKNLPNEKVLPKHSLLYEYFTVYNELTKVKYVTEGMRKPAFLSGEQKKAIVDLLFKTNRKVTVKQLKEDYFKKIECFDSVEISGVEDRFNASLGTYHDLLKIIKDKDFLDNEENEDILEDIVLTLTLFEDREMIEERLKTYAHLFDDKVMKQLKRRRYTGWGRLSRKLINGIRDKQSGKTILDFLKSDGFANRNFMQLIHDDSLTFKEDIQKAQVSGQGDSLHEHIANLAGSPAIKKGILQTVKVVDELVKVMGRHKPENIVIEMARENQTTQKGQKNSRERMKRIEEGIKELGSQILKEHPVENTQLQNEKLYLYYLQNGRDMYVDQELDINRLSDYDVDHIVPQSFLKDDSIDNKVLTRSDKARGKSDNVPSEEVVKKMKNYWRQLLNAKLITQRKFDNLTKAERGGLSELDKAGFIKRQLVETRQITKHVAQILDSRMNTKYDENDKLIREVKVITLKSKLVSDFRKDFQFYKVREINNYHHAHDAYLNAVVGTALIKKYPKLESEFVYGDYKVYDVRKMIAKSEQEIGKATAKYFFYSNIMNFFKTEITLANGEIRKRPLIETNGETGEIVWDKGRDFATVRKVLSMPQVNIVKKTEVQTGGFSKESILPKRNSDKLIARKKDWDPKKYGGFDSPTVAYSVLVVAKVEKGKSKKLKSVKELLGITIMERSSFEKNPIDFLEAKGYKEVKKDLIIKLPKYSLFELENGRKRMLASAGELQKGNELALPSKYVNFLYLASHYEKLKGSPEDNEQKQLFVEQHKHYLDEIIEQISEFSKRVILADANLDKVLSAYNKHRDKPIREQAENIIHLFTLTNLGAPAAFKYFDTTIDRKRYTSTKEVLDATLIHQSITGLYETRIDLSQLGGDGGGGGGGSGGTLNIEDEYRLHETSKEPDVSLGSTWLSDFPQAWAETGGMGLAVRQAPLIIPLKATSTPVSIKQYPMSQEARLGIKPHIQRLLDQGILVPCQSPWNTPLLPVKKPGTNDYRPVQDLREVNKRVEDIHPTVPNPYNLLSGLPPSHQWYTVLDLKDAFFCLRLHPTSQPLFAFEWRDPEMGISGQLTWTRLPQGFKNSPTLFNEALHRDLADFRIQHPDLILLQYVDDLLLAATSELDCQQGTRALLQTLGNLGYRASAKKAQICQKQVKYLGYLLKEGQRWLTEARKETVMGQPTPKTPRQLREFLGKAGFCRLFIPGFAEMAAPLYPLTKPGTLFNWGPDQQKAYQEIKQALLTAPALGLPDLTKPFELFVDEKQGYAKGVLTQKLGPWRRPVAYLSKKLDPVAAGWPPCLRMVAAIAVLTKDAGKLTMGQPLVILAPHAVEALVKQPPDRWLSNARMTHYQALLLDTDRVQFGPVVALNPATLLPLPEEGLQHNCLDILAEAHGTRPDLTDQPLPDADHTWYTDGSSLLQEGQRKAGAAVTTETEVIWAKALPAGTSAQRAELIALTQALKMAEGKKLNVYTDSRYAFATAHIHGEIYRRRGWLTSEGKEIKNKDEILALLKALFLPKRLSIIHCPGHQKGHSAEARGNRMADQAARKAAITETPDTSTLLIENSSPSGGSKRTADGSEFEAGKRTADGSEFEKRTADGSEFESPKKKAKVE

SEQ ID NO: 6596 - protein, 2111 aa, synthetic construct; identical to SEQ ID NO: 6595

SEQ ID NO: 6597 - protein, 2091 aa, synthetic construct
MPAAKRVKLDGGDKKYSIGLDIGTNSVGWAVITDEYKVPSKKFKVLGNTDRHSIKKNLIGALLFDSGETAEATRLKRTARRRYTRRKNRICYLQEIFSNEMAKVDDSFFHRLEESFLVEEDKKHERHPIFGNIVDEVAYHEKYPTIYHLRKKLVDSTDKADLRLIYLALAHMIKFRGHFLIEGDLNPDNSDVDKLFIQLVQTYNQLFEENPINASGVDAKAILSARLSKSRRLENLIAQLPGEKKNGLFGNLIALSLGLTPNFKSNFDLAEDAKLQLSKDTYDDDLDNLLAQIGDQYADLFLAAKNLSDAILLSDILRVNTEITKAPLSASMIKRYDEHHQDLTLLKALVRQQLPEKYKEIFFDQSKNGYAGYIDGGASQEEFYKFIKPILEKMDGTEELLVKLNREDLLRKQRTFDNGSIPHQIHLGELHAILRRQEDFYPFLKDNREKIEKILTFRIPYYVGPLARGNSRFAWMTRKSEETITPWNFEEVVDKGASAQSFIERMTNFDKNLPNEKVLPKHSLLYEYFTVYNELTKVKYVTEGMRKPAFLSGEQKKAIVDLLFKTNRKVTVKQLKEDYFKKIECFDSVEISGVEDRFNASLGTYHDLLKIIKDKDFLDNEENEDILEDIVLTLTLFEDREMIEERLKTYAHLFDDKVMKQLKRRRYTGWGRLSRKLINGIRDKQSGKTILDFLKSDGFANRNFMQLIHDDSLTFKEDIQKAQVSGQGDSLHEHIANLAGSPAIKKGILQTVKVVDELVKVMGRHKPENIVIEMARENQTTQKGQKNSRERMKRIEEGIKELGSQILKEHPVENTQLQNEKLYLYYLQNGRDMYVDQELDINRLSDYDVDHIVPQSFLKDDSIDNKVLTRSDKARGKSDNVPSEEVVKKMKNYWRQLLNAKLITQRKFDNLTKAERGGLSELDKAGFIKRQLVETRQITKHVAQILDSRMNTKYDENDKLIREVKVITLKSKLVSDFRKDFQFYKVREINNYHHAHDAYLNAVVGTALIKKYPKLESEFVYGDYKVYDVRKMIAKSEQEIGKATAKYFFYSNIMNFFKTEITLANGEIRKRPLIETNGETGEIVWDKGRDFATVRKVLSMPQVNIVKKTEVQTGGFSKESILPKRNSDKLIARKKDWDPKKYGGFDSPTVAYSVLVVAKVEKGKSKKLKSVKELLGITIMERSSFEKNPIDFLEAKGYKEVKKDLIIKLPKYSLFELENGRKRMLASAGELQKGNELALPSKYVNFLYLASHYEKLKGSPEDNEQKQLFVEQHKHYLDEIIEQISEFSKRVILADANLDKVLSAYNKHRDKPIREQAENIIHLFTLTNLGAPAAFKYFDTTIDRKRYTSTKEVLDATLIHQSITGLYETRIDLSQLGGDGGGGGGGSGGTLNIEDEYRLHEISTEPDVSPGSTWLSDFPQAWAETGGMGLAVRQAPLIIPLKATSTPVSIKQYPMSQEAKLGIKPHIQRLLDQGILVPCQSPWNTPLLPVKKPGTNDYRPVQGLREVNKRVEDIHPTVPNPYNLLSGLPTSHRWYTVLDLKDAFFCLRLHPTSQPLFASEWRDPGMGISGQLTWTRLPQGFKNSPTLFNEALHRGLADFRIQHPDLILLQYVDDLLLAATSELDCQQGTRALLKTLGNLGYRASAKKAQICQKQVKYLGYLLREGQRWLTEARKETVMGQPTPKTPRQLREFLGTAGFCRLWIPRFAEMAAPLYPLTKPGTLFNWGPDQQKAYHEIKQALLTAPALGLPDLTKPFELFVDEKQGYAKGVLTQKLGPWRRPVAYLSKKLDPVAAGWPPCLRMVAAIAVLTKDAGKLTMGQPLVILAPHAVEALVKQPPDRWLSNARMTHYQAMLLDTDRVQFGPVVALNPATLLPLPEEGAPHDCLEILAETHGTEPDLTDQPIPDADHTWYTDGSSFLQEGQRKAGAAVTTETEVIWARALPAGTSAQRAELIALTQALKMAEGKRLNVYTDSRYAFATAHIHGEIYKRRGWLTSEGREIKNKSEILALLKALFLPKRLSIIHCLGHQKGDSAEARGNRLADQAAREAAIKTPPDTSTLLAGKRTADGSEFEKRTADGSEFESPKKKAKVE

SEQ ID NO: 6598 - protein, 2082 aa, synthetic construct
MPAAKRVKLDGGDKKYSIGLDIGTNSVGWAVITDEYKVPSKKFKVLGNTDRHSIKKNLIGALLFDSGETAEATRLKRTARRRYTRRKNRICYLQEIFSNEMAKVDDSFFHRLEESFLVEEDKKHERHPIFGNIVDEVAYHEKYPTIYHLRKKLVDSTDKADLRLIYLALAHMIKFRGHFLIEGDLNPDNSDVDKLFIQLVQTYNQLFEENPINASGVDAKAILSARLSKSRRLENLIAQLPGEKKNGLFGNLIALSLGLTPNFKSNFDLAEDAKLQLSKDTYDDDLDNLLAQIGDQYADLFLAAKNLSDAILLSDILRVNTEITKAPLSASMIKRYDEHHQDLTLLKALVRQQLPEKYKEIFFDQSKNGYAGYIDGGASQEEFYKFIKPILEKMDGTEELLVKLNREDLLRKQRTFDNGSIPHQIHLGELHAILRRQEDFYPFLKDNREKIEKILTFRIPYYVGPLARGNSRFAWMTRKSEETITPWNFEEVVDKGASAQSFIERMTNFDKNLPNEKVLPKHSLLYEYFTVYNELTKVKYVTEGMRKPAFLSGEQKKAIVDLLFKTNRKVTVKQLKEDYFKKIECFDSVEISGVEDRFNASLGTYHDLLKIIKDKDFLDNEENEDILEDIVLTLTLFEDREMIEERLKTYAHLFDDKVMKQLKRRRYTGWGRLSRKLINGIRDKQSGKTILDFLKSDGFANRNFMQLIHDDSLTFKEDIQKAQVSGQGDSLHEHIANLAGSPAIKKGILQTVKVVDELVKVMGRHKPENIVIEMARENQTTQKGQKNSRERMKRIEEGIKELGSQILKEHPVENTQLQNEKLYLYYLQNGRDMYVDQELDINRLSDYDVDHIVPQSFLKDDSIDNKVLTRSDKARGKSDNVPSEEVVKKMKNYWRQLLNAKLITQRKFDNLTKAERGGLSELDKAGFIKRQLVETRQITKHVAQILDSRMNTKYDENDKLIREVKVITLKSKLVSDFRKDFQFYKVREINNYHHAHDAYLNAVVGTALIKKYPKLESEFVYGDYKVYDVRKMIAKSEQEIGKATAKYFFYSNIMNFFKTEITLANGEIRKRPLIETNGETGEIVWDKGRDFATVRKVLSMPQVNIVKKTEVQTGGFSKESILPKRNSDKLIARKKDWDPKKYGGFDSPTVAYSVLVVAKVEKGKSKKLKSVKELLGITIMERSSFEKNPIDFLEAKGYKEVKKDLIIKLPKYSLFELENGRKRMLASAGELQKGNELALPSKYVNFLYLASHYEKLKGSPEDNEQKQLFVEQHKHYLDEIIEQISEFSKRVILADANLDKVLSAYNKHRDKPIREQAENIIHLFTLTNLGAPAAFKYFDTTIDRKRYTSTKEVLDATLIHQSITGLYETRIDLSQLGGDGGGGGGGSGGIPWLMKKPLQLTTLVPLQEYEERLLKQTMLTGSYKEKLQSLFLKYDALWQHWENQVGHRRIKPHHIATGTVNPRPQKQYPINPKAKASIQTVINDLLKQGVLIQQNSIMNTPVYPVPKPDGKWRMVLDYREVNKTIPLIAAQNQHSAGILSSIFRGKYKTTLDLSNGFWAHSITPESYWLTAFTWLGQQYCWTRLPQGFLNSPALFNADVVDLLKEVPNVQVYVDDIYISHDDPREHLEQLEKVFSLLLNAGYVVSLKKSEIAQHEVEFLGFNITKEGRGLTETFKQKLLNITPPRDLKQLQSILGKLNFARNFIPNFSELVKPLYNIIATAPGKYITWTTDNSQQLQNIISMLNSAENLEERNPEVRLIMKVNTSPSAGYIRFYNEFAKRPIMYLNYVYTKAEVKFTNTEKLLTTIHKGLIKALDLGMGQEILVYSPIVSMTKIQKTPLPERKALPIRWITWMSYLEDPRIQFHYDKTLPELQQVPTVTDDIIAKIKHPSEFSMVFYTDGSAIKHPNVNKSHNAGMGIAQVQFKPEFTVINTWSIPLGDHTAQLAEVAAVEFACKKALKIDGPVLIVTDSFYVAESVNKELPYWQSNGFFNNKKKPLKHVSKWKSIADCIQLKPDIIIIHEKGHQPTASTFHTEGNNLADKLATQGSYVVNAGKRTADGSEFEKRTADGSEFESPKKKAKVE

SEQ ID NO: 6599 - protein, 2089 aa, synthetic construct
MPAAKRVKLDGGDKKYSIGLDIGTNSVGWAVITDEYKVPSKKFKVLGNTDRHSIKKNLIGALLFDSGETAEATRLKRTARRRYTRRKNRICYLQEIFSNEMAKVDDSFFHRLEESFLVEEDKKHERHPIFGNIVDEVAYHEKYPTIYHLRKKLVDSTDKADLRLIYLALAHMIKFRGHFLIEGDLNPDNSDVDKLFIQLVQTYNQLFEENPINASGVDAKAILSARLSKSRRLENLIAQLPGEKKNGLFGNLIALSLGLTPNFKSNFDLAEDAKLQLSKDTYDDDLDNLLAQIGDQYADLFLAAKNLSDAILLSDILRVNTEITKAPLSASMIKRYDEHHQDLTLLKALVRQQLPEKYKEIFFDQSKNGYAGYIDGGASQEEFYKFIKPILEKMDGTEELLVKLNREDLLRKQRTFDNGSIPHQIHLGELHAILRRQEDFYPFLKDNREKIEKILTFRIPYYVGPLARGNSRFAWMTRKSEETITPWNFEEVVDKGASAQSFIERMTNFDKNLPNEKVLPKHSLLYEYFTVYNELTKVKYVTEGMRKPAFLSGEQKKAIVDLLFKTNRKVTVKQLKEDYFKKIECFDSVEISGVEDRFNASLGTYHDLLKIIKDKDFLDNEENEDILEDIVLTLTLFEDREMIEERLKTYAHLFDDKVMKQLKRRRYTGWGRLSRKLINGIRDKQSGKTILDFLKSDGFANRNFMQLIHDDSLTFKEDIQKAQVSGQGDSLHEHIANLAGSPAIKKGILQTVKVVDELVKVMGRHKPENIVIEMARENQTTQKGQKNSRERMKRIEEGIKELGSQILKEHPVENTQLQNEKLYLYYLQNGRDMYVDQELDINRLSDYDVDHIVPQSFLKDDSIDNKVLTRSDKARGKSDNVPSEEVVKKMKNYWRQLLNAKLITQRKFDNLTKAERGGLSELDKAGFIKRQLVETRQITKHVAQILDSRMNTKYDENDKLIREVKVITLKSKLVSDFRKDFQFYKVREINNYHHAHDAYLNAVVGTALIKKYPKLESEFVYGDYKVYDVRKMIAKSEQEIGKATAKYFFYSNIMNFFKTEITLANGEIRKRPLIETNGETGEIVWDKGRDFATVRKVLSMPQVNIVKKTEVQTGGFSKESILPKRNSDKLIARKKDWDPKKYGGFDSPTVAYSVLVVAKVEKGKSKKLKSVKELLGITIMERSSFEKNPIDFLEAKGYKEVKKDLIIKLPKYSLFELENGRKRMLASAGELQKGNELALPSKYVNFLYLASHYEKLKGSPEDNEQKQLFVEQHKHYLDEIIEQISEFSKRVILADANLDKVLSAYNKHRDKPIREQAENIIHLFTLTNLGAPAAFKYFDTTIDRKRYTSTKEVLDATLIHQSITGLYETRIDLSQLGGDGGGGGGGSGGVLNLEEEYRLHEKPVPSSIDPSWLQLFPTVWAERAGMGLANQVPPVVVELRSGASPVAVRQYPMSKEAREGIRPHIQRFLDLGVLVPCQSPWNTPLLPVKKPGTNDYRPVQDLREINKRVQDIHPTVPNPYNLLSSLPPSHTWYSVLDLKDAFFCLKLHPNSQPLFAFEWRDPEKGNTGQLTWTRLPQGFKNSPTLFNEALHRDLAPFRALNPQVVLLQYVDDLLVAAPTYRDCKEGTQKLLQELSKLGYRVSAKKAQLCQKEVTYLGYLLKEGKRWLTPARKATVMKIPPPTTPRQVREFLGTAGFCRLWIPGFASLAAPLYPLTKPSIPFIWTEEHQKAFDRIKEALLSAPALALPDLTKPFTLYVDERAGVARGVLTQTLGPWRRPVAYLSKKLDPVASGWPTCLKAVAAVALLLKDADKLTLGQNVTVIASHSLESIVRQPPDRWMTNARMTHYQSLLLNERVSFAPPAVLNPATLLPVESEATPVHRCSEILAEETGTRRDLKDQPLPGVPAWYTDGSSFIAEGKRRAGAAIVDGKRTVWASSLPEGTSAQKAELVALTQALRLAEGKDINIYTDSRYAFATAHIHGAIYKQRGWLTSAGKDIKNKEEILALLEAIHLPKRVAIIHCPGHQKGNDPVATGNRRADEAAKQAALSTRVLAETTKPAGKRTADGSEFEKRTADGSEFESPKKKAKVE

SEQ ID NO: 6600 - protein, 2089 aa, synthetic construct
MPAAKRVKLDGGDKKYSIGLDIGTNSVGWAVITDEYKVPSKKFKVLGNTDRHSIKKNLIGALLFDSGETAEATRLKRTARRRYTRRKNRICYLQEIFSNEMAKVDDSFFHRLEESFLVEEDKKHERHPIFGNIVDEVAYHEKYPTIYHLRKKLVDSTDKADLRLIYLALAHMIKFRGHFLIEGDLNPDNSDVDKLFIQLVQTYNQLFEENPINASGVDAKAILSARLSKSRRLENLIAQLPGEKKNGLFGNLIALSLGLTPNFKSNFDLAEDAKLQLSKDTYDDDLDNLLAQIGDQYADLFLAAKNLSDAILLSDILRVNTEITKAPLSASMIKRYDEHHQDLTLLKALVRQQLPEKYKEIFFDQSKNGYAGYIDGGASQEEFYKFIKPILEKMDGTEELLVKLNREDLLRKQRTFDNGSIPHQIHLGELHAILRRQEDFYPFLKDNREKIEKILTFRIPYYVGPLARGNSRFAWMTRKSEETITPWNFEEVVDKGASAQSFIERMTNFDKNLPNEKVLPKHSLLYEYFTVYNELTKVKYVTEGMRKPAFLSGEQKKAIVDLLFKTNRKVTVKQLKEDYFKKIECFDSVEISGVEDRFNASLGTYHDLLKIIKDKDFLDNEENEDILEDIVLTLTLFEDREMIEERLKTYAHLFDDKVMKQLKRRRYTGWGRLSRKLINGIRDKQSGKTILDFLKSDGFANRNFMQLIHDDSLTFKEDIQKAQVSGQGDSLHEHIANLAGSPAIKKGILQTVKVVDELVKVMGRHKPENIVIEMARENQTTQKGQKNSRERMKRIEEGIKELGSQILKEHPVENTQLQNEKLYLYYLQNGRDMYVDQELDINRLSDYDVDHIVPQSFLKDDSIDNKVLTRSDKARGKSDNVPSEEVVKKMKNYWRQLLNAKLITQRKFDNLTKAERGGLSELDKAGFIKRQLVETRQITKHVAQILDSRMNTKYDENDKLIREVKVITLKSKLVSDFRKDFQFYKVREINNYHHAHDAYLNAVVGTALIKKYPKLESEFVYGDYKVYDVRKMIAKSEQEIGKATAKYFFYSNIMNFFKTEITLANGEIRKRPLIETNGETGEIVWDKGRDFATVRKVLSMPQVNIVKKTEVQTGGFSKESILPKRNSDKLIARKKDWDPKKYGGFDSPTVAYSVLVVAKVEKGKSKKLKSVKELLGITIMERSSFEKNPIDFLEAKGYKEVKKDLIIKLPKYSLFELENGRKRMLASAGELQKGNELALPSKYVNFLYLASHYEKLKGSPEDNEQKQLFVEQHKHYLDEIIEQISEFSKRVILADANLDKVLSAYNKHRDKPIREQAENIIHLFTLTNLGAPAAFKYFDTTIDRKRYTSTKEVLDATLIHQSITGLYETRIDLSQLGGDGGGGGGGSGGVLNLEEEYRLHEKPVPSSIDPSWLQLFPTVWAERAGMGLANQVPPVVVELRSGASPVAVRQYPMSKEAREGIRPHIQRFLDLGVLVPCQSPWNTPLLPVKKPGTNDYRPVQDLREINKRVQDIHPTVPNPYNLLSSLPPSHTWYSVLDLKDAFFCLKLHPNSQPLFAFEWRDPEKGNTGQLTWTRLPQGFKNSPTLFNEALHRDLAPFRALNPQVVLLQYVDDLLVAAPTYRDCKEGTQKLLQELSKLGYRVSAKKAQLCQKEVTYLGYLLKEGKRWLTPARKATVMKIPPPTTPRQVREFLGKAGFCRLFIPGFASLAAPLYPLTKPSIPFIWTEEHQKAFDRIKEALLSAPALALPDLTKPFTLYVDERAGVARGVLTQTLGPWRRPVAYLSKKLDPVASGWPTCLKAVAAVALLLKDADKLTLGQNVTVIASHSLESIVRQPPDRWMTNARMTHYQSLLLNERVSFAPPAVLNPATLLPVESEATPVHRCSEILAEETGTRRDLKDQPLPGVPAWYTDGSSFIAEGKRRAGAAIVDGKRTVWASSLPEGTSAQKAELVALTQALRLAEGKDINIYTDSRYAFATAHIHGAIYKQRGWLTSAGKDIKNKEEILALLEAIHLPKRVAIIHCPGHQKGNDPVATGNRRADEAAKQAALSTRVLAETTKPAGKRTADGSEFEKRTADGSEFESPKKKAKVE

SEQ ID NO: 6601 - protein, 2091 aa, synthetic construct
MPAAKRVKLDGGDKKYSIGLDIGTNSVGWAVITDEYKVPSKKFKVLGNTDRHSIKKNLIGALLFDSGETAEATRLKRTARRRYTRRKNRICYLQEIFSNEMAKVDDSFFHRLEESFLVEEDKKHERHPIFGNIVDEVAYHEKYPTIYHLRKKLVDSTDKADLRLIYLALAHMIKFRGHFLIEGDLNPDNSDVDKLFIQLVQTYNQLFEENPINASGVDAKAILSARLSKSRRLENLIAQLPGEKKNGLFGNLIALSLGLTPNFKSNFDLAEDAKLQLSKDTYDDDLDNLLAQIGDQYADLFLAAKNLSDAILLSDILRVNTEITKAPLSASMIKRYDEHHQDLTLLKALVRQQLPEKYKEIFFDQSKNGYAGYIDGGASQEEFYKFIKPILEKMDGTEELLVKLNREDLLRKQRTFDNGSIPHQIHLGELHAILRRQEDFYPFLKDNREKIEKILTFRIPYYVGPLARGNSRFAWMTRKSEETITPWNFEEVVDKGASAQSFIERMTNFDKNLPNEKVLPKHSLLYEYFTVYNELTKVKYVTEGMRKPAFLSGEQKKAIVDLLFKTNRKVTVKQLKEDYFKKIECFDSVEISGVEDRFNASLGTYHDLLKIIKDKDFLDNEENEDILEDIVLTLTLFEDREMIEERLKTYAHLFDDKVMKQLKRRRYTGWGRLSRKLINGIRDKQSGKTILDFLKSDGFANRNFMQLIHDDSLTFKEDIQKAQVSGQGDSLHEHIANLAGSPAIKKGILQTVKVVDELVKVMGRHKPENIVIEMARENQTTQKGQKNSRERMKRIEEGIKELGSQILKEHPVENTQLQNEKLYLYYLQNGRDMYVDQELDINRLSDYDVDHIVPQSFLKDDSIDNKVLTRSDKARGKSDNVPSEEVVKKMKNYWRQLLNAKLITQRKFDNLTKAERGGLSELDKAGFIKRQLVETRQITKHVAQILDSRMNTKYDENDKLIREVKVITLKSKLVSDFRKDFQFYKVREINNYHHAHDAYLNAVVGTALIKKYPKLESEFVYGDYKVYDVRKMIAKSEQEIGKATAKYFFYSNIMNFFKTEITLANGEIRKRPLIETNGETGEIVWDKGRDFATVRKVLSMPQVNIVKKTEVQTGGFSKESILPKRNSDKLIARKKDWDPKKYGGFDSPTVAYSVLVVAKVEKGKSKKLKSVKELLGITIMERSSFEKNPIDFLEAKGYKEVKKDLIIKLPKYSLFELENGRKRMLASAGELQKGNELALPSKYVNFLYLASHYEKLKGSPEDNEQKQLFVEQHKHYLDEIIEQISEFSKRVILADANLDKVLSAYNKHRDKPIREQAENIIHLFTLTNLGAPAAFKYFDTTIDRKRYTSTKEVLDATLIHQSITGLYETRIDLSQLGGDGGGGGGGSGGTLNIEDEYRLHETSKEPDVPLGSTWLSDFPQAWAETGGMGLAVRQAPLIIPLKATSTPVSIKQYPMSQEARLGIKPHIQRLLDQGILVPCQSPWNTPLLPVKKPGTNDYRPVQDLREVNKRVEDIHPTVPNPYNLLSGLPPSHQWYTVLDLKDAFFCLRLHPTSQPLFAFEWRDPEMGISGQLTWTRLPQGFKNSPTLFNEALHRDLADFRIQHPDLILLQYVDDLLLAATSEQDCQRGTRALLQTLGNLGYRASAKKAQICQKQVKYLGYLLKEGQRWLTEARKETVMGQPTPKTPRQLREFLGKAGFCRLFIPGFAEMAAPLYPLTKPGTLFNWGPDQQKAYQEIKQALLTAPALGLPDLTKPFELFVDEKQGYAKGVLTQKLGPWRRPVAYLSKKLDPVAAGWPPCLRMVAAIAVLTKDAGKLTMGQPLVILAPHAVEALVKQPPDRWLSNARMTHYQAMLLDTDRVQFGPVVALNPATLLPLPEKEAPHDCLEILAETHGTRPDLTDQPIPDADYTWYTDGSSFLQEGQRRAGAAVTTETEVIWARALPAGTSAQRAELIALTQALKMAEGKKLNVYTDSRYAFATAHVHGEIYRRRGWLTSEGREIKNKNEILALLKALFLPKRLSIIHCPGHQKGNSAEARGNRMADQAAREAAMKAVLETSTLLAGKRTADGSEFEKRTADGSEFESPKKKAKVE

SEQ ID NO: 6602 - protein, 2168 aa, synthetic construct
MPAAKRVKLDGGDKKYSIGLDIGTNSVGWAVITDEYKVPSKKFKVLGNTDRHSIKKNLIGALLFDSGETAEATRLKRTARRRYTRRKNRICYLQEIFSNEMAKVDDSFFHRLEESFLVEEDKKHERHPIFGNIVDEVAYHEKYPTIYHLRKKLVDSTDKADLRLIYLALAHMIKFRGHFLIEGDLNPDNSDVDKLFIQLVQTYNQLFEENPINASGVDAKAILSARLSKSRRLENLIAQLPGEKKNGLFGNLIALSLGLTPNFKSNFDLAEDAKLQLSKDTYDDDLDNLLAQIGDQYADLFLAAKNLSDAILLSDILRVNTEITKAPLSASMIKRYDEHHQDLTLLKALVRQQLPEKYKEIFFDQSKNGYAGYIDGGASQEEFYKFIKPILEKMDGTEELLVKLNREDLLRKQRTFDNGSIPHQIHLGELHAILRRQEDFYPFLKDNREKIEKILTFRIPYYVGPLARGNSRFAWMTRKSEETITPWNFEEVVDKGASAQSFIERMTNFDKNLPNEKVLPKHSLLYEYFTVYNELTKVKYVTEGMRKPAFLSGEQKKAIVDLLFKTNRKVTVKQLKEDYFKKIECFDSVEISGVEDRFNASLGTYHDLLKIIKDKDFLDNEENEDILEDIVLTLTLFEDREMIEERLKTYAHLFDDKVMKQLKRRRYTGWGRLSRKLINGIRDKQSGKTILDFLKSDGFANRNFMQLIHDDSLTFKEDIQKAQVSGQGDSLHEHIANLAGSPAIKKGILQTVKVVDELVKVMGRHKPENIVIEMARENQTTQKGQKNSRERMKRIEEGIKELGSQILKEHPVENTQLQNEKLYLYYLQNGRDMYVDQELDINRLSDYDVDHIVPQSFLKDDSIDNKVLTRSDKARGKSDNVPSEEVVKKMKNYWRQLLNAKLITQRKFDNLTKAERGGLSELDKAGFIKRQLVETRQITKHVAQILDSRMNTKYDENDKLIREVKVITLKSKLVSDFRKDFQFYKVREINNYHHAHDAYLNAVVGTALIKKYPKLESEFVYGDYKVYDVRKMIAKSEQEIGKATAKYFFYSNIMNFFKTEITLANGEIRKRPLIETNGETGEIVWDKGRDFATVRKVLSMPQVNIVKKTEVQTGGFSKESILPKRNSDKLIARKKDWDPKKYGGFDSPTVAYSVLVVAKVEKGKSKKLKSVKELLGITIMERSSFEKNPIDFLEAKGYKEVKKDLIIKLPKYSLFELENGRKRMLASAGELQKGNELALPSKYVNFLYLASHYEKLKGSPEDNEQKQLFVEQHKHYLDEIIEQISEFSKRVILADANLDKVLSAYNKHRDKPIREQAENIIHLFTLTNLGAPAAFKYFDTTIDRKRYTSTKEVLDATLIHQSITGLYETRIDLSQLGGDGGGGSGSSGGMDLLKPLTVERKGVKIKGYWNSQADITCVPKDLLQGEEPVRQQNVTTIHGTQEGDVYYVNLKIDGRRINTEVIGTTLDYAIITPGDVPWILKKPLELTIKLDLEEQQGTLLNNSILSKKGKEELKQLFEKYSALWQSWENQVGHRRIRPHKIATGTVKPTPQKQYHINPKAKPDIQIVINDLLKQGVLIQKESTMNTPVYPVPKPNGRWRMVLDYRAVNKVTPLIAVQNQHSYGILGSLFKGRYKTTIDLSNGFWAHPIVPEDYWITAFTWQGKQYCWTVLPQGFLNSPGLFTGDVVDLLQGIPNVEVYVDDVYISHDSEKEHLEYLDILFNRLKEAGYIISLKKSNIANSIVDFLGFQITNEGRGLTDTFKEKLENITAPTTLKQLQSILGLLNFARNFIPDFTELIAPLYALIPKSTKNYVPWQIEHSTTLETLITKLNGAEYLQGRKGDKTLIMKVNASYTTGYIRYYNEGEKKPISYVSIVFSKTELKFTELEKLLTTVHKGLLKALDLSMGQNIHVYSPIVSMQNIQKTPQTAKKALASRWLSWLSYLEDPRIRFFYDPQMPALKDLPAVDTGKDNKKHPSNFQHIFYTDGSAITSPTKEGHLNAGMGIVYFINKDGNLQKQQEWSISLGNHTAQFAEIAAFEFALKKCLPLGGNILVVTDSNYVAKAYNEELDVWASNGFVNNRKKPLKHISKWKSVADLKRLRPDVVVTHEPGHQKLDSSPHAYGNNLADQLATQASFKVHAGKRTADGSEFEKRTADGSEFESPKKKAKVE

SEQ ID NO: 6603 - protein, 2090 aa, synthetic construct
MPAAKRVKLDGGDKKYSIGLDIGTNSVGWAVITDEYKVPSKKFKVLGNTDRHSIKKNLIGALLFDSGETAEATRLKRTARRRYTRRKNRICYLQEIFSNEMAKVDDSFFHRLEESFLVEEDKKHERHPIFGNIVDEVAYHEKYPTIYHLRKKLVDSTDKADLRLIYLALAHMIKFRGHFLIEGDLNPDNSDVDKLFIQLVQTYNQLFEENPINASGVDAKAILSARLSKSRRLENLIAQLPGEKKNGLFGNLIALSLGLTPNFKSNFDLAEDAKLQLSKDTYDDDLDNLLAQIGDQYADLFLAAKNLSDAILLSDILRVNTEITKAPLSASMIKRYDEHHQDLTLLKALVRQQLPEKYKEIFFDQSKNGYAGYIDGGASQEEFYKFIKPILEKMDGTEELLVKLNREDLLRKQRTFDNGSIPHQIHLGELHAILRRQEDFYPFLKDNREKIEKILTFRIPYYVGPLARGNSRFAWMTRKSEETITPWNFEEVVDKGASAQSFIERMTNFDKNLPNEKVLPKHSLLYEYFTVYNELTKVKYVTEGMRKPAFLSGEQKKAIVDLLFKTNRKVTVKQLKEDYFKKIECFDSVEISGVEDRFNASLGTYHDLLKIIKDKDFLDNEENEDILEDIVLTLTLFEDREMIEERLKTYAHLFDDKVMKQLKRRRYTGWGRLSRKLINGIRDKQSGKTILDFLKSDGFANRNFMQLIHDDSLTFKEDIQKAQVSGQGDSLHEHIANLAGSPAIKKGILQTVKVVDELVKVMGRHKPENIVIEMARENQTTQKGQKNSRERMKRIEEGIKELGSQILKEHPVENTQLQNEKLYLYYLQNGRDMYVDQELDINRLSDYDVDHIVPQSFLKDDSIDNKVLTRSDKARGKSDNVPSEEVVKKMKNYWRQLLNAKLITQRKFDNLTKAERGGLSELDKAGFIKRQLVETRQITKHVAQILDSRMNTKYDENDKLIREVKVITLKSKLVSDFRKDFQFYKVREINNYHHAHDAYLNAVVGTALIKKYPKLESEFVYGDYKVYDVRKMIAKSEQEIGKATAKYFFYSNIMNFFKTEITLANGEIRKRPLIETNGETGEIVWDKGRDFATVRKVLSMPQVNIVKKTEVQTGGFSKESILPKRNSDKLIARKKDWDPKKYGGFDSPTVAYSVLVVAKVEKGKSKKLKSVKELLGITIMERSSFEKNPIDFLEAKGYKEVKKDLIIKLPKYSLFELENGRKRMLASAGELQKGNELALPSKYVNFLYLASHYEKLKGSPEDNEQKQLFVEQHKHYLDEIIEQISEFSKRVILADANLDKVLSAYNKHRDKPIREQAENIIHLFTLTNLGAPAAFKYFDTTIDRKRYTSTKEVLDATLIHQSITGLYETRIDLSQLGGDGGGGSGSSGGTLQLEEEYRLFEPESTQKQEMDIWLKNFPQAWAETGGMGTAHCQAPVLIQLKATATPISIRQYPMPHEAYQGIKPHIRRMLDQGILKPCQSPWNTPLLPVKKPGTEDYRPVQDLREVNKRVEDIHPTVPNPYNLLSTLPPSHPWYTVLDLKDAFFCLRLHSESQLLFAFEWRDPEIGLSGQLTWTRLPQGFKNSPTLFNEALHSDLADFRVRYPALVLLQYVDDLLLAAATRTECLEGTKALLETLGNKGYRASAKKAQICLQEVTYLGYSLKDGQRWLTKARKEAILSIPVPKNSRQVREFLGKAGYCRLFIPGFAELAAPLYPLTRPGTLFQWGTEQQLAFEDIKKALLSSPALGLPDITKPFELFIDENSGFAKGVLVQKLGPWKRPVAYLSKKLDTVASGWPPCLRMVAAIAILVKDAGKLTLGQPLTILTSHPVEALVRQPPNKWLSNARMTHYQAMLLDAERVHFGPTVSLNPATLLPLPSGGNHHDCLQILAETHGTRPDLTDQPLPDADLTWYTDGSSFIRNGEREAGAAVTTESEVIWAAPLPPGTSAQRAELIALTQALKMAEGKKLTVYTDSRYAFATTHVHGEIYRRRGWLTSEGKEIKNKNEILALLEALFLPKRLSIIHCPGHQKGDSPQAKGNRLADDTAKKAATETHSSLTVLPAGKRTADGSEFEKRTADGSEFESPKKKAKVE

SEQ ID NO: 6604 - protein, 2213 aa, synthetic construct
MPAAKRVKLDGGDKKYSIGLDIGTNSVGWAVITDEYKVPSKKFKVLGNTDRHSIKKNLIGALLFDSGETAEATRLKRTARRRYTRRKNRICYLQEIFSNEMAKVDDSFFHRLEESFLVEEDKKHERHPIFGNIVDEVAYHEKYPTIYHLRKKLVDSTDKADLRLIYLALAHMIKFRGHFLIEGDLNPDNSDVDKLFIQLVQTYNQLFEENPINASGVDAKAILSARLSKSRRLENLIAQLPGEKKNGLFGNLIALSLGLTPNFKSNFDLAEDAKLQLSKDTYDDDLDNLLAQIGDQYADLFLAAKNLSDAILLSDILRVNTEITKAPLSASMIKRYDEHHQDLTLLKALVRQQLPEKYKEIFFDQSKNGYAGYIDGGASQEEFYKFIKPILEKMDGTEELLVKLNREDLLRKQRTFDNGSIPHQIHLGELHAILRRQEDFYPFLKDNREKIEKILTFRIPYYVGPLARGNSRFAWMTRKSEETITPWNFEEVVDKGASAQSFIERMTNFDKNLPNEKVLPKHSLLYEYFTVYNELTKVKYVTEGMRKPAFLSGEQKKAIVDLLFKTNRKVTVKQLKEDYFKKIECFDSVEISGVEDRFNASLGTYHDLLKIIKDKDFLDNEENEDILEDIVLTLTLFEDREMIEERLKTYAHLFDDKVMKQLKRRRYTGWGRLSRKLINGIRDKQSGKTILDFLKSDGFANRNFMQLIHDDSLTFKEDIQKAQVSGQGDSLHEHIANLAGSPAIKKGILQTVKVVDELVKVMGRHKPENIVIEMARENQTTQKGQKNSRERMKRIEEGIKELGSQILKEHPVENTQLQNEKLYLYYLQNGRDMYVDQELDINRLSDYDVDHIVPQSFLKDDSIDNKVLTRSDKARGKSDNVPSEEVVKKMKNYWRQLLNAKLITQRKFDNLTKAERGGLSELDKAGFIKRQLVETRQITKHVAQILDSRMNTKYDENDKLIREVKVITLKSKLVSDFRKDFQFYKVREINNYHHAHDAYLNAVVGTALIKKYPKLESEFVYGDYKVYDVRKMIAKSEQEIGKATAKYFFYSNIMNFFKTEITLANGEIRKRPLIETNGETGEIVWDKGRDFATVRKVLSMPQVNIVKKTEVQTGGFSKESILPKRNSDKLIARKKDWDPKKYGGFDSPTVAYSVLVVAKVEKGKSKKLKSVKELLGITIMERSSFEKNPIDFLEAKGYKEVKKDLIIKLPKYSLFELENGRKRMLASAGELQKGNELALPSKYVNFLYLASHYEKLKGSPEDNEQKQLFVEQHKHYLDEIIEQISEFSKRVILADANLDKVLSAYNKHRDKPIREQAENIIHLFTLTNLGAPAAFKYFDTTIDRKRYTSTKEVLDATLIHQSITGLYETRIDLSQLGGDGGGGSGSSGGTLGDQGSRGSDPLPEPRVTLTVEGIPTEFLVNTGAEHSVLTKPMGKMGSKRTVVAGATGSKVYPWTTKRLLKIGQKQVTHSFLVIPECPAPLLGRDLLTKLKAQIQFSTEGPQVTWEDRPAMCLVLNLEEEYRLHEKPVPPSIDPSWLQLFPMVWAEKAGMGLANQVPPVVVELKSDASPVAVRQYPMSKEAREGIRPHIQRFLDLGILVPCQSPWNTPLLPVKKPGTNDYRPVQDLREVNKRVQDIHPTVPNPYNLLSSLPPSHTWYSVLDLKDAFFCLKLHPNSQPLFAFEWRDPEKGNTGQLTWTRLPQGFKNSPTLFDEALHRDLASFRALNPQVVMLQYVDDLLVAAPTYRDCKEGTRRLLQELSKLGYRVSAKKAQLCREEVTYLGYLLKGGKRWLTPARKATVMKIPTPTTPRQVREFLGTAGFCRLWIPGFASLAAPLYPLTREKVPFTWTEAHQEAFGRIKEALLSAPALALPDLTKPFALYVDEKEGVARGVLTQTLGPWRRPVAYLSKKLDPVASGWPTCLKAIAAVALLLKDADKLTLGQNVLVIAPHNLESIVRQPPDRWMTNARMTHYQSLLLNERVSFAPPAILNPATLLPVESDDTPIHICSEILAEETGTRPDLRDQPLPGVPAWYTDGSSFIMDGRRQAGAAIVDNKRTVWASNLPEGTSAQKAELIALTQALRLAEGKSINIYTDSRYAFATAHVHGAIYKQRGLLTSAGKDIKNKEEILALLEAIHLPKRVAIIHCPGHQRGTDPVATGNRKADEAAKQAAQSTRILTETTKNAGKRTADGSEFEKRTADGSEFESPKKKAKVE

SEQ ID NO: 6605 - protein, 2091 aa, synthetic construct
MPAAKRVKLDGGDKKYSIGLDIGTNSVGWAVITDEYKVPSKKFKVLGNTDRHSIKKNLIGALLFDSGETAEATRLKRTARRRYTRRKNRICYLQEIFSNEMAKVDDSFFHRLEESFLVEEDKKHERHPIFGNIVDEVAYHEKYPTIYHLRKKLVDSTDKADLRLIYLALAHMIKFRGHFLIEGDLNPDNSDVDKLFIQLVQTYNQLFEENPINASGVDAKAILSARLSKSRRLENLIAQLPGEKKNGLFGNLIALSLGLTPNFKSNFDLAEDAKLQLSKDTYDDDLDNLLAQIGDQYADLFLAAKNLSDAILLSDILRVNTEITKAPLSASMIKRYDEHHQDLTLLKALVRQQLPEKYKEIFFDQSKNGYAGYIDGGASQEEFYKFIKPILEKMDGTEELLVKLNREDLLRKQRTFDNGSIPHQIHLGELHAILRRQEDFYPFLKDNREKIEKILTFRIPYYVGPLARGNSRFAWMTRKSEETITPWNFEEVVDKGASAQSFIERMTNFDKNLPNEKVLPKHSLLYEYFTVYNELTKVKYVTEGMRKPAFLSGEQKKAIVDLLFKTNRKVTVKQLKEDYFKKIECFDSVEISGVEDRFNASLGTYHDLLKIIKDKDFLDNEENEDILEDIVLTLTLFEDREMIEERLKTYAHLFDDKVMKQLKRRRYTGWGRLSRKLINGIRDKQSGKTILDFLKSDGFANRNFMQLIHDDSLTFKEDIQKAQVSGQGDSLHEHIANLAGSPAIKKGILQTVKVVDELVKVMGRHKPENIVIEMARENQTTQKGQKNSRERMKRIEEGIKELGSQILKEHPVENTQLQNEKLYLYYLQNGRDMYVDQELDINRLSDYDVDHIVPQSFLKDDSIDNKVLTRSDKARGKSDNVPSEEVVKKMKNYWRQLLNAKLITQRKFDNLTKAERGGLSELDKAGFIKRQLVETRQITKHVAQILDSRMNTKYDENDKLIREVKVITLKSKLVSDFRKDFQFYKVREINNYHHAHDAYLNAVVGTALIKKYPKLESEFVYGDYKVYDVRKMIAKSEQEIGKATAKYFFYSNIMNFFKTEITLANGEIRKRPLIETNGETGEIVWDKGRDFATVRKVLSMPQVNIVKKTEVQTGGFSKESILPKRNSDKLIARKKDWDPKKYGGFDSPTVAYSVLVVAKVEKGKSKKLKSVKELLGITIMERSSFEKNPIDFLEAKGYKEVKKDLIIKLPKYSLFELENGRKRMLASAGELQKGNELALPSKYVNFLYLASHYEKLKGSPEDNEQKQLFVEQHKHYLDEIIEQISEFSKRVILADANLDKVLSAYNKHRDKPIREQAENIIHLFTLTNLGAPAAFKYFDTTIDRKRYTSTKEVLDATLIHQSITGLYETRIDLSQLGGDGGGGSGSSGGTLGIEDEYRLHETSTEPDVSLGSTWLSDFPQAWAETGGMGLAVRQAPLIIPLKATSTPVSIQQYPMSHEARLGIKPHIQRLLDQGILVPCQSPWNTPLLPVKKPGTNDYRPVQDLREVNKRVEDIHPTVPNPYNLLSGLPPSHQWYTVLDLKDAFFCLRLHPTSQPLFAFEWRDPGMGISGQLTWTRLPQGFKNSPTLFDEALHRDLADFRIQHPDLILLQYVDDILLAATSELDCQQGTRALLQTLGDLGYRASAKKAQICQKQVKYLGYLLREGQRWLTEARKETVMGQPVPKTPRQLREFLGTAGFCRLWIPGFAEMAAPLYPLTKTGTLFSWGPDQQKAYQEIKQALLTAPALGLPDLTKPFELFVDEKQGYAKGVLTQKLGPWRRPVAYLSKKLDPVAAGWPPCLRMVAAIAVLTKDAGKLTMGQPLVILAPHAVEALVKQPPDRWLSNARMTHYQAMLLDTDRVQFGPVVALNPATLLPLPEEGAPHDCLEILAETHGTRPDLTDQPIPDADHTWYTDGSSFLQEGQRKAGAAVTTETEVIWAGALPAGTSAQRAELIALTQALKMAEGKRLNVYTDSRYAFATAHIHGEIYRRRGLLTSEGREIKNKSEILALLKALFLPKRLSIIHCLGHQKGDSAEARGNRLADQAAREAAIKTPPDTSTLLAGKRTADGSEFEKRTADGSEFESPKKKAKVE

SEQ ID NO: 6606 - protein, 2091 aa, synthetic construct
MPAAKRVKLDGGDKKYSIGLDIGTNSVGWAVITDEYKVPSKKFKVLGNTDRHSIKKNLIGALLFDSGETAEATRLKRTARRRYTRRKNRICYLQEIFSNEMAKVDDSFFHRLEESFLVEEDKKHERHPIFGNIVDEVAYHEKYPTIYHLRKKLVDSTDKADLRLIYLALAHMIKFRGHFLIEGDLNPDNSDVDKLFIQLVQTYNQLFEENPINASGVDAKAILSARLSKSRRLENLIAQLPGEKKNGLFGNLIALSLGLTPNFKSNFDLAEDAKLQLSKDTYDDDLDNLLAQIGDQYADLFLAAKNLSDAILLSDILRVNTEITKAPLSASMIKRYDEHHQDLTLLKALVRQQLPEKYKEIFFDQSKNGYAGYIDGGASQEEFYKFIKPILEKMDGTEELLVKLNREDLLRKQRTFDNGSIPHQIHLGELHAILRRQEDFYPFLKDNREKIEKILTFRIPYYVGPLARGNSRFAWMTRKSEETITPWNFEEVVDKGASAQSFIERMTNFDKNLPNEKVLPKHSLLYEYFTVYNELTKVKYVTEGMRKPAFLSGEQKKAIVDLLFKTNRKVTVKQLKEDYFKKIECFDSVEISGVEDRFNASLGTYHDLLKIIKDKDFLDNEENEDILEDIVLTLTLFEDREMIEERLKTYAHLFDDKVMKQLKRRRYTGWGRLSRKLINGIRDKQSGKTILDFLKSDGFANRNFMQLIHDDSLTFKEDIQKAQVSGQGDSLHEHIANLAGSPAIKKGILQTVKVVDELVKVMGRHKPENIVIEMARENQTTQKGQKNSRERMKRIEEGIKELGSQILKEHPVENTQLQNEKLYLYYLQNGRDMYVDQELDINRLSDYDVDHIVPQSFLKDDSIDNKVLTRSDKARGKSDNVPSEEVVKKMKNYWRQLLNAKLITQRKFDNLTKAERGGLSELDKAGFIKRQLVETRQITKHVAQILDSRMNTKYDENDKLIREVKVITLKSKLVSDFRKDFQFYKVREINNYHHAHDAYLNAVVGTALIKKYPKLESEFVYGDYKVYDVRKMIAKSEQEIGKATAKYFFYSNIMNFFKTEITLANGEIRKRPLIETNGETGEIVWDKGRDFATVRKVLSMPQVNIVKKTEVQTGGFSKESILPKRNSDKLIARKKDWDPKKYGGFDSPTVAYSVLVVAKVEKGKSKKLKSVKELLGITIMERSSFEKNPIDFLEAKGYKEVKKDLIIKLPKYSLFELENGRKRMLASAGELQKGNELALPSKYVNFLYLASHYEKLKGSPEDNEQKQLFVEQHKHYLDEIIEQISEFSKRVILADANLDKVLSAYNKHRDKPIREQAENIIHLFTLTNLGAPAAFKYFDTTIDRKRYTSTKEVLDATLIHQSITGLYETRIDLSQLGGDGGGGSGSSGGTLGIEDEYRLHETSTEPDVSLGSTWLSDFPQAWAETGGMGLAVRQAPLIIPLKATSTPVSIQQYPMSHEARLGIKPHIQRLLDQGILVPCQSPWNTPLLPVKKPGTNDYRPVQDLREVNKRVEDIHPTVPNPYNLLSGLPPSHQWYTVLDLKDAFFCLRLHPTSQPLFAFEWRDPGMGISGQLTWTRLPQGFKNSPTLFNEALHRDLADFRIQHPDLILLQYVDDILLAATSELDCQQGTRALLQTLGDLGYRASAKKAQICQKQVKYLGYLLREGQRWLTEARKETVMGQPVPKTPRQLREFLGTAGFCRLWIPGFAEMAAPLYPLTKPGTLFSWGPDQQKAYQEIKQALLTAPALGLPDLTKPFELFVDEKQGYAKGVLTQKLGPWRRPVAYLSKKLDPVAAGWPPCLRMVAAIAVLTKDAGKLTMGQPLVILAPHAVEALVKQPPDRWLSNARMTHYQAMLLDTDRVQFGPVVALNPATLLPLPEEGAPHDCLEILAETHGTRPDLTDQPIPDADHTWYTDGSSFLQEGQRKAGAAVTTETEVIWAGALPAGTSAQRAELIALTQALKMAEGKRLNVYTDSRYAFATAHIHGEIYRRRGWLTSEGREIKNKSEILALLKALFLPKRLSIIHCLGHQKGDSAEARGNRLADQAAREAAIKTPPDTSTLLAGKRTADGSEFEKRTADGSEFESPKKKAKVE

SEQ ID NO: 6607 - protein, 2091 aa, synthetic construct
MPAAKRVKLDGGDKKYSIGLDIGTNSVGWAVITDEYKVPSKKFKVLGNTDRHSIKKNLIGALLFDSGETAEATRLKRTARRRYTRRKNRICYLQEIFSNEMAKVDDSFFHRLEESFLVEEDKKHERHPIFGNIVDEVAYHEKYPTIYHLRKKLVDSTDKADLRLIYLALAHMIKFRGHFLIEGDLNPDNSDVDKLFIQLVQTYNQLFEENPINASGVDAKAILSARLSKSRRLENLIAQLPGEKKNGLFGNLIALSLGLTPNFKSNFDLAEDAKLQLSKDTYDDDLDNLLAQIGDQYADLFLAAKNLSDAILLSDILRVNTEITKAPLSASMIKRYDEHHQDLTLLKALVRQQLPEKYKEIFFDQSKNGYAGYIDGGASQEEFYKFIKPILEKMDGTEELLVKLNREDLLRKQRTFDNGSIPHQIHLGELHAILRRQEDFYPFLKDNREKIEKILTFRIPYYVGPLARGNSRFAWMTRKSEETITPWNFEEVVDKGASAQSFIERMTNFDKNLPNEKVLPKHSLLYEYFTVYNELTKVKYVTEGMRKPAFLSGEQKKAIVDLLFKTNRKVTVKQLKEDYFKKIECFDSVEISGVEDRFNASLGTYHDLLKIIKDKDFLDNEENEDILEDIVLTLTLFEDREMIEERLKTYAHLFDDKVMKQLKRRRYTGWGRLSRKLINGIRDKQSGKTILDFLKSDGFANRNFMQLIHDDSLTFKEDIQKAQVSGQGDSLHEHIANLAGSPAIKKGILQTVKVVDELVKVMGRHKPENIVIEMARENQTTQKGQKNSRERMKRIEEGIKELGSQILKEHPVENTQLQNEKLYLYYLQNGRDMYVDQELDINRLSDYDVDHIVPQSFLKDDSIDNKVLTRSDKARGKSDNVPSEEVVKKMKNYWRQLLNAKLITQRKFDNLTKAERGGLSELDKAGFIKRQLVETRQITKHVAQILDSRMNTKYDENDKLIREVKVITLKSKLVSDFRKDFQFYKVREINNYHHAHDAYLNAVVGTALIKKYPKLESEFVYGDYKVYDVRKMIAKSEQEIGKATAKYFFYSNIMNFFKTEITLANGEIRKRPLIETNGETGEIVWDKGRDFATVRKVLSMPQVNIVKKTEVQTGGFSKESILPKRNSDKLIARKKDWDPKKYGGFDSPTVAYSVLVVAKVEKGKSKKLKSVKELLGITIMERSSFEKNPIDFLEAKGYKEVKKDLIIKLPKYSLFELENGRKRMLASAGELQKGNELALPSKYVNFLYLASHYEKLKGSPEDNEQKQLFVEQHKHYLDEIIEQISEFSKRVILADANLDKVLSAYNKHRDKPIREQAENIIHLFTLTNLGAPAAFKYFDTTIDRKRYTSTKEVLDATLIHQSITGLYETRIDLSQLGGDGGGGSGSSGGTLNIEDEYRLHETSKGPDVPLGSTWLSDFPQAWAETGGMGLAVRQAPLIIPLKATSTPVSIKQYPMSQEARLGIKPHIQRLLDQGILVPCQSPWNTPLLPVKKPGTNDYRPVQDLREVNKRVEDIHPTVPNPYNLLSGLPPSHQWYTVLDLKDAFFCLRLHPTSQSLFAFEWRDPEMGISGQLTWTRLPQGFKNSPTLFNEALHRDLADFRIQHPDLILLQYVDDLLLAATSELDCQQGTRALLQTLGDLGYRASAKKAQICQKQVKYLGYLLKEGQRWLTEARKETVMGQPTPKTPRQLREFLGKAGFCRLFIPGFAEMAAPLYPLTKPGTLFEWGPDQQKAYQEIKQALLTAPALGLPDLTKPFELFVDEKQGYAKGVLTQKLGPWRRPVAYLSKKLDPVAAGWPPCLRMVAAIAVLTKDAGKLTMGQPLVILAPHAVEALVKQPPDRWLSNARMTHYQALLLDTDRVQFGPIVALNPATLLPLPEEGLQHDCLDILAEAHGTRPDLTDQPLPDADHTWYTDGSSFLQEGQRKAGAAVTTETEVVWAKALPAGTSAQRAELIALTQALKMAEGKKLNVYTDSRYAFATAHIHGEIYRRRGWLTSEGKEIKNKDEILALLKALFLPKRLSIIHCPGHQKGNRAEARGNRMADQAAREVATRETPETSTLLAGKRTADGSEFEKRTADGSEFESPKKKAKVE

SEQ ID NO: 6608 - protein, 2082 aa, synthetic construct
MPAAKRVKLDGGDKKYSIGLDIGTNSVGWAVITDEYKVPSKKFKVLGNTDRHSIKKNLIGALLFDSGETAEATRLKRTARRRYTRRKNRICYLQEIFSNEMAKVDDSFFHRLEESFLVEEDKKHERHPIFGNIVDEVAYHEKYPTIYHLRKKLVDSTDKADLRLIYLALAHMIKFRGHFLIEGDLNPDNSDVDKLFIQLVQTYNQLFEENPINASGVDAKAILSARLSKSRRLENLIAQLPGEKKNGLFGNLIALSLGLTPNFKSNFDLAEDAKLQLSKDTYDDDLDNLLAQIGDQYADLFLAAKNLSDAILLSDILRVNTEITKAPLSASMIKRYDEHHQDLTLLKALVRQQLPEKYKEIFFDQSKNGYAGYIDGGASQEEFYKFIKPILEKMDGTEELLVKLNREDLLRKQRTFDNGSIPHQIHLGELHAILRRQEDFYPFLKDNREKIEKILTFRIPYYVGPLARGNSRFAWMTRKSEETITPWNFEEVVDKGASAQSFIERMTNFDKNLPNEKVLPKHSLLYEYFTVYNELTKVKYVTEGMRKPAFLSGEQKKAIVDLLFKTNRKVTVKQLKEDYFKKIECFDSVEISGVEDRFNASLGTYHDLLKIIKDKDFLDNEENEDILEDIVLTLTLFEDREMIEERLKTYAHLFDDKVMKQLKRRRYTGWGRLSRKLINGIRDKQSGKTILDFLKSDGFANRNFMQLIHDDSLTFKEDIQKAQVSGQGDSLHEHIANLAGSPAIKKGILQTVKVVDELVKVMGRHKPENIVIEMARENQTTQKGQKNSRERMKRIEEGIKELGSQILKEHPVENTQLQNEKLYLYYLQNGRDMYVDQELDINRLSDYDVDHIVPQSFLKDDSIDNKVLTRSDKARGKSDNVPSEEVVKKMKNYWRQLLNAKLITQRKFDNLTKAERGGLSELDKAGFIKRQLVETRQITKHVAQILDSRMNTKYDENDKLIREVKVITLKSKLVSDFRKDFQFYKVREINNYHHAHDAYLNAVVGTALIKKYPKLESEFVYGDYKVYDVRKMIAKSEQEIGKATAKYFFYSNIMNFFKTEITLANGEIRKRPLIETNGETGEIVWDKGRDFATVRKVLSMPQVNIVKKTEVQTGGFSKESILPKRNSDKLIARKKDWDPKKYGGFDSPTVAYSVLVVAKVEKGKSKKLKSVKELLGITIMERSSFEKNPIDFLEAKGYKEVKKDLIIKLPKYSLFELENGRKRMLASAGELQKGNELALPSKYVNFLYLASHYEKLKGSPEDNEQKQLFVEQHKHYLDEIIEQISEFSKRVILADANLDKVLSAYNKHRDKPIREQAENIIHLFTLTNLGAPAAFKYFDTTIDRKRYTSTKEVLDATLIHQSITGLYETRIDLSQLGGDGGGGSGSSGGVPWLMKKPLQLTVLVPLHEYQERLLQQTALPKEQKELLQKLFLKYDALWQHWENQVGHRRIKPHNIATGTLAPRPQKQYPINPKAKPSIQIVIDDLLKQGVLIQQNSTMNTPVYPVPKPDGKWRMVLDYREVNKTIPLIAAQNQHSAGILSSIYRGKYKTTLDLTNGFWAHPITPESYWLTAFTWQGKQYCWTRLPQGFLNSPALFNADVVDLLKEIPNVQAYVDDIYISHDDPQEHLEQLEKIFSILLNAGYVVSLKKSEIAQREVEFLGFNITKEGRGLTDTFKQKLLNITPPKDLKQLQSILGLLNFARNFIPNYSELVKPLYTIVAPANGKFISWTEDNSNQLQHIISVLNQADNLEERNPETRLIIKVNSSPSAGYIRYYNEGSKRPIMYVNYIFSKAEAKFTQTEKLLTTMHKGLIKAMDLAMGQEILVYSPIVSMTKIQRTPLPERKALPVRWITWMTYLEDPRIQFHYDKSLPELQQIPNVTEDVIAKTKHPSEFAMVFYTDGSAIKHPDVNKSHSAGMGIAQVQFIPEYKIVHQWSIPLGDHTAQLAEIAAVEFACKKALKISGPVLIVTDSFYVAESANKELPYWKSNGFLNNKKKPLRHVSKWKSIAECLQLKPDIIIMHEKGHQQPMTTLHTEGNNLADKLATQGSYVVHAGKRTADGSEFEKRTADGSEFESPKKKAKVE

SEQ ID NO: 6609 - protein, 2082 aa, synthetic construct
MPAAKRVKLDGGDKKYSIGLDIGTNSVGWAVITDEYKVPSKKFKVLGNTDRHSIKKNLIGALLFDSGETAEATRLKRTARRRYTRRKNRICYLQEIFSNEMAKVDDSFFHRLEESFLVEEDKKHERHPIFGNIVDEVAYHEKYPTIYHLRKKLVDSTDKADLRLIYLALAHMIKFRGHFLIEGDLNPDNSDVDKLFIQLVQTYNQLFEENPINASGVDAKAILSARLSKSRRLENLIAQLPGEKKNGLFGNLIALSLGLTPNFKSNFDLAEDAKLQLSKDTYDDDLDNLLAQIGDQYADLFLAAKNLSDAILLSDILRVNTEITKAPLSASMIKRYDEHHQDLTLLKALVRQQLPEKYKEIFFDQSKNGYAGYIDGGASQEEFYKFIKPILEKMDGTEELLVKLNREDLLRKQRTFDNGSIPHQIHLGELHAILRRQEDFYPFLKDNREKIEKILTFRIPYYVGPLARGNSRFAWMTRKSEETITPWNFEEVVDKGASAQSFIERMTNFDKNLPNEKVLPKHSLLYEYFTVYNELTKVKYVTEGMRKPAFLSGEQKKAIVDLLFKTNRKVTVKQLKEDYFKKIECFDSVEISGVEDRFNASLGTYHDLLKIIKDKDFLDNEENEDILEDIVLTLTLFEDREMIEERLKTYAHLFDDKVMKQLKRRRYTGWGRLSRKLINGIRDKQSGKTILDFLKSDGFANRNFMQLIHDDSLTFKEDIQKAQVSGQGDSLHEHIANLAGSPAIKKGILQTVKVVDELVKVMGRHKPENIVIEMARENQTTQKGQKNSRERMKRIEEGIKELGSQILKEHPVENTQLQNEKLYLYYLQNGRDMYVDQELDINRLSDYDVDHIVPQSFLKDDSIDNKVLTRSDKARGKSDNVPSEEVVKKMKNYWRQLLNAKLITQRKFDNLTKAERGGLSELDKAGFIKRQLVETRQITKHVAQILDSRMNTKYDENDKLIREVKVITLKSKLVSDFRKDFQFYKVREINNYHHAHDAYLNAVVGTALIKKYPKLESEFVYGDYKVYDVRKMIAKSEQEIGKATAKYFFYSNIMNFFKTEITLANGEIRKRPLIETNGETGEIVWDKGRDFATVRKVLSMPQVNIVKKTEVQTGGFSKESILPKRNSDKLIARKKDWDPKKYGGFDSPTVAYSVLVVAKVEKGKSKKLKSVKELLGITIMERSSFEKNPIDFLEAKGYKEVKKDLIIKLPKYSLFELENGRKRMLASAGELQKGNELALPSKYVNFLYLASHYEKLKGSPEDNEQKQLFVEQHKHYLDEIIEQISEFSKRVILADANLDKVLSAYNKHRDKPIREQAENIIHLFTLTNLGAPAAFKYFDTTIDRKRYTSTKEVLDATLIHQSITGLYETRIDLSQLGGDGGGGSGSSGGIPWLMKKPLQLTTLVPLQEYEERLLKQTMLTGSYKEKLQSLFLKYDALWQHWENQVGHRRIKPHHIATGTVNPRPQKQYPINPKAKASIQTVINDLLKQGVLIQQNSIMNTPVYPVPKPDGKWRMVLDYREVNKTIPLIAAQNQHSAGILSSIFRGKYKTTLDLSNGFWAHSITPESYWLTAFTWLGQQYCWTRLPQGFLNSPALFNADVVDLLKEVPNVQVYVDDIYISHDDPREHLEQLEKVFSLLLNAGYVVSLKKSEIAQHEVEFLGFNITKEGRGLTETFKQKLLNITPPRDLKQLQSILGLLNFARNFIPNFSELVKPLYNIIATAPGKYITWTTDNSQQLQNIISMLNSAENLEERNPEVRLIMKVNTSPSAGYIRFYNEFAKRPIMYLNYVYTKAEVKFTNTEKLLTTIHKGLIKALDLGMGQEILVYSPIVSMTKIQKTPLPERKALPIRWITWMSYLEDPRIQFHYDKTLPELQQVPTVTDDIIAKIKHPSEFSMVFYTDGSAIKHPNVNKSHNAGMGIAQVQFKPEFTVINTWSIPLGDHTAQLAEVAAVEFACKKALKIDGPVLIVTDSFYVAESVNKELPYWQSNGFFNNKKKPLKHVSKWKSIADCIQLKPDIIIIHEKGHQPTASTFHTEGNNLADKLATQGSYVVNAGKRTADGSEFEKRTADGSEFESPKKKAKVE

SEQ ID NO: 6610 - protein, 2082 aa, synthetic construct
MPAAKRVKLDGGDKKYSIGLDIGTNSVGWAVITDEYKVPSKKFKVLGNTDRHSIKKNLIGALLFDSGETAEATRLKRTARRRYTRRKNRICYLQEIFSNEMAKVDDSFFHRLEESFLVEEDKKHERHPIFGNIVDEVAYHEKYPTIYHLRKKLVDSTDKADLRLIYLALAHMIKFRGHFLIEGDLNPDNSDVDKLFIQLVQTYNQLFEENPINASGVDAKAILSARLSKSRRLENLIAQLPGEKKNGLFGNLIALSLGLTPNFKSNFDLAEDAKLQLSKDTYDDDLDNLLAQIGDQYADLFLAAKNLSDAILLSDILRVNTEITKAPLSASMIKRYDEHHQDLTLLKALVRQQLPEKYKEIFFDQSKNGYAGYIDGGASQEEFYKFIKPILEKMDGTEELLVKLNREDLLRKQRTFDNGSIPHQIHLGELHAILRRQEDFYPFLKDNREKIEKILTFRIPYYVGPLARGNSRFAWMTRKSEETITPWNFEEVVDKGASAQSFIERMTNFDKNLPNEKVLPKHSLLYEYFTVYNELTKVKYVTEGMRKPAFLSGEQKKAIVDLLFKTNRKVTVKQLKEDYFKKIECFDSVEISGVEDRFNASLGTYHDLLKIIKDKDFLDNEENEDILEDIVLTLTLFEDREMIEERLKTYAHLFDDKVMKQLKRRRYTGWGRLSRKLINGIRDKQSGKTILDFLKSDGFANRNFMQLIHDDSLTFKEDIQKAQVSGQGDSLHEHIANLAGSPAIKKGILQTVKVVDELVKVMGRHKPENIVIEMARENQTTQKGQKNSRERMKRIEEGIKELGSQILKEHPVENTQLQNEKLYLYYLQNGRDMYVDQELDINRLSDYDVDHIVPQSFLKDDSIDNKVLTRSDKARGKSDNVPSEEVVKKMKNYWRQLLNAKLITQRKFDNLTKAERGGLSELDKAGFIKRQLVETRQITKHVAQILDSRMNTKYDENDKLIREVKVITLKSKLVSDFRKDFQFYKVREINNYHHAHDAYLNAVVGTALIKKYPKLESEFVYGDYKVYDVRKMIAKSEQEIGKATAKYFFYSNIMNFFKTEITLANGEIRKRPLIETNGETGEIVWDKGRDFATVRKVLSMPQVNIVKKTEVQTGGFSKESILPKRNSDKLIARKKDWDPKKYGGFDSPTVAYSVLVVAKVEKGKSKKLKSVKELLGITIMERSSFEKNPIDFLEAKGYKEVKKDLIIKLPKYSLFELENGRKRMLASAGELQKGNELALPSKYVNFLYLASHYEKLKGSPEDNEQKQLFVEQHKHYLDEIIEQISEFSKRVILADANLDKVLSAYNKHRDKPIREQAENIIHLFTLTNLGAPAAFKYFDTTIDRKRYTSTKEVLDATLIHQSITGLYETRIDLSQLGGDGGGGSGSSGGIPWLMKKPLQLTTLVPLQEYEERLLKQTMLTGSYKEKLQSLFLKYDALWQHWENQVGHRRIKPHHIATGTVNPRPQKQYPINPKAKASIQTVINDLLKQGVLIQQNSIMNTPVYPVPKPDGKWRMVLDYREVNKTIPLIAAQNQHSAGILSSIFRGKYKTTLDLSNGFWAHSITPESYWLTAFTWLGQQYCWTRLPQGFLNSPALFNADVVDLLKEVPNVQVYVDDIYISHDDPREHLEQLEKVFSLLLNAGYVVSLKKSEIAQHEVEFLGFNITKEGRGLTETFKQKLLNITPPRDLKQLQSILGKLNFARNFIPNFSELVKPLYNIIATAPGKYITWTTDNSQQLQNIISMLNSAENLEERNPEVRLIMKVNTSPSAGYIRFYNEFAKRPIMYLNYVYTKAEVKFTNTEKLLTTIHKGLIKALDLGMGQEILVYSPIVSMTKIQKTPLPERKALPIRWITWMSYLEDPRIQFHYDKTLPELQQVPTVTDDIIAKIKHPSEFSMVFYTDGSAIKHPNVNKSHNAGMGIAQVQFKPEFTVINTWSIPLGDHTAQLAEVAAVEFACKKALKIDGPVLIVTDSFYVAESVNKELPYWQSNGFFNNKKKPLKHVSKWKSIADCIQLKPDIIIIHEKGHQPTASTFHTEGNNLADKLATQGSYVVNAGKRTADGSEFEKRTADGSEFESPKKKAKVE

SEQ ID NO: 6611 - protein, 2089 aa, synthetic construct
MPAAKRVKLDGGDKKYSIGLDIGTNSVGWAVITDEYKVPSKKFKVLGNTDRHSIKKNLIGALLFDSGETAEATRLKRTARRRYTRRKNRICYLQEIFSNEMAKVDDSFFHRLEESFLVEEDKKHERHPIFGNIVDEVAYHEKYPTIYHLRKKLVDSTDKADLRLIYLALAHMIKFRGHFLIEGDLNPDNSDVDKLFIQLVQTYNQLFEENPINASGVDAKAILSARLSKSRRLENLIAQLPGEKKNGLFGNLIALSLGLTPNFKSNFDLAEDAKLQLSKDTYDDDLDNLLAQIGDQYADLFLAAKNLSDAILLSDILRVNTEITKAPLSASMIKRYDEHHQDLTLLKALVRQQLPEKYKEIFFDQSKNGYAGYIDGGASQEEFYKFIKPILEKMDGTEELLVKLNREDLLRKQRTFDNGSIPHQIHLGELHAILRRQEDFYPFLKDNREKIEKILTFRIPYYVGPLARGNSRFAWMTRKSEETITPWNFEEVVDKGASAQSFIERMTNFDKNLPNEKVLPKHSLLYEYFTVYNELTKVKYVTEGMRKPAFLSGEQKKAIVDLLFKTNRKVTVKQLKEDYFKKIECFDSVEISGVEDRFNASLGTYHDLLKIIKDKDFLDNEENEDILEDIVLTLTLFEDREMIEERLKTYAHLFDDKVMKQLKRRRYTGWGRLSRKLINGIRDKQSGKTILDFLKSDGFANRNFMQLIHDDSLTFKEDIQKAQVSGQGDSLHEHIANLAGSPAIKKGILQTVKVVDELVKVMGRHKPENIVIEMARENQTTQKGQKNSRERMKRIEEGIKELGSQILKEHPVENTQLQNEKLYLYYLQNGRDMYVDQELDINRLSDYDVDHIVPQSFLKDDSIDNKVLTRSDKARGKSDNVPSEEVVKKMKNYWRQLLNAKLITQRKFDNLTKAERGGLSELDKAGFIKRQLVETRQITKHVAQILDSRMNTKYDENDKLIREVKVITLKSKLVSDFRKDFQFYKVREINNYHHAHDAYLNAVVGTALIKKYPKLESEFVYGDYKVYDVRKMIAKSEQEIGKATAKYFFYSNIMNFFKTEITLANGEIRKRPLIETNGETGEIVWDKGRDFATVRKVLSMPQVNIVKKTEVQTGGFSKESILPKRNSDKLIARKKDWDPKKYGGFDSPTVAYSVLVVAKVEKGKSKKLKSVKELLGITIMERSSFEKNPIDFLEAKGYKEVKKDLIIKLPKYSLFELENGRKRMLASAGELQKGNELALPSKYVNFLYLASHYEKLKGSPEDNEQKQLFVEQHKHYLDEIIEQISEFSKRVILADANLDKVLSAYNKHRDKPIREQAENIIHLFTLTNLGAPAAFKYFDTTIDRKRYTSTKEVLDATLIHQSITGLYETRIDLSQLGGDGGGGSGSSGGVLNLEEEYRLHEKPVPSSIDPSWLQLFPTVWAERAGMGLANQVPPVVVELRSGASPVAVRQYPMSKEAREGIRPHIQRFLDLGVLVPCQSPWNTPLLPVKKPGTNDYRPVQDLREINKRVQDIHPTVPNPYNLLSSLPPSHTWYSVLDLKDAFFCLKLHPNSQPLFAFEWRDPEKGNTGQLTWTRLPQGFKNSPTLFNEALHRDLAPFRALNPQVVLLQYVDDLLVAAPTYRDCKEGTQKLLQELSKLGYRVSAKKAQLCQKEVTYLGYLLKEGKRWLTPARKATVMKIPPPTTPRQVREFLGTAGFCRLWIPGFASLAAPLYPLTKPSIPFIWTEEHQKAFDRIKEALLSAPALALPDLTKPFTLYVDERAGVARGVLTQTLGPWRRPVAYLSKKLDPVASGWPTCLKAVAAVALLLKDADKLTLGQNVTVIASHSLESIVRQPPDRWMTNARMTHYQSLLLNERVSFAPPAVLNPATLLPVESEATPVHRCSEILAEETGTRRDLKDQPLPGVPAWYTDGSSFIAEGKRRAGAAIVDGKRTVWASSLPEGTSAQKAELVALTQALRLAEGKDINIYTDSRYAFATAHIHGAIYKQRGWLTSAGKDIKNKEEILALLEAIHLPKRVAIIHCPGHQKGNDPVATGNRRADEAAKQAALSTRVLAETTKPAGKRTADGSEFEKRTADGSEFESPKKKAKVE

SEQ ID NO: 6612 - protein, 2091 aa, synthetic construct
MPAAKRVKLDGGDKKYSIGLDIGTNSVGWAVITDEYKVPSKKFKVLGNTDRHSIKKNLIGALLFDSGETAEATRLKRTARRRYTRRKNRICYLQEIFSNEMAKVDDSFFHRLEESFLVEEDKKHERHPIFGNIVDEVAYHEKYPTIYHLRKKLVDSTDKADLRLIYLALAHMIKFRGHFLIEGDLNPDNSDVDKLFIQLVQTYNQLFEENPINASGVDAKAILSARLSKSRRLENLIAQLPGEKKNGLFGNLIALSLGLTPNFKSNFDLAEDAKLQLSKDTYDDDLDNLLAQIGDQYADLFLAAKNLSDAILLSDILRVNTEITKAPLSASMIKRYDEHHQDLTLLKALVRQQLPEKYKEIFFDQSKNGYAGYIDGGASQEEFYKFIKPILEKMDGTEELLVKLNREDLLRKQRTFDNGSIPHQIHLGELHAILRRQEDFYPFLKDNREKIEKILTFRIPYYVGPLARGNSRFAWMTRKSEETITPWNFEEVVDKGASAQSFIERMTNFDKNLPNEKVLPKHSLLYEYFTVYNELTKVKYVTEGMRKPAFLSGEQKKAIVDLLFKTNRKVTVKQLKEDYFKKIECFDSVEISGVEDRFNASLGTYHDLLKIIKDKDFLDNEENEDILEDIVLTLTLFEDREMIEERLKTYAHLFDDKVMKQLKRRRYTGWGRLSRKLINGIRDKQSGKTILDFLKSDGFANRNFMQLIHDDSLTFKEDIQKAQVSGQGDSLHEHIANLAGSPAIKKGILQTVKVVDELVKVMGRHKPENIVIEMARENQTTQKGQKNSRERMKRIEEGIKELGSQILKEHPVENTQLQNEKLYLYYLQNGRDMYVDQELDINRLSDYDVDHIVPQSFLKDDSIDNKVLTRSDKARGKSDNVPSEEVVKKMKNYWRQLLNAKLITQRKFDNLTKAERGGLSELDKAGFIKRQLVETRQITKHVAQILDSRMNTKYDENDKLIREVKVITLKSKLVSDFRKDFQFYKVREINNYHHAHDAYLNAVVGTALIKKYPKLESEFVYGDYKVYDVRKMIAKSEQEIGKATAKYFFYSNIMNFFKTEITLANGEIRKRPLIETNGETGEIVWDKGRDFATVRKVLSMPQVNIVKKTEVQTGGFSKESILPKRNSDKLIARKKDWDPKKYGGFDSPTVAYSVLVVAKVEKGKSKKLKSVKELLGITIMERSSFEKNPIDFLEAKGYKEVKKDLIIKLPKYSLFELENGRKRMLASAGELQKGNELALPSKYVNFLYLASHYEKLKGSPEDNEQKQLFVEQHKHYLDEIIEQISEFSKRVILADANLDKVLSAYNKHRDKPIREQAENIIHLFTLTNLGAPAAFKYFDTTIDRKRYTSTKEVLDATLIHQSITGLYETRIDLSQLGGDGGGGSGSSGGTLNIEDEYRLHETSKEPDVPLGSTWLSDFPQAWAETGGMGLAVRQAPLIIPLKATSTPVSIKQYPMSQEARLGIKPHIQRLLDQGILVPCQSPWNTPLLPVKKPGTNDYRPVQDLREVNKRVEDIHPTVPNPYNLLSGLPPSHQWYTVLDLKDAFFCLRLHPTSQPLFAFEWRDPEMGISGQLTWTRLPQGFKNSPTLFNEALHRDLADFRIQHPDLILLQYVDDLLLAATSEQDCQRGTRALLQTLGNLGYRASAKKAQICQKQVKYLGYLLKEGQRWLTEARKETVMGQPTPKTPRQLREFLGTAGFCRLWIPGFAEMAAPLYPLTKPGTLFNWGPDQQKAYQEIKQALLTAPALGLPDLTKPFELFVDEKQGYAKGVLTQKLGPWRRPVAYLSKKLDPVAAGWPPCLRMVAAIAVLTKDAGKLTMGQPLVILAPHAVEALVKQPPDRWLSNARMTHYQAMLLDTDRVQFGPVVALNPATLLPLPEKEAPHDCLEILAETHGTRPDLTDQPIPDADYTWYTDGSSFLQEGQRRAGAAVTTETEVIWARALPAGTSAQRAELIALTQALKMAEGKKLNVYTDSRYAFATAHVHGEIYRRRGWLTSEGREIKNKNEILALLKALFLPKRLSIIHCPGHQKGNSAEARGNRMADQAAREAAMKAVLETSTLLAGKRTADGSEFEKRTADGSEFESPKKKAKVE

SEQ ID NO: 6613 - protein, 2093 aa, synthetic construct
MPAAKRVKLDGGDKKYSIGLDIGTNSVGWAVITDEYKVPSKKFKVLGNTDRHSIKKNLIGALLFDSGETAEATRLKRTARRRYTRRKNRICYLQEIFSNEMAKVDDSFFHRLEESFLVEEDKKHERHPIFGNIVDEVAYHEKYPTIYHLRKKLVDSTDKADLRLIYLALAHMIKFRGHFLIEGDLNPDNSDVDKLFIQLVQTYNQLFEENPINASGVDAKAILSARLSKSRRLENLIAQLPGEKKNGLFGNLIALSLGLTPNFKSNFDLAEDAKLQLSKDTYDDDLDNLLAQIGDQYADLFLAAKNLSDAILLSDILRVNTEITKAPLSASMIKRYDEHHQDLTLLKALVRQQLPEKYKEIFFDQSKNGYAGYIDGGASQEEFYKFIKPILEKMDGTEELLVKLNREDLLRKQRTFDNGSIPHQIHLGELHAILRRQEDFYPFLKDNREKIEKILTFRIPYYVGPLARGNSRFAWMTRKSEETITPWNFEEVVDKGASAQSFIERMTNFDKNLPNEKVLPKHSLLYEYFTVYNELTKVKYVTEGMRKPAFLSGEQKKAIVDLLFKTNRKVTVKQLKEDYFKKIECFDSVEISGVEDRFNASLGTYHDLLKIIKDKDFLDNEENEDILEDIVLTLTLFEDREMIEERLKTYAHLFDDKVMKQLKRRRYTGWGRLSRKLINGIRDKQSGKTILDFLKSDGFANRNFMQLIHDDSLTFKEDIQKAQVSGQGDSLHEHIANLAGSPAIKKGILQTVKVVDELVKVMGRHKPENIVIEMARENQTTQKGQKNSRERMKRIEEGIKELGSQILKEHPVENTQLQNEKLYLYYLQNGRDMYVDQELDINRLSDYDVDHIVPQSFLKDDSIDNKVLTRSDKARGKSDNVPSEEVVKKMKNYWRQLLNAKLITQRKFDNLTKAERGGLSELDKAGFIKRQLVETRQITKHVAQILDSRMNTKYDENDKLIREVKVITLKSKLVSDFRKDFQFYKVREINNYHHAHDAYLNAVVGTALIKKYPKLESEFVYGDYKVYDVRKMIAKSEQEIGKATAKYFFYSNIMNFFKTEITLANGEIRKRPLIETNGETGEIVWDKGRDFATVRKVLSMPQVNIVKKTEVQTGGFSKESILPKRNSDKLIARKKDWDPKKYGGFDSPTVAYSVLVVAKVEKGKSKKLKSVKELLGITIMERSSFEKNPIDFLEAKGYKEVKKDLIIKLPKYSLFELENGRKRMLASAGELQKGNELALPSKYVNFLYLASHYEKLKGSPEDNEQKQLFVEQHKHYLDEIIEQISEFSKRVILADANLDKVLSAYNKHRDKPIREQAENIIHLFTLTNLGAPAAFKYFDTTIDRKRYTSTKEVLDATLIHQSITGLYETRIDLSQLGGDGGGSSGGSGGTAPLEEEYRLFLEAPIQNVTLLEQWKREIPKVWAEINPPGLASTQAPIHVQLLSTALPVRVRQYPITLEAKRSLRETIRKFRAAGILRPVHSPWNTPLLPVRKSGTSEYRMVQDLREVNKRVETIHPTVPNPYTLLSLLPPDRIWYSVLDLKDAFFCIPLAPESQLIFAFEWADAEEGESGQLTWTRLPQGFKNSPTLFDEALNRDLQGFRLDHPSVSLLQYVDDLLIAADTQAACLSATRDLLMTLAELGYRVSGKKAQLCQEEVTYLGFKIHKGSRSLSNSRTQAILQIPVPKTKRQVREFLGTIGYCRLWIPGFAELAQPLYAATRGGNDPLVWGEKEEEAFQSLKLALTQPPALALPSLDKPFQLFVEETSGAAKGVLTQALGPWKRPVAYLSKRLDPVAAGWPRCLRAIAAAALLTREASKLTFGQDIEITSSHNLESLLRSPPDKWLTNARITQYQVLLLDPPRVRFKQTAALNPATLLPETDDTLPIHHCLDTLDSLTSTRPDLTDQPLAQAEATLFTDGSSYIRDGKRYAGAAVVTLDSVIWAEPLPIGTSAQKAELIALTKALEWSKDKSVNIYTDSRYAFATLHVHGMIYRERGLLTAGGKAIKNAPEILALLTAVWLPKRVAVMHCKGHQKDDAPTSTGNRRADEVAREVAIRPLSTQATISAGKRTADGSEFEKRTADGSEFESPKKKAKVE

SEQ ID NO: 6614 - protein, 2097 aa, synthetic construct
MPAAKRVKLDGGDKKYSIGLDIGTNSVGWAVITDEYKVPSKKFKVLGNTDRHSIKKNLIGALLFDSGETAEATRLKRTARRRYTRRKNRICYLQEIFSNEMAKVDDSFFHRLEESFLVEEDKKHERHPIFGNIVDEVAYHEKYPTIYHLRKKLVDSTDKADLRLIYLALAHMIKFRGHFLIEGDLNPDNSDVDKLFIQLVQTYNQLFEENPINASGVDAKAILSARLSKSRRLENLIAQLPGEKKNGLFGNLIALSLGLTPNFKSNFDLAEDAKLQLSKDTYDDDLDNLLAQIGDQYADLFLAAKNLSDAILLSDILRVNTEITKAPLSASMIKRYDEHHQDLTLLKALVRQQLPEKYKEIFFDQSKNGYAGYIDGGASQEEFYKFIKPILEKMDGTEELLVKLNREDLLRKQRTFDNGSIPHQIHLGELHAILRRQEDFYPFLKDNREKIEKILTFRIPYYVGPLARGNSRFAWMTRKSEETITPWNFEEVVDKGASAQSFIERMTNFDKNLPNEKVLPKHSLLYEYFTVYNELTKVKYVTEGMRKPAFLSGEQKKAIVDLLFKTNRKVTVKQLKEDYFKKIECFDSVEISGVEDRFNASLGTYHDLLKIIKDKDFLDNEENEDILEDIVLTLTLFEDREMIEERLKTYAHLFDDKVMKQLKRRRYTGWGRLSRKLINGIRDKQSGKTILDFLKSDGFANRNFMQLIHDDSLTFKEDIQKAQVSGQGDSLHEHIANLAGSPAIKKGILQTVKVVDELVKVMGRHKPENIVIEMARENQTTQKGQKNSRERMKRIEEGIKELGSQILKEHPVENTQLQNEKLYLYYLQNGRDMYVDQELDINRLSDYDVDHIVPQSFLKDDSIDNKVLTRSDKARGKSDNVPSEEVVKKMKNYWRQLLNAKLITQRKFDNLTKAERGGLSELDKAGFIKRQLVETRQITKHVAQILDSRMNTKYDENDKLIREVKVITLKSKLVSDFRKDFQFYKVREINNYHHAHDAYLNAVVGTALIKKYPKLESEFVYGDYKVYDVRKMIAKSEQEIGKATAKYFFYSNIMNFFKTEITLANGEIRKRPLIETNGETGEIVWDKGRDFATVRKVLSMPQVNIVKKTEVQTGGFSKESILPKRNSDKLIARKKDWDPKKYGGFDSPTVAYSVLVVAKVEKGKSKKLKSVKELLGITIMERSSFEKNPIDFLEAKGYKEVKKDLIIKLPKYSLFELENGRKRMLASAGELQKGNELALPSKYVNFLYLASHYEKLKGSPEDNEQKQLFVEQHKHYLDEIIEQISEFSKRVILADANLDKVLSAYNKHRDKPIREQAENIIHLFTLTNLGAPAAFKYFDTTIDRKRYTSTKEVLDATLIHQSITGLYETRIDLSQLGGDGGGSSGGSGGTVSLQDEHRLFDIPVTTSLPDVWLQDFPQAWAETGGLGRAKCQAPIIIDLKPTAVPVSIKQYPMSLEAHMGIRQHIIKFLELGVLRPCRSPWNTPLLPVKKPGTQDYRPVQDLREINKRTVDIHPTVPNPYNLLSTLKPDYSWYTVLDLKDAFFCLPLAPQSQELFAFEWKDPERGISGQLTWTRLPQGFKNSPTLFNEALHRDLTDFRTQHPEVTLLQYVDDLLLAAPTKKACTQGTRHLLQELGEKGYRASAKKAQICQTKVTYLGYILSEGKRWLTPGRIETVARIPPPRNPREVREFLGTAGFCRLWIPGFAELAAPLYALTKPSTPFTWQTEHQLAFEALKKALLSAPALGLPDTSKPFTLFLDERQGIAKGVLTQKLGPWKRPVAYLSKKLDPVAAGWPPCLRIMAATAMLVKDSAKLTLGQPLTVITPHTLEAIVRQPPDRWITNARLTHYQALLLDTDRVQFGPPVTLNPATLLPVPENQPSPHDCRQVLAETHGTREDLKDQELPDADHTWYTDGSSYLDSGTRRAGAAVVDGHNTIWAQSLPPGTSAQKAELIALTKALELSKGKKANIYTDSRYAFATAHTHGSIYERRGWLTSEGKEIKNKAEIIALLKALFLPQEVAIIHCPGHQKGQDPVAVGNRQADRVARQAAMAEVLTLATEPDNTSHITAGKRTADGSEFEKRTADGSEFESPKKKAKVE

SEQ ID NO: 6615 - protein, 2090 aa, synthetic construct
MPAAKRVKLDGGDKKYSIGLDIGTNSVGWAVITDEYKVPSKKFKVLGNTDRHSIKKNLIGALLFDSGETAEATRLKRTARRRYTRRKNRICYLQEIFSNEMAKVDDSFFHRLEESFLVEEDKKHERHPIFGNIVDEVAYHEKYPTIYHLRKKLVDSTDKADLRLIYLALAHMIKFRGHFLIEGDLNPDNSDVDKLFIQLVQTYNQLFEENPINASGVDAKAILSARLSKSRRLENLIAQLPGEKKNGLFGNLIALSLGLTPNFKSNFDLAEDAKLQLSKDTYDDDLDNLLAQIGDQYADLFLAAKNLSDAILLSDILRVNTEITKAPLSASMIKRYDEHHQDLTLLKALVRQQLPEKYKEIFFDQSKNGYAGYIDGGASQEEFYKFIKPILEKMDGTEELLVKLNREDLLRKQRTFDNGSIPHQIHLGELHAILRRQEDFYPFLKDNREKIEKILTFRIPYYVGPLARGNSRFAWMTRKSEETITPWNFEEVVDKGASAQSFIERMTNFDKNLPNEKVLPKHSLLYEYFTVYNELTKVKYVTEGMRKPAFLSGEQKKAIVDLLFKTNRKVTVKQLKEDYFKKIECFDSVEISGVEDRFNASLGTYHDLLKIIKDKDFLDNEENEDILEDIVLTLTLFEDREMIEERLKTYAHLFDDKVMKQLKRRRYTGWGRLSRKLINGIRDKQSGKTILDFLKSDGFANRNFMQLIHDDSLTFKEDIQKAQVSGQGDSLHEHIANLAGSPAIKKGILQTVKVVDELVKVMGRHKPENIVIEMARENQTTQKGQKNSRERMKRIEEGIKELGSQILKEHPVENTQLQNEKLYLYYLQNGRDMYVDQELDINRLSDYDVDHIVPQSFLKDDSIDNKVLTRSDKARGKSDNVPSEEVVKKMKNYWRQLLNAKLITQRKFDNLTKAERGGLSELDKAGFIKRQLVETRQITKHVAQILDSRMNTKYDENDKLIREVKVITLKSKLVSDFRKDFQFYKVREINNYHHAHDAYLNAVVGTALIKKYPKLESEFVYGDYKVYDVRKMIAKSEQEIGKATAKYFFYSNIMNFFKTEITLANGEIRKRPLIETNGETGEIVWDKGRDFATVRKVLSMPQVNIVKKTEVQTGGFSKESILPKRNSDKLIARKKDWDPKKYGGFDSPTVAYSVLVVAKVEKGKSKKLKSVKELLGITIMERSSFEKNPIDFLEAKGYKEVKKDLIIKLPKYSLFELENGRKRMLASAGELQKGNELALPSKYVNFLYLASHYEKLKGSPEDNEQKQLFVEQHKHYLDEIIEQISEFSKRVILADANLDKVLSAYNKHRDKPIREQAENIIHLFTLTNLGAPAAFKYFDTTIDRKRYTSTKEVLDATLIHQSITGLYETRIDLSQLGGDGGGSSGGSGGTLQLEEEYRLFEPESTQKQEMDIWLKNFPQAWAETGGMGTAHCQAPVLIQLKATATPISIRQYPMPHEAYQGIKPHIRRMLDQGILKPCQSPWNTPLLPVKKPGTEDYRPVQDLREVNKRVEDIHPTVPNPYNLLSTLPPSHPWYTVLDLKDAFFCLRLHSESQLLFAFEWRDPEIGLSGQLTWTRLPQGFKNSPTLFNEALHSDLADFRVRYPALVLLQYVDDLLLAAATRTECLEGTKALLETLGNKGYRASAKKAQICLQEVTYLGYSLKDGQRWLTKARKEAILSIPVPKNSRQVREFLGKAGYCRLFIPGFAELAAPLYPLTRPGTLFQWGTEQQLAFEDIKKALLSSPALGLPDITKPFELFIDENSGFAKGVLVQKLGPWKRPVAYLSKKLDTVASGWPPCLRMVAAIAILVKDAGKLTLGQPLTILTSHPVEALVRQPPNKWLSNARMTHYQAMLLDAERVHFGPTVSLNPATLLPLPSGGNHHDCLQILAETHGTRPDLTDQPLPDADLTWYTDGSSFIRNGEREAGAAVTTESEVIWAAPLPPGTSAQRAELIALTQALKMAEGKKLTVYTDSRYAFATTHVHGEIYRRRGWLTSEGKEIKNKNEILALLEALFLPKRLSIIHCPGHQKGDSPQAKGNRLADDTAKKAATETHSSLTVLPAGKRTADGSEFEKRTADGSEFESPKKKAKVE

SEQ ID NO: 6616 - protein, 2213 aa, synthetic construct
MPAAKRVKLDGGDKKYSIGLDIGTNSVGWAVITDEYKVPSKKFKVLGNTDRHSIKKNLIGALLFDSGETAEATRLKRTARRRYTRRKNRICYLQEIFSNEMAKVDDSFFHRLEESFLVEEDKKHERHPIFGNIVDEVAYHEKYPTIYHLRKKLVDSTDKADLRLIYLALAHMIKFRGHFLIEGDLNPDNSDVDKLFIQLVQTYNQLFEENPINASGVDAKAILSARLSKSRRLENLIAQLPGEKKNGLFGNLIALSLGLTPNFKSNFDLAEDAKLQLSKDTYDDDLDNLLAQIGDQYADLFLAAKNLSDAILLSDILRVNTEITKAPLSASMIKRYDEHHQDLTLLKALVRQQLPEKYKEIFFDQSKNGYAGYIDGGASQEEFYKFIKPILEKMDGTEELLVKLNREDLLRKQRTFDNGSIPHQIHLGELHAILRRQEDFYPFLKDNREKIEKILTFRIPYYVGPLARGNSRFAWMTRKSEETITPWNFEEVVDKGASAQSFIERMTNFDKNLPNEKVLPKHSLLYEYFTVYNELTKVKYVTEGMRKPAFLSGEQKKAIVDLLFKTNRKVTVKQLKEDYFKKIECFDSVEISGVEDRFNASLGTYHDLLKIIKDKDFLDNEENEDILEDIVLTLTLFEDREMIEERLKTYAHLFDDKVMKQLKRRRYTGWGRLSRKLINGIRDKQSGKTILDFLKSDGFANRNFMQLIHDDSLTFKEDIQKAQVSGQGDSLHEHIANLAGSPAIKKGILQTVKVVDELVKVMGRHKPENIVIEMARENQTTQKGQKNSRERMKRIEEGIKELGSQILKEHPVENTQLQNEKLYLYYLQNGRDMYVDQELDINRLSDYDVDHIVPQSFLKDDSIDNKVLTRSDKARGKSDNVPSEEVVKKMKNYWRQLLNAKLITQRKFDNLTKAERGGLSELDKAGFIKRQLVETRQITKHVAQILDSRMNTKYDENDKLIREVKVITLKSKLVSDFRKDFQFYKVREINNYHHAHDAYLNAVVGTALIKKYPKLESEFVYGDYKVYDVRKMIAKSEQEIGKATAKYFFYSNIMNFFKTEITLANGEIRKRPLIETNGETGEIVWDKGRDFATVRKVLSMPQVNIVKKTEVQTGGFSKESILPKRNSDKLIARKKDWDPKKYGGFDSPTVAYSVLVVAKVEKGKSKKLKSVKELLGITIMERSSFEKNPIDFLEAKGYKEVKKDLIIKLPKYSLFELENGRKRMLASAGELQKGNELALPSKYVNFLYLASHYEKLKGSPEDNEQKQLFVEQHKHYLDEIIEQISEFSKRVILADANLDKVLSAYNKHRDKPIREQAENIIHLFTLTNLGAPAAFKYFDTTIDRKRYTSTKEVLDATLIHQSITGLYETRIDLSQLGGDGGGSSGGSGGTLGDQGSRGSDPLPEPRVTLTVEGIPTEFLVNTGAEHSVLTKPMGKMGSKRTVVAGATGSKVYPWTTKRLLKIGQKQVTHSFLVIPECPAPLLGRDLLTKLKAQIQFSTEGPQVTWEDRPAMCLVLNLEEEYRLHEKPVPPSIDPSWLQLFPMVWAEKAGMGLANQVPPVVVELKSDASPVAVRQYPMSKEAREGIRPHIQRFLDLGILVPCQSPWNTPLLPVKKPGTNDYRPVQDLREVNKRVQDIHPTVPNPYNLLSSLPPSHTWYSVLDLKDAFFCLKLHPNSQPLFAFEWRDPEKGNTGQLTWTRLPQGFKNSPTLFNEALHRDLASFRALNPQVVMLQYVDDLLVAAPTYRDCKEGTRRLLQELSKLGYRVSAKKAQLCREEVTYLGYLLKGGKRWLTPARKATVMKIPTPTTPRQVREFLGKAGFCRLFIPGFASLAAPLYPLTRPKVPFTWTEAHQEAFGRIKEALLSAPALALPDLTKPFALYVDEKEGVARGVLTQTLGPWRRPVAYLSKKLDPVASGWPTCLKAIAAVALLLKDADKLTLGQNVLVIAPHNLESIVRQPPDRWMTNARMTHYQSLLLNERVSFAPPAILNPATLLPVESDDTPIHICSEILAEETGTRPDLRDQPLPGVPAWYTDGSSFIMDGRRQAGAAIVDNKRTVWASNLPEGTSAQKAELIALTQALRLAEGKSINIYTDSRYAFATAHVHGAIYKQRGWLTSAGKDIKNKEEILALLEAIHLPKRVAIIHCPGHQRGTDPVATGNRKADEAAKQAAQSTRILTETTKNAGKRTADGSEFEKRTADGSEFESPKKKAKVE

SEQ ID NO: 6617 - protein, 2091 aa, synthetic construct
MPAAKRVKLDGGDKKYSIGLDIGTNSVGWAVITDEYKVPSKKFKVLGNTDRHSIKKNLIGALLFDSGETAEATRLKRTARRRYTRRKNRICYLQEIFSNEMAKVDDSFFHRLEESFLVEEDKKHERHPIFGNIVDEVAYHEKYPTIYHLRKKLVDSTDKADLRLIYLALAHMIKFRGHFLIEGDLNPDNSDVDKLFIQLVQTYNQLFEENPINASGVDAKAILSARLSKSRRLENLIAQLPGEKKNGLFGNLIALSLGLTPNFKSNFDLAEDAKLQLSKDTYDDDLDNLLAQIGDQYADLFLAAKNLSDAILLSDILRVNTEITKAPLSASMIKRYDEHHQDLTLLKALVRQQLPEKYKEIFFDQSKNGYAGYIDGGASQEEFYKFIKPILEKMDGTEELLVKLNREDLLRKQRTFDNGSIPHQIHLGELHAILRRQEDFYPFLKDNREKIEKILTFRIPYYVGPLARGNSRFAWMTRKSEETITPWNFEEVVDKGASAQSFIERMTNFDKNLPNEKVLPKHSLLYEYFTVYNELTKVKYVTEGMRKPAFLSGEQKKAIVDLLFKTNRKVTVKQLKEDYFKKIECFDSVEISGVEDRFNASLGTYHDLLKIIKDKDFLDNEENEDILEDIVLTLTLFEDREMIEERLKTYAHLFDDKVMKQLKRRRYTGWGRLSRKLINGIRDKQSGKTILDFLKSDGFANRNFMQLIHDDSLTFKEDIQKAQVSGQGDSLHEHIANLAGSPAIKKGILQTVKVVDELVKVMGRHKPENIVIEMARENQTTQKGQKNSRERMKRIEEGIKELGSQILKEHPVENTQLQNEKLYLYYLQNGRDMYVDQELDINRLSDYDVDHIVPQSFLKDDSIDNKVLTRSDKARGKSDNVPSEEVVKKMKNYWRQLLNAKLITQRKFDNLTKAERGGLSELDKAGFIKRQLVETRQITKHVAQILDSRMNTKYDENDKLIREVKVITLKSKLVSDFRKDFQFYKVREINNYHHAHDAYLNAVVGTALIKKYPKLESEFVYGDYKVYDVRKMIAKSEQEIGKATAKYFFYSNIMNFFKTEITLANGEIRKRPLIETNGETGEIVWDKGRDFATVRKVLSMPQVNIVKKTEVQTGGFSKESILPKRNSDKLIARKKDWDPKKYGGFDSPTVAYSVLVVAKVEKGKSKKLKSVKELLGITIMERSSFEKNPIDFLEAKGYKEVKKDLIIKLPKYSLFELENGRKRMLASAGELQKGNELALPSKYVNFLYLASHYEKLKGSPEDNEQKQLFVEQHKHYLDEIIEQISEFSKRVILADANLDKVLSAYNKHRDKPIREQAENIIHLFTLTNLGAPAAFKYFDTTIDRKRYTSTKEVLDATLIHQSITGLYETRIDLSQLGGDGGGSSGGSGGTLGIEDEYRLHETSTEPDVSLGSTWLSDFPQAWAETGGMGLAVRQAPLIIPLKATSTPVSIQQYPMSHEARLGIKPHIQRLLDQGILVPCQSPWNTPLLPVKKPGTNDYRPVQDLREVNKRVEDIHPTVPNPYNLLSGLPPSHQWYTVLDLKDAFFCLRLHPTSQPLFAFEWRDPGMGISGQLTWTRLPQGFKNSPTLFNEALHRDLADFRIQHPDLILLQYVDDILLAATSELDCQQGTRALLQTLGDLGYRASAKKAQICQKQVKYLGYLLREGQRWLTEARKETVMGQPVPKTPRQLREFLGTAGFCRLWIPGFAEMAAPLYPLTKPGTLFSWGPDQQKAYQEIKQALLTAPALGLPDLTKPFELFVDEKQGYAKGVLTQKLGPWRRPVAYLSKKLDPVAAGWPPCLRMVAAIAVLTKDAGKLTMGQPLVILAPHAVEALVKQPPDRWLSNARMTHYQAMLLDTDRVQFGPVVALNPATLLPLPEEGAPHDCLEILAETHGTRPDLTDQPIPDADHTWYTDGSSFLQEGQRKAGAAVTTETEVIWAGALPAGTSAQRAELIALTQALKMAEGKRLNVYTDSRYAFATAHIHGEIYRRRGWLTSEGREIKNKSEILALLKALFLPKRLSIIHCLGHQKGDSAEARGNRLADQAAREAAIKTPPDTSTLLAGKRTADGSEFEKRTADGSEFESPKKKAKVE

SEQ ID NO: 6618 - protein, 2091 aa, synthetic construct
MPAAKRVKLDGGDKKYSIGLDIGTNSVGWAVITDEYKVPSKKFKVLGNTDRHSIKKNLIGALLFDSGETAEATRLKRTARRRYTRRKNRICYLQEIFSNEMAKVDDSFFHRLEESFLVEEDKKHERHPIFGNIVDEVAYHEKYPTIYHLRKKLVDSTDKADLRLIYLALAHMIKFRGHFLIEGDLNPDNSDVDKLFIQLVQTYNQLFEENPINASGVDAKAILSARLSKSRRLENLIAQLPGEKKNGLFGNLIALSLGLTPNFKSNFDLAEDAKLQLSKDTYDDDLDNLLAQIGDQYADLFLAAKNLSDAILLSDILRVNTEITKAPLSASMIKRYDEHHQDLTLLKALVRQQLPEKYKEIFFDQSKNGYAGYIDGGASQEEFYKFIKPILEKMDGTEELLVKLNREDLLRKQRTFDNGSIPHQIHLGELHAILRRQEDFYPFLKDNREKIEKILTFRIPYYVGPLARGNSRFAWMTRKSEETITPWNFEEVVDKGASAQSFIERMTNFDKNLPNEKVLPKHSLLYEYFTVYNELTKVKYVTEGMRKPAFLSGEQKKAIVDLLFKTNRKVTVKQLKEDYFKKIECFDSVEISGVEDRFNASLGTYHDLLKIIKDKDFLDNEENEDILEDIVLTLTLFEDREMIEERLKTYAHLFDDKVMKQLKRRRYTGWGRLSRKLINGIRDKQSGKTILDFLKSDGFANRNFMQLIHDDSLTFKEDIQKAQVSGQGDSLHEHIANLAGSPAIKKGILQTVKVVDELVKVMGRHKPENIVIEMARENQTTQKGQKNSRERMKRIEEGIKELGSQILKEHPVENTQLQNEKLYLYYLQNGRDMYVDQELDINRLSDYDVDHIVPQSFLKDDSIDNKVLTRSDKARGKSDNVPSEEVVKKMKNYWRQLLNAKLITQRKFDNLTKAERGGLSELDKAGFIKRQLVETRQITKHVAQILDSRMNTKYDENDKLIREVKVITLKSKLVSDFRKDFQFYKVREINNYHHAHDAYLNAVVGTALIKKYPKLESEFVYGDYKVYDVRKMIAKSEQEIGKATAKYFFYSNIMNFFKTEITLANGEIRKRPLIETNGETGEIVWDKGRDFATVRKVLSMPQVNIVKKTEVQTGGFSKESILPKRNSDKLIARKKDWDPKKYGGFDSPTVAYSVLVVAKVEKGKSKKLKSVKELLGITIMERSSFEKNPIDFLEAKGYKEVKKDLIIKLPKYSLFELENGRKRMLASAGELQKGNELALPSKYVNFLYLASHYEKLKGSPEDNEQKQLFVEQHKHYLDEIIEQISEFSKRVILADANLDKVLSAYNKHRDKPIREQAENIIHLFTLTNLGAPAAFKYFDTTIDRKRYTSTKEVLDATLIHQSITGLYETRIDLSQLGGDGGGSSGGSGGTLNIEDEYRLHETSKEPDVSLGSTWLSDFPQAWAETGGMGLAVRQAPLIIPLKATSTPVSIKQYPMSQEARLGIKPHIQRLLDQGILVPCQSPWNTPLLPVKKPGTNDYRPVQDLREVNKRVEDIHPTVPNPYNLLSGLPPSHQWYTVLDLKDAFFCLRLHPTSQPLFAFEWRDPEMGISGQLTWTRLPQGFKNSPTLFNEALHRDLAGFRIQHPDLILLQYVDDLLLAATSELDCQQGTRALLQTLGDLGYRASAKKAQICQKQVKYLGYLLKEGQRWLTEARKETVMGQPIPKTPRQLREFLGTAGFCRLWIPGFAEMAAPLYPLTKPGTLFNWGPDQQKAFQEIKQALLTAPALGLPDLTKPFELFVDEKQGYAKGVLTQKLGPWRRPVAYLSKKLDPVAAGWPPCLRMVAAIAVLTKDAGKLTMGQPLVILAPHAVEALVKQPPDRWLSNARMTHYQALLLDTDRVQFGPVVALNPATLLPLPEEGLQHDCLDILAEAHGTRSDLMDQPLPDADHTWYTDGSSFLQEGQRKAGAAVTTETEVIWARALPAGTSAQRAELIALTQALKMAEGKKLNVYTDSRYAFATAHIHGEIYRRRGWLTSEGKEIKNKDEILALLKALFLPKRLSIIHCPGHQKGNSAEARGNRMADQAAREVATRETPETSTLLAGKRTADGSEFEKRTADGSEFESPKKKAKVE

SEQ ID NO: 6619 - protein, 2089 aa, synthetic construct
MPAAKRVKLDGGDKKYSIGLDIGTNSVGWAVITDEYKVPSKKFKVLGNTDRHSIKKNLIGALLFDSGETAEATRLKRTARRRYTRRKNRICYLQEIFSNEMAKVDDSFFHRLEESFLVEEDKKHERHPIFGNIVDEVAYHEKYPTIYHLRKKLVDSTDKADLRLIYLALAHMIKFRGHFLIEGDLNPDNSDVDKLFIQLVQTYNQLFEENPINASGVDAKAILSARLSKSRRLENLIAQLPGEKKNGLFGNLIALSLGLTPNFKSNFDLAEDAKLQLSKDTYDDDLDNLLAQIGDQYADLFLAAKNLSDAILLSDILRVNTEITKAPLSASMIKRYDEHHQDLTLLKALVRQQLPEKYKEIFFDQSKNGYAGYIDGGASQEEFYKFIKPILEKMDGTEELLVKLNREDLLRKQRTFDNGSIPHQIHLGELHAILRRQEDFYPFLKDNREKIEKILTFRIPYYVGPLARGNSRFAWMTRKSEETITPWNFEEVVDKGASAQSFIERMTNFDKNLPNEKVLPKHSLLYEYFTVYNELTKVKYVTEGMRKPAFLSGEQKKAIVDLLFKTNRKVTVKQLKEDYFKKIECFDSVEISGVEDRFNASLGTYHDLLKIIKDKDFLDNEENEDILEDIVLTLTLFEDREMIEERLKTYAHLFDDKVMKQLKRRRYTGWGRLSRKLINGIRDKQSGKTILDFLKSDGFANRNFMQLIHDDSLTFKEDIQKAQVSGQGDSLHEHIANLAGSPAIKKGILQTVKVVDELVKVMGRHKPENIVIEMARENQTTQKGQKNSRERMKRIEEGIKELGSQILKEHPVENTQLQNEKLYLYYLQNGRDMYVDQELDINRLSDYDVDHIVPQSFLKDDSIDNKVLTRSDKARGKSDNVPSEEVVKKMKNYWRQLLNAKLITQRKFDNLTKAERGGLSELDKAGFIKRQLVETRQITKHVAQILDSRMNTKYDENDKLIREVKVITLKSKLVSDFRKDFQFYKVREINNYHHAHDAYLNAVVGTALIKKYPKLESEFVYGDYKVYDVRKMIAKSEQEIGKATAKYFFYSNIMNFFKTEITLANGEIRKRPLIETNGETGEIVWDKGRDFATVRKVLSMPQVNIVKKTEVQTGGFSKESILPKRNSDKLIARKKDWDPKKYGGFDSPTVAYSVLVVAKVEKGKSKKLKSVKELLGITIMERSSFEKNPIDFLEAKGYKEVKKDLIIKLPKYSLFELENGRKRMLASAGELQKGNELALPSKYVNFLYLASHYEKLKGSPEDNEQKQLFVEQHKHYLDEIIEQISEFSKRVILADANLDKVLSAYNKHRDKPIREQAENIIHLFTLTNLGAPAAFKYFDTTIDRKRYTSTKEVLDATLIHQSITGLYETRIDLSQLGGDGGGSSGGSGGVLNLEEEYRLHEKPVPSSIDPSWLQLFPTVWAERAGMGLANQVPPVVVELRSGASPVAVRQYPMSKEAREGIRPHIQRFLDLGVLVPCQSPWNTPLLPVKKPGTNDYRPVQDLREINKRVQDIHPTVPNPYNLLSSLPPSHTWYSVLDLKDAFFCLKLHPNSQPLFAFEWRDPEKGNTGQLTWTRLPQGFKNSPTLFNEALHRDLAPFRALNPQVVLLQYVDDLLVAAPTYRDCKEGTQKLLQELSKLGYRVSAKKAQLCQKEVTYLGYLLKEGKRWLTPARKATVMKIPPPTTPRQVREFLGTAGFCRLWIPGFASLAAPLYPLTKPSIPFIWTEEHQKAFDRIKEALLSAPALALPDLTKPFTLYVDERAGVARGVLTQTLGPWRRPVAYLSKKLDPVASGWPTCLKAVAAVALLLKDADKLTLGQNVTVIASHSLESIVRQPPDRWMTNARMTHYQSLLLNERVSFAPPAVLNPATLLPVESEATPVHRCSEILAEETGTRRDLKDQPLPGVPAWYTDGSSFIAEGKRRAGAAIVDGKRTVWASSLPEGTSAQKAELVALTQALRLAEGKDINIYTDSRYAFATAHIHGAIYKQRGWLTSAGKDIKNKEEILALLEAIHLPKRVAIIHCPGHQKGNDPVATGNRRADEAAKQAALSTRVLAETTKPAGKRTADGSEFEKRTADGSEFESPKKKAKVE

SEQ ID NO: 6620 - protein, 2091 aa, synthetic construct
MPAAKRVKLDGGDKKYSIGLDIGTNSVGWAVITDEYKVPSKKFKVLGNTDRHSIKKNLIGALLFDSGETAEATRLKRTARRRYTRRKNRICYLQEIFSNEMAKVDDSFFHRLEESFLVEEDKKHERHPIFGNIVDEVAYHEKYPTIYHLRKKLVDSTDKADLRLIYLALAHMIKFRGHFLIEGDLNPDNSDVDKLFIQLVQTYNQLFEENPINASGVDAKAILSARLSKSRRLENLIAQLPGEKKNGLFGNLIALSLGLTPNFKSNFDLAEDAKLQLSKDTYDDDLDNLLAQIGDQYADLFLAAKNLSDAILLSDILRVNTEITKAPLSASMIKRYDEHHQDLTLLKALVRQQLPEKYKEIFFDQSKNGYAGYIDGGASQEEFYKFIKPILEKMDGTEELLVKLNREDLLRKQRTFDNGSIPHQIHLGELHAILRRQEDFYPFLKDNREKIEKILTFRIPYYVGPLARGNSRFAWMTRKSEETITPWNFEEVVDKGASAQSFIERMTNFDKNLPNEKVLPKHSLLYEYFTVYNELTKVKYVTEGMRKPAFLSGEQKKAIVDLLFKTNRKVTVKQLKEDYFKKIECFDSVEISGVEDRFNASLGTYHDLLKIIKDKDFLDNEENEDILEDIVLTLTLFEDREMIEERLKTYAHLFDDKVMKQLKRRRYTGWGRLSRKLINGIRDKQSGKTILDFLKSDGFANRNFMQLIHDDSLTFKEDIQKAQVSGQGDSLHEHIANLAGSPAIKKGILQTVKVVDELVKVMGRHKPENIVIEMARENQTTQKGQKNSRERMKRIEEGIKELGSQILKEHPVENTQLQNEKLYLYYLQNGRDMYVDQELDINRLSDYDVDHIVPQSFLKDDSIDNKVLTRSDKARGKSDNVPSEEVVKKMKNYWRQLLNAKLITQRKFDNLTKAERGGLSELDKAGFIKRQLVETRQITKHVAQILDSRMNTKYDENDKLIREVKVITLKSKLVSDFRKDFQFYKVREINNYHHAHDAYLNAVVGTALIKKYPKLESEFVYGDYKVYDVRKMIAKSEQEIGKATAKYFFYSNIMNFFKTEITLANGEIRKRPLIETNGETGEIVWDKGRDFATVRKVLSMPQVNIVKKTEVQTGGFSKESILPKRNSDKLIARKKDWDPKKYGGFDSPTVAYSVLVVAKVEKGKSKKLKSVKELLGITIMERSSFEKNPIDFLEAKGYKEVKKDLIIKLPKYSLFELENGRKRMLASAGELQKGNELALPSKYVNFLYLASHYEKLKGSPEDNEQKQLFVEQHKHYLDEIIEQISEFSKRVILADANLDKVLSAYNKHRDKPIREQAENIIHLFTLTNLGAPAAFKYFDTTIDRKRYTSTKEVLDATLIHQSITGLYETRIDLSQLGGDGGGSSGGSGGTLNIEDEYRLHETSKEPDVPLGSTWLSDFPQAWAETGGMGLAVRQAPLIIPLKATSTPVSIKQYPMSQEARLGIKPHIQRLLDQGILVPCQSPWNTPLLPVKKPGTNDYRPVQDLREVNKRVEDIHPTVPNPYNLLSGLPPSHQWYTVLDLKDAFFCLRLHPTSQPLFAFEWRDPEMGISGQLTWTRLPQGFKNSPTLFNEALHRDLADFRIQHPDLILLQYVDDLLLAATSEQDCQRGTRALLQTLGNLGYRASAKKAQICQKQVKYLGYLLKEGQRWLTEARKETVMGQPTPKTPRQLREFLGTAGFCRLWIPGFAEMAAPLYPLTKPGTLFNWGPDQQKAYQEIKQALLTAPALGLPDLTKPFELFVDEKQGYAKGVLTQKLGPWRRPVAYLSKKLDPVAAGWPPCLRMVAAIAVLTKDAGKLTMGQPLVILAPHAVEALVKQPPDRWLSNARMTHYQAMLLDTDRVQFGPVVALNPATLLPLPEKEAPHDCLEILAETHGTRPDLTDQPIPDADYTWYTDGSSFLQEGQRRAGAAVTTETEVIWARALPAGTSAQRAELIALTQALKMAEGKKLNVYTDSRYAFATAHVHGEIYRRRGWLTSEGREIKNKNEILALLKALFLPKRLSIIHCPGHQKGNSAEARGNRMADQAAREAAMKAVLETSTLLAGKRTADGSEFEKRTADGSEFESPKKKAKVE

SEQ ID NO: 6621 - protein, 2095 aa, synthetic construct
MPAAKRVKLDGGDKKYSIGLDIGTNSVGWAVITDEYKVPSKKFKVLGNTDRHSIKKNLIGALLFDSGETAEATRLKRTARRRYTRRKNRICYLQEIFSNEMAKVDDSFFHRLEESFLVEEDKKHERHPIFGNIVDEVAYHEKYPTIYHLRKKLVDSTDKADLRLIYLALAHMIKFRGHFLIEGDLNPDNSDVDKLFIQLVQTYNQLFEENPINASGVDAKAILSARLSKSRRLENLIAQLPGEKKNGLFGNLIALSLGLTPNFKSNFDLAEDAKLQLSKDTYDDDLDNLLAQIGDQYADLFLAAKNLSDAILLSDILRVNTEITKAPLSASMIKRYDEHHQDLTLLKALVRQQLPEKYKEIFFDQSKNGYAGYIDGGASQEEFYKFIKPILEKMDGTEELLVKLNREDLLRKQRTFDNGSIPHQIHLGELHAILRRQEDFYPFLKDNREKIEKILTFRIPYYVGPLARGNSRFAWMTRKSEETITPWNFEEVVDKGASAQSFIERMTNFDKNLPNEKVLPKHSLLYEYFTVYNELTKVKYVTEGMRKPAFLSGEQKKAIVDLLFKTNRKVTVKQLKEDYFKKIECFDSVEISGVEDRFNASLGTYHDLLKIIKDKDFLDNEENEDILEDIVLTLTLFEDREMIEERLKTYAHLFDDKVMKQLKRRRYTGWGRLSRKLINGIRDKQSGKTILDFLKSDGFANRNFMQLIHDDSLTFKEDIQKAQVSGQGDSLHEHIANLAGSPAIKKGILQTVKVVDELVKVMGRHKPENIVIEMARENQTTQKGQKNSRERMKRIEEGIKELGSQILKEHPVENTQLQNEKLYLYYLQNGRDMYVDQELDINRLSDYDVDHIVPQSFLKDDSIDNKVLTRSDKARGKSDNVPSEEVVKKMKNYWRQLLNAKLITQRKFDNLTKAERGGLSELDKAGFIKRQLVETRQITKHVAQILDSRMNTKYDENDKLIREVKVITLKSKLVSDFRKDFQFYKVREINNYHHAHDAYLNAVVGTALIKKYPKLESEFVYGDYKVYDVRKMIAKSEQEIGKATAKYFFYSNIMNFFKTEITLANGEIRKRPLIETNGETGEIVWDKGRDFATVRKVLSMPQVNIVKKTEVQTGGFSKESILPKRNSDKLIARKKDWDPKKYGGFDSPTVAYSVLVVAKVEKGKSKKLKSVKELLGITIMERSSFEKNPIDFLEAKGYKEVKKDLIIKLPKYSLFELENGRKRMLASAGELQKGNELALPSKYVNFLYLASHYEKLKGSPEDNEQKQLFVEQHKHYLDEIIEQISEFSKRVILADANLDKVLSAYNKHRDKPIREQAENIIHLFTLTNLGAPAAFKYFDTTIDRKRYTSTKEVLDATLIHQSITGLYETRIDLSQLGGDGGGGSEAAAKGGTAPLEEEYRLFLEAPIQNVTLLEQWKREIPKVWAEINPPGLASTQAPIHVQLLSTALPVRVRQYPITLEAKRSLRETIRKFRAAGILRPVHSPWNTPLLPVRKSGTSEYRMVQDLREVNKRVETIHPTVPNPYTLLSLLPPDRIWYSVLDLKDAFFCIPLAPESQLIFAFEWADAEEGESGQLTWTRLPQGFKNSPTLFNEALNRDLQGFRLDHPSVSLLQYVDDLLIAADTQAACLSATRDLLMTLAELGYRVSGKKAQLCQEEVTYLGFKIHKGSRSLSNSRTQAILQIPVPKTKRQVREFLGTIGYCRLWIPGFAELAQPLYAATRPGNDPLVWGEKEEEAFQSLKLALTQPPALALPSLDKPFQLFVEETSGAAKGVLTQALGPWKRPVAYLSKRLDPVAAGWPRCLRAIAAAALLTREASKLTFGQDIEITSSHNLESLLRSPPDKWLTNARITQYQVLLLDPPRVRFKQTAALNPATLLPETDDTLPIHHCLDTLDSLTSTRPDLTDQPLAQAEATLFTDGSSYIRDGKRYAGAAVVTLDSVIWAEPLPIGTSAQKAELIALTKALEWSKDKSVNIYTDSRYAFATLHVHGMIYRERGWLTAGGKAIKNAPEILALLTAVWLPKRVAVMHCKGHQKDDAPTSTGNRRADEVAREVAIRPLSTQATISAGKRTADGSEFEKRTADGSEFESPKKKAKVE

SEQ ID NO: 6622 - protein, 2095 aa, synthetic construct
MPAAKRVKLDGGDKKYSIGLDIGTNSVGWAVITDEYKVPSKKFKVLGNTDRHSIKKNLIGALLFDSGETAEATRLKRTARRRYTRRKNRICYLQEIFSNEMAKVDDSFFHRLEESFLVEEDKKHERHPIFGNIVDEVAYHEKYPTIYHLRKKLVDSTDKADLRLIYLALAHMIKFRGHFLIEGDLNPDNSDVDKLFIQLVQTYNQLFEENPINASGVDAKAILSARLSKSRRLENLIAQLPGEKKNGLFGNLIALSLGLTPNFKSNFDLAEDAKLQLSKDTYDDDLDNLLAQIGDQYADLFLAAKNLSDAILLSDILRVNTEITKAPLSASMIKRYDEHHQDLTLLKALVRQQLPEKYKEIFFDQSKNGYAGYIDGGASQEEFYKFIKPILEKMDGTEELLVKLNREDLLRKQRTFDNGSIPHQIHLGELHAILRRQEDFYPFLKDNREKIEKILTFRIPYYVGPLARGNSRFAWMTRKSEETITPWNFEEVVDKGASAQSFIERMTNFDKNLPNEKVLPKHSLLYEYFTVYNELTKVKYVTEGMRKPAFLSGEQKKAIVDLLFKTNRKVTVKQLKEDYFKKIECFDSVEISGVEDRFNASLGTYHDLLKIIKDKDFLDNEENEDILEDIVLTLTLFEDREMIEERLKTYAHLFDDKVMKQLKRRRYTGWGRLSRKLINGIRDKQSGKTILDFLKSDGFANRNFMQLIHDDSLTFKEDIQKAQVSGQGDSLHEHIANLAGSPAIKKGILQTVKVVDELVKVMGRHKPENIVIEMARENQTTQKGQKNSRERMKRIEEGIKELGSQILKEHPVENTQLQNEKLYLYYLQNGRDMYVDQELDINRLSDYDVDHIVPQSFLKDDSIDNKVLTRSDKARGKSDNVPSEEVVKKMKNYWRQLLNAKLITQRKFDNLTKAERGGLSELDKAGFIKRQLVETRQITKHVAQILDSRMNTKYDENDKLIREVKVITLKSKLVSDFRKDFQFYKVREINNYHHAHDAYLNAVVGTALIKKYPKLESEFVYGDYKVYDVRKMIAKSEQEIGKATAKYFFYSNIMNFFKTEITLANGEIRKRPLIETNGETGEIVWDKGRDFATVRKVLSMPQVNIVKKTEVQTGGFSKESILPKRNSDKLIARKKDWDPKKYGGFDSPTVAYSVLVVAKVEKGKSKKLKSVKELLGITIMERSSFEKNPIDFLEAKGYKEVKKDLIIKLPKYSLFELENGRKRMLASAGELQKGNELALPSKYVNFLYLASHYEKLKGSPEDNEQKQLFVEQHKHYLDEIIEQISEFSKRVILADANLDKVLSAYNKHRDKPIREQAENIIHLFTLTNLGAPAAFKYFDTTIDRKRYTSTKEVLDATLIHQSITGLYETRIDLSQLGGDGGGGSEAAAKGGTAPLEEEYRLFLEAPIQNVTLLEQWKREIPKVWAEINPPGLASTQAPIHVQLLSTALPVRVRQYPITLEAKRSLRETIRKFRAAGILRPVHSPWNTPLLPVRKSGTSEYRMVQDLREVNKRVETIHPTVPNPYTLLSLLPPDRIWYSVLDLKDAFFCIPLAPESQLIFAFEWADAEEGESGQLTWTRLPQGFKNSPTLFNEALNRDLQGFRLDHPSVSLLQYVDDLLIAADTQAACLSATRDLLMTLAELGYRVSGKKAQLCQEEVTYLGFKIHKGSRSLSNSRTQAILQIPVPKTKRQVREFLGKIGYCRLFIPGFAELAQPLYAATRPGNDPLVWGEKEEEAFQSLKLALTQPPALALPSLDKPFQLFVEETSGAAKGVLTQALGPWKRPVAYLSKRLDPVAAGWPRCLRAIAAAALLTREASKLTFGQDIEITSSHNLESLLRSPPDKWLTNARITQYQVLLLDPPRVRFKQTAALNPATLLPETDDTLPIHHCLDTLDSLTSTRPDLTDQPLAQAEATLFTDGSSYIRDGKRYAGAAVVTLDSVIWAEPLPIGTSAQKAELIALTKALEWSKDKSVNIYTDSRYAFATLHVHGMIYRERGWLTAGGKAIKNAPEILALLTAVWLPKRVAVMHCKGHQKDDAPTSTGNRRADEVAREVAIRPLSTQATISAGKRTADGSEFEKRTADGSEFESPKKKAKVE

SEQ ID NO: 6623 - protein, 2092 aa, synthetic construct
MPAAKRVKLDGGDKKYSIGLDIGTNSVGWAVITDEYKVPSKKFKVLGNTDRHSIKKNLIGALLFDSGETAEATRLKRTARRRYTRRKNRICYLQEIFSNEMAKVDDSFFHRLEESFLVEEDKKHERHPIFGNIVDEVAYHEKYPTIYHLRKKLVDSTDKADLRLIYLALAHMIKFRGHFLIEGDLNPDNSDVDKLFIQLVQTYNQLFEENPINASGVDAKAILSARLSKSRRLENLIAQLPGEKKNGLFGNLIALSLGLTPNFKSNFDLAEDAKLQLSKDTYDDDLDNLLAQIGDQYADLFLAAKNLSDAILLSDILRVNTEITKAPLSASMIKRYDEHHQDLTLLKALVRQQLPEKYKEIFFDQSKNGYAGYIDGGASQEEFYKFIKPILEKMDGTEELLVKLNREDLLRKQRTFDNGSIPHQIHLGELHAILRRQEDFYPFLKDNREKIEKILTFRIPYYVGPLARGNSRFAWMTRKSEETITPWNFEEVVDKGASAQSFIERMTNFDKNLPNEKVLPKHSLLYEYFTVYNELTKVKYVTEGMRKPAFLSGEQKKAIVDLLFKTNRKVTVKQLKEDYFKKIECFDSVEISGVEDRFNASLGTYHDLLKIIKDKDFLDNEENEDILEDIVLTLTLFEDREMIEERLKTYAHLFDDKVMKQLKRRRYTGWGRLSRKLINGIRDKQSGKTILDFLKSDGFANRNFMQLIHDDSLTFKEDIQKAQVSGQGDSLHEHIANLAGSPAIKKGILQTVKVVDELVKVMGRHKPENIVIEMARENQTTQKGQKNSRERMKRIEEGIKELGSQILKEHPVENTQLQNEKLYLYYLQNGRDMYVDQELDINRLSDYDVDHIVPQSFLKDDSIDNKVLTRSDKARGKSDNVPSEEVVKKMKNYWRQLLNAKLITQRKFDNLTKAERGGLSELDKAGFIKRQLVETRQITKHVAQILDSRMNTKYDENDKLIREVKVITLKSKLVSDFRKDFQFYKVREINNYHHAHDAYLNAVVGTALIKKYPKLESEFVYGDYKVYDVRKMIAKSEQEIGKATAKYFFYSNIMNFFKTEITLANGEIRKRPLIETNGETGEIVWDKGRDFATVRKVLSMPQVNIVKKTEVQTGGFSKESILPKRNSDKLIARKKDWDPKKYGGFDSPTVAYSVLVVAKVEKGKSKKLKSVKELLGITIMERSSFEKNPIDFLEAKGYKEVKKDLIIKLPKYSLFELENGRKRMLASAGELQKGNELALPSKYVNFLYLASHYEKLKGSPEDNEQKQLFVEQHKHYLDEIIEQISEFSKRVILADANLDKVLSAYNKHRDKPIREQAENIIHLFTLTNLGAPAAFKYFDTTIDRKRYTSTKEVLDATLIHQSITGLYETRIDLSQLGGDGGGGSEAAAKGGTLQLEEEYRLFEPESTQKQEMDIWLKNFPQAWAETGGMGTAHCQAPVLIQLKATATPISIRQYPMPHEAYQGIKPHIRRMLDQGILKPCQSPWNTPLLPVKKPGTEDYRPVQDLREVNKRVEDIHPTVPNPYNLLSTLPPSHPWYTVLDLKDAFFCLRLHSESQLLFAFEWRDPEIGLSGQLTWTRLPQGFKNSPTLFNEALHSDLADFRVRYPALVLLQYVDDLLLAAATRTECLEGTKALLETLGNKGYRASAKKAQICLQEVTYLGYSLKDGQRWLTKARKEAILSIPVPKNSRQVREFLGTAGYCRLWIPGFAELAAPLYPLTRPGTLFQWGTEQQLAFEDIKKALLSSPALGLPDITKPFELFIDENSGFAKGVLVQKLGPWKRPVAYLSKKLDTVASGWPPCLRMVAAIAILVKDAGKLTLGQPLTILTSHPVEALVRQPPNKWLSNARMTHYQAMLLDAERVHFGPTVSLNPATLLPLPSGGNHHDCLQILAETHGTRPDLTDQPLPDADLTWYTDGSSFIRNGEREAGAAVTTESEVIWAAPLPPGTSAQRAELIALTQALKMAEGKKLTVYTDSRYAFATTHVHGEIYRRRGWLTSEGKEIKNKNEILALLEALFLPKRLSIIHCPGHQKGDSPQAKGNRLADDTAKKAATETHSSLTVLPAGKRTADGSEFEKRTADGSEFESPKKKAKVE

SEQ ID NO: 6624 - protein, 2124 aa, synthetic construct
MPAAKRVKLDGGDKKYSIGLDIGTNSVGWAVITDEYKVPSKKFKVLGNTDRHSIKKNLIGALLFDSGETAEATRLKRTARRRYTRRKNRICYLQEIFSNEMAKVDDSFFHRLEESFLVEEDKKHERHPIFGNIVDEVAYHEKYPTIYHLRKKLVDSTDKADLRLIYLALAHMIKFRGHFLIEGDLNPDNSDVDKLFIQLVQTYNQLFEENPINASGVDAKAILSARLSKSRRLENLIAQLPGEKKNGLFGNLIALSLGLTPNFKSNFDLAEDAKLQLSKDTYDDDLDNLLAQIGDQYADLFLAAKNLSDAILLSDILRVNTEITKAPLSASMIKRYDEHHQDLTLLKALVRQQLPEKYKEIFFDQSKNGYAGYIDGGASQEEFYKFIKPILEKMDGTEELLVKLNREDLLRKQRTFDNGSIPHQIHLGELHAILRRQEDFYPFLKDNREKIEKILTFRIPYYVGPLARGNSRFAWMTRKSEETITPWNFEEVVDKGASAQSFIERMTNFDKNLPNEKVLPKHSLLYEYFTVYNELTKVKYVTEGMRKPAFLSGEQKKAIVDLLFKTNRKVTVKQLKEDYFKKIECFDSVEISGVEDRFNASLGTYHDLLKIIKDKDFLDNEENEDILEDIVLTLTLFEDREMIEERLKTYAHLFDDKVMKQLKRRRYTGWGRLSRKLINGIRDKQSGKTILDFLKSDGFANRNFMQLIHDDSLTFKEDIQKAQVSGQGDSLHEHIANLAGSPAIKKGILQTVKVVDELVKVMGRHKPENIVIEMARENQTTQKGQKNSRERMKRIEEGIKELGSQILKEHPVENTQLQNEKLYLYYLQNGRDMYVDQELDINRLSDYDVDHIVPQSFLKDDSIDNKVLTRSDKARGKSDNVPSEEVVKKMKNYWRQLLNAKLITQRKFDNLTKAERGGLSELDKAGFIKRQLVETRQITKHVAQILDSRMNTKYDENDKLIREVKVITLKSKLVSDFRKDFQFYKVREINNYHHAHDAYLNAVVGTALIKKYPKLESEFVYGDYKVYDVRKMIAKSEQEIGKATAKYFFYSNIMNFFKTEITLANGEIRKRPLIETNGETGEIVWDKGRDFATVRKVLSMPQVNIVKKTEVQTGGFSKESILPKRNSDKLIARKKDWDPKKYGGFDSPTVAYSVLVVAKVEKGKSKKLKSVKELLGITIMERSSFEKNPIDFLEAKGYKEVKKDLIIKLPKYSLFELENGRKRMLASAGELQKGNELALPSKYVNFLYLASHYEKLKGSPEDNEQKQLFVEQHKHYLDEIIEQISEFSKRVILADANLDKVLSAYNKHRDKPIREQAENIIHLFTLTNLGAPAAFKYFDTTIDRKRYTSTKEVLDATLIHQSITGLYETRIDLSQLGGDGGGGSEAAAKGGLLGRDLLTKLKAQIQFSTEGPQVTWEDRPAMCLVLNLEEEYRLHEKPVPPSIDPSWLQLFPMVWAEKAGMGLANQVPPVVVELKSDASPVAVRQYPMSKEAREGIRPHIQRFLDLGILVPCQSPWNTPLLPVKKPGTNDYRPVQDLREVNKRVQDIHPTVPNPYNLLSSLPPSHTWYSVLDLKDAFFCLKLHPNSQPLFAFEWRDPEKGNTGQLTWTRLPQGFKNSPTLFNEALHRDLASFRALNPQVVMLQYVDDLLVAAPTYRDCKEGTRRLLQELSKLGYRVSAKKAQLCREEVTYLGYLLKGGKRWLTPARKATVMKIPTPTTPRQVREFLGTAGFCRLWIPGFASLAAPLYPLTRPKVPFTWTEAHQEAFGRIKEALLSAPALALPDLTKPFALYVDEKEGVARGVLTQTLGPWRRPVAYLSKKLDPVASGWPTCLKAIAAVALLLKDADKLTLGQNVLVIAPHNLESIVRQPPDRWMTNARMTHYQSLLLNERVSFAPPAILNPATLLPVESDDTPIHICSEILAEETGTRPDLRDQPLPGVPAWYTDGSSFIMDGRRQAGAAIVDNKRTVWASNLPEGTSAQKAELIALTQALRLAEGKSINIYTDSRYAFATAHVHGAIYKQRGWLTSAGKDIKNKEEILALLEAIHLPKRVAIIHCPGHQRGTDPVATGNRKADEAAKQAAQSTRILTETTKNAGKRTADGSEFEKRTADGSEFESPKKKAKVE

SEQ ID NO: 6625 - protein, 2215 aa, synthetic construct
MPAAKRVKLDGGDKKYSIGLDIGTNSVGWAVITDEYKVPSKKFKVLGNTDRHSIKKNLIGALLFDSGETAEATRLKRTARRRYTRRKNRICYLQEIFSNEMAKVDDSFFHRLEESFLVEEDKKHERHPIFGNIVDEVAYHEKYPTIYHLRKKLVDSTDKADLRLIYLALAHMIKFRGHFLIEGDLNPDNSDVDKLFIQLVQTYNQLFEENPINASGVDAKAILSARLSKSRRLENLIAQLPGEKKNGLFGNLIALSLGLTPNFKSNFDLAEDAKLQLSKDTYDDDLDNLLAQIGDQYADLFLAAKNLSDAILLSDILRVNTEITKAPLSASMIKRYDEHHQDLTLLKALVRQQLPEKYKEIFFDQSKNGYAGYIDGGASQEEFYKFIKPILEKMDGTEELLVKLNREDLLRKQRTFDNGSIPHQIHLGELHAILRRQEDFYPFLKDNREKIEKILTFRIPYYVGPLARGNSRFAWMTRKSEETITPWNFEEVVDKGASAQSFIERMTNFDKNLPNEKVLPKHSLLYEYFTVYNELTKVKYVTEGMRKPAFLSGEQKKAIVDLLFKTNRKVTVKQLKEDYFKKIECFDSVEISGVEDRFNASLGTYHDLLKIIKDKDFLDNEENEDILEDIVLTLTLFEDREMIEERLKTYAHLFDDKVMKQLKRRRYTGWGRLSRKLINGIRDKQSGKTILDFLKSDGFANRNFMQLIHDDSLTFKEDIQKAQVSGQGDSLHEHIANLAGSPAIKKGILQTVKVVDELVKVMGRHKPENIVIEMARENQTTQKGQKNSRERMKRIEEGIKELGSQILKEHPVENTQLQNEKLYLYYLQNGRDMYVDQELDINRLSDYDVDHIVPQSFLKDDSIDNKVLTRSDKARGKSDNVPSEEVVKKMKNYWRQLLNAKLITQRKFDNLTKAERGGLSELDKAGFIKRQLVETRQITKHVAQILDSRMNTKYDENDKLIREVKVITLKSKLVSDFRKDFQFYKVREINNYHHAHDAYLNAVVGTALIKKYPKLESEFVYGDYKVYDVRKMIAKSEQEIGKATAKYFFYSNIMNFFKTEITLANGEIRKRPLIETNGETGEIVWDKGRDFATVRKVLSMPQVNIVKKTEVQTGGFSKESILPKRNSDKLIARKKDWDPKKYGGFDSPTVAYSVLVVAKVEKGKSKKLKSVKELLGITIMERSSFEKNPIDFLEAKGYKEVKKDLIIKLPKYSLFELENGRKRMLASAGELQKGNELALPSKYVNFLYLASHYEKLKGSPEDNEQKQLFVEQHKHYLDEIIEQISEFSKRVILADANLDKVLSAYNKHRDKPIREQAENIIHLFTLTNLGAPAAFKYFDTTIDRKRYTSTKEVLDATLIHQSITGLYETRIDLSQLGGDGGGGSEAAAKGGTLGDQGSRGSDPLPEPRVTLTVEGIPTEFLVNTGAEHSVLTKPMGKMGSKRTVVAGATGSKVYPWTTKRLLKIGQKQVTHSFLVIPECPAPLLGRDLLTKLKAQIQFSTEGPQVTWEDRPAMCLVLNLEEEYRLHEKPVPPSIDPSWLQLFPMVWAEKAGMGLANQVPPVVVELKSDASPVAVRQYPMSKEAREGIRPHIQRFLDLGILVPCQSPWNTPLLPVKKPGTNDYRPVQDLREVNKRVQDIHPTVPNPYNLLSSLPPSHTWYSVLDLKDAFFCLKLHPNSQPLFAFEWRDPEKGNTGQLTWTRLPQGFKNSPTLFNEALHRDLASFRALNPQVVMLQYVDDLLVAAPTYRDCKEGTRRLLQELSKLGYRVSAKKAQLCREEVTYLGYLLKGGKRWLTPARKATVMKIPTPTTPRQVREFLGTAGFCRLWIPGFASLAAPLYPLTRPKVPFTWTEAHQEAFGRIKEALLSAPALALPDLTKPFALYVDEKEGVARGVLTQTLGPWRRPVAYLSKKLDPVASGWPTCLKAIAAVALLLKDADKLTLGQNVLVIAPHNLESIVRQPPDRWMTNARMTHYQSLLLNERVSFAPPAILNPATLLPVESDDTPIHICSEILAEETGTRPDLRDQPLPGVPAWYTDGSSFIMDGRRQAGAAIVDNKRTVWASNLPEGTSAQKAELIALTQALRLAEGKSINIYTDSRYAFATAHVHGAIYKQRGWLTSAGKDIKNKEEILALLEAIHLPKRVAIIHCPGHQRGTDPVATGNRKADEAAKQAAQSTRILTETTKNAGKRTADGSEFEKRTADGSEFESPKKKAKVE

SEQ ID NO: 6626 - protein, 2093 aa, synthetic construct
MPAAKRVKLDGGDKKYSIGLDIGTNSVGWAVITDEYKVPSKKFKVLGNTDRHSIKKNLIGALLFDSGETAEATRLKRTARRRYTRRKNRICYLQEIFSNEMAKVDDSFFHRLEESFLVEEDKKHERHPIFGNIVDEVAYHEKYPTIYHLRKKLVDSTDKADLRLIYLALAHMIKFRGHFLIEGDLNPDNSDVDKLFIQLVQTYNQLFEENPINASGVDAKAILSARLSKSRRLENLIAQLPGEKKNGLFGNLIALSLGLTPNFKSNFDLAEDAKLQLSKDTYDDDLDNLLAQIGDQYADLFLAAKNLSDAILLSDILRVNTEITKAPLSASMIKRYDEHHQDLTLLKALVRQQLPEKYKEIFFDQSKNGYAGYIDGGASQEEFYKFIKPILEKMDGTEELLVKLNREDLLRKQRTFDNGSIPHQIHLGELHAILRRQEDFYPFLKDNREKIEKILTFRIPYYVGPLARGNSRFAWMTRKSEETITPWNFEEVVDKGASAQSFIERMTNFDKNLPNEKVLPKHSLLYEYFTVYNELTKVKYVTEGMRKPAFLSGEQKKAIVDLLFKTNRKVTVKQLKEDYFKKIECFDSVEISGVEDRFNASLGTYHDLLKIIKDKDFLDNEENEDILEDIVLTLTLFEDREMIEERLKTYAHLFDDKVMKQLKRRRYTGWGRLSRKLINGIRDKQSGKTILDFLKSDGFANRNFMQLIHDDSLTFKEDIQKAQVSGQGDSLHEHIANLAGSPAIKKGILQTVKVVDELVKVMGRHKPENIVIEMARENQTTQKGQKNSRERMKRIEEGIKELGSQILKEHPVENTQLQNEKLYLYYLQNGRDMYVDQELDINRLSDYDVDHIVPQSFLKDDSIDNKVLTRSDKARGKSDNVPSEEVVKKMKNYWRQLLNAKLITQRKFDNLTKAERGGLSELDKAGFIKRQLVETRQITKHVAQILDSRMNTKYDENDKLIREVKVITLKSKLVSDFRKDFQFYKVREINNYHHAHDAYLNAVVGTALIKKYPKLESEFVYGDYKVYDVRKMIAKSEQEIGKATAKYFFYSNIMNFFKTEITLANGEIRKRPLIETNGETGEIVWDKGRDFATVRKVLSMPQVNIVKKTEVQTGGFSKESILPKRNSDKLIARKKDWDPKKYGGFDSPTVAYSVLVVAKVEKGKSKKLKSVKELLGITIMERSSFEKNPIDFLEAKGYKEVKKDLIIKLPKYSLFELENGRKRMLASAGELQKGNELALPSKYVNFLYLASHYEKLKGSPEDNEQKQLFVEQHKHYLDEIIEQISEFSKRVILADANLDKVLSAYNKHRDKPIREQAENIIHLFTLTNLGAPAAFKYFDTTIDRKRYTSTKEVLDATLIHQSITGLYETRIDLSQLGGDGGGGSEAAAKGGTLNIEDEYRLHETSKEPDVSLGSTWLSDFPQAWAETGGMGLAVRQAPLIIPLKATSTPVSIKQYPMSQEARLGIKPHIQRLLDQGILVPCQSPWNTPLLPVKKPGTNDYRPVQDLREVNKRVEDIHPTVPNPYNLLSGLPPSHQWYTVLDLKDAFFCLRLHPTSQPLFAFEWRDPEMGISGQLTWTRLPQGFKNSPTLFNEALHRDLAGFRIQHPDLILLQYVDDLLLAATSELDCQQGTRALLQTLGDLGYRASAKKAQICQKQVKYLGYLLKEGQRWLTEARKETVMGQPIPKTPRQLREFLGTAGFCRLWIPGFAEMAAPLYPLTKPGTLFNWGPDQQKAFQEIKQALLTAPALGLPDLTKPFELFVDEKQGYAKGVLTQKLGPWRRPVAYLSKKLDPVAAGWPPCLRMVAAIAVLTKDAGKLTMGQPLVILAPHAVEALVKQPPDRWLSNARMTHYQALLLDTDRVQFGPVVALNPATLLPLPEEGLQHDCLDILAEAHGTRSDLMDQPLPDADHTWYTDGSSFLQEGQRKAGAAVTTETEVIWARALPAGTSAQRAELIALTQALKMAEGKKLNVYTDSRYAFATAHIHGEIYRRRGWLTSEGKEIKNKDEILALLKALFLPKRLSIIHCPGHQKGNSAEARGNRMADQAAREVATRETPETSTLLAGKRTADGSEFEKRTADGSEFESPKKKAKVE

SEQ ID NO: 6627 - protein, 2093 aa, synthetic construct
MPAAKRVKLDGGDKKYSIGLDIGTNSVGWAVITDEYKVPSKKFKVLGNTDRHSIKKNLIGALLFDSGETAEATRLKRTARRRYTRRKNRICYLQEIFSNEMAKVDDSFFHRLEESFLVEEDKKHERHPIFGNIVDEVAYHEKYPTIYHLRKKLVDSTDKADLRLIYLALAHMIKFRGHFLIEGDLNPDNSDVDKLFIQLVQTYNQLFEENPINASGVDAKAILSARLSKSRRLENLIAQLPGEKKNGLFGNLIALSLGLTPNFKSNFDLAEDAKLQLSKDTYDDDLDNLLAQIGDQYADLFLAAKNLSDAILLSDILRVNTEITKAPLSASMIKRYDEHHQDLTLLKALVRQQLPEKYKEIFFDQSKNGYAGYIDGGASQEEFYKFIKPILEKMDGTEELLVKLNREDLLRKQRTFDNGSIPHQIHLGELHAILRRQEDFYPFLKDNREKIEKILTFRIPYYVGPLARGNSRFAWMTRKSEETITPWNFEEVVDKGASAQSFIERMTNFDKNLPNEKVLPKHSLLYEYFTVYNELTKVKYVTEGMRKPAFLSGEQKKAIVDLLFKTNRKVTVKQLKEDYFKKIECFDSVEISGVEDRFNASLGTYHDLLKIIKDKDFLDNEENEDILEDIVLTLTLFEDREMIEERLKTYAHLFDDKVMKQLKRRRYTGWGRLSRKLINGIRDKQSGKTILDFLKSDGFANRNFMQLIHDDSLTFKEDIQKAQVSGQGDSLHEHIANLAGSPAIKKGILQTVKVVDELVKVMGRHKPENIVIEMARENQTTQKGQKNSRERMKRIEEGIKELGSQILKEHPVENTQLQNEKLYLYYLQNGRDMYVDQELDINRLSDYDVDHIVPQSFLKDDSIDNKVLTRSDKARGKSDNVPSEEVVKKMKNYWRQLLNAKLITQRKFDNLTKAERGGLSELDKAGFIKRQLVETRQITKHVAQILDSRMNTKYDENDKLIREVKVITLKSKLVSDFRKDFQFYKVREINNYHHAHDAYLNAVVGTALIKKYPKLESEFVYGDYKVYDVRKMIAKSEQEIGKATAKYFFYSNIMNFFKTEITLANGEIRKRPLIETNGETGEIVWDKGRDFATVRKVLSMPQVNIVKKTEVQTGGFSKESILPKRNSDKLIARKKDWDPKKYGGFDSPTVAYSVLVVAKVEKGKSKKLKSVKELLGITIMERSSFEKNPIDFLEAKGYKEVKKDLIIKLPKYSLFELENGRKRMLASAGELQKGNELALPSKYVNFLYLASHYEKLKGSPEDNEQKQLFVEQHKHYLDEIIEQISEFSKRVILADANLDKVLSAYNKHRDKPIREQAENIIHLFTLTNLGAPAAFKYFDTTIDRKRYTSTKEVLDATLIHQSITGLYETRIDLSQLGGDGGGGSEAAAKGGTLNIEDEYRLHETSKGPDVPLGSTWLSDFPQAWAETGGMGLAVRQAPLIIPLKATSTPVSIKQYPMSQEARLGIKPHIQRLLDQGILVPCQSPWNTPLLPVKKPGTNDYRPVQDLREVNKRVEDIHPTVPNPYNLLSGLPPSHQWYTVLDLKDAFFCLRLHPTSQSLFAFEWRDPEMGISGQLTWTRLPQGFKNSPTLFNEALHRDLADFRIQHPDLILLQYVDDLLLAATSELDCQQGTRALLQTLGDLGYRASAKKAQICQKQVKYLGYLLKEGQRWLTEARKETVMGQPTPKTPRQLREFLGTAGFCRLWIPGFAEMAAPLYPLTKPGTLFEWGPDQQKAYQEIKQALLTAPALGLPDLTKPFELFVDEKQGYAKGVLTQKLGPWRRPVAYLSKKLDPVAAGWPPCLRMVAAIAVLTKDAGKLTMGQPLVILAPHAVEALVKQPPDRWLSNARMTHYQALLLDTDRVQFGPIVALNPATLLPLPEEGLQHDCLDILAEAHGTRPDLTDQPLPDADHTWYTDGSSFLQEGQRKAGAAVTTETEVVWAKALPAGTSAQRAELIALTQALKMAEGKKLNVYTDSRYAFATAHIHGEIYRRRGWLTSEGKEIKNKDEILALLKALFLPKRLSIIHCPGHQKGNRAEARGNRMADQAAREVATRETPETSTLLAGKRTADGSEFEKRTADGSEFESPKKKAKVE

SEQ ID NO: 6628 - protein, 2084 aa, synthetic construct
MPAAKRVKLDGGDKKYSIGLDIGTNSVGWAVITDEYKVPSKKFKVLGNTDRHSIKKNLIGALLFDSGETAEATRLKRTARRRYTRRKNRICYLQEIFSNEMAKVDDSFFHRLEESFLVEEDKKHERHPIFGNIVDEVAYHEKYPTIYHLRKKLVDSTDKADLRLIYLALAHMIKFRGHFLIEGDLNPDNSDVDKLFIQLVQTYNQLFEENPINASGVDAKAILSARLSKSRRLENLIAQLPGEKKNGLFGNLIALSLGLTPNFKSNFDLAEDAKLQLSKDTYDDDLDNLLAQIGDQYADLFLAAKNLSDAILLSDILRVNTEITKAPLSASMIKRYDEHHQDLTLLKALVRQQLPEKYKEIFFDQSKNGYAGYIDGGASQEEFYKFIKPILEKMDGTEELLVKLNREDLLRKQRTFDNGSIPHQIHLGELHAILRRQEDFYPFLKDNREKIEKILTFRIPYYVGPLARGNSRFAWMTRKSEETITPWNFEEVVDKGASAQSFIERMTNFDKNLPNEKVLPKHSLLYEYFTVYNELTKVKYVTEGMRKPAFLSGEQKKAIVDLLFKTNRKVTVKQLKEDYFKKIECFDSVEISGVEDRFNASLGTYHDLLKIIKDKDFLDNEENEDILEDIVLTLTLFEDREMIEERLKTYAHLFDDKVMKQLKRRRYTGWGRLSRKLINGIRDKQSGKTILDFLKSDGFANRNFMQLIHDDSLTFKEDIQKAQVSGQGDSLHEHIANLAGSPAIKKGILQTVKVVDELVKVMGRHKPENIVIEMARENQTTQKGQKNSRERMKRIEEGIKELGSQILKEHPVENTQLQNEKLYLYYLQNGRDMYVDQELDINRLSDYDVDHIVPQSFLKDDSIDNKVLTRSDKARGKSDNVPSEEVVKKMKNYWRQLLNAKLITQRKFDNLTKAERGGLSELDKAGFIKRQLVETRQITKHVAQILDSRMNTKYDENDKLIREVKVITLKSKLVSDFRKDFQFYKVREINNYHHAHDAYLNAVVGTALIKKYPKLESEFVYGDYKVYDVRKMIAKSEQEIGKATAKYFFYSNIMNFFKTEITLANGEIRKRPLIETNGETGEIVWDKGRDFATVRKVLSMPQVNIVKKTEVQTGGFSKESILPKRNSDKLIARKKDWDPKKYGGFDSPTVAYSVLVVAKVEKGKSKKLKSVKELLGITIMERSSFEKNPIDFLEAKGYKEVKKDLIIKLPKYSLFELENGRKRMLASAGELQKGNELALPSKYVNFLYLASHYEKLKGSPEDNEQKQLFVEQHKHYLDEIIEQISEFSKRVILADANLDKVLSAYNKHRDKPIREQAENIIHLFTLTNLGAPAAFKYFDTTIDRKRYTSTKEVLDATLIHQSITGLYETRIDLSQLGGDGGGGSEAAAKGGIPWLMKKPLQLTTLVPLQEYEERLLKQTMLTGSYKEKLQSLFLKYDALWQHWENQVGHRRIKPHHIATGTVNPRPQKQYPINPKAKASIQTVINDLLKQGVLIQQNSIMNTPVYPVPKPDGKWRMVLDYREVNKTIPLIAAQNQHSAGILSSIFRGKYKTTLDLSNGFWAHSITPESYWLTAFTWLGQQYCWTRLPQGFLNSPALFNADVVDLLKEVPNVQVYVDDIYISHDDPREHLEQLEKVFSLLLNAGYVVSLKKSEIAQHEVEFLGFNITKEGRGLTETFKQKLLNITPPRDLKQLQSILGLLNFARNFIPNFSELVKPLYNIIATAPGKYITWTTDNSQQLQNIISMLNSAENLEERNPEVRLIMKVNTSPSAGYIRFYNEFAKRPIMYLNYVYTKAEVKFTNTEKLLTTIHKGLIKALDLGMGQEILVYSPIVSMTKIQKTPLPERKALPIRWITWMSYLEDPRIQFHYDKTLPELQQVPTVTDDIIAKIKHPSEFSMVFYTDGSAIKHPNVNKSHNAGMGIAQVQFKPEFTVINTWSIPLGDHTAQLAEVAAVEFACKKALKIDGPVLIVTDSFYVAESVNKELPYWQSNGFFNNKKKPLKHVSKWKSIADCIQLKPDIIIIHEKGHQPTASTFHTEGNNLADKLATQGSYVVNAGKRTADGSEFEKRTADGSEFESPKKKAKVE

SEQ ID NO: 6629 - protein, 2091 aa, synthetic construct
MPAAKRVKLDGGDKKYSIGLDIGTNSVGWAVITDEYKVPSKKFKVLGNTDRHSIKKNLIGALLFDSGETAEATRLKRTARRRYTRRKNRICYLQEIFSNEMAKVDDSFFHRLEESFLVEEDKKHERHPIFGNIVDEVAYHEKYPTIYHLRKKLVDSTDKADLRLIYLALAHMIKFRGHFLIEGDLNPDNSDVDKLFIQLVQTYNQLFEENPINASGVDAKAILSARLSKSRRLENLIAQLPGEKKNGLFGNLIALSLGLTPNFKSNFDLAEDAKLQLSKDTYDDDLDNLLAQIGDQYADLFLAAKNLSDAILLSDILRVNTEITKAPLSASMIKRYDEHHQDLTLLKALVRQQLPEKYKEIFFDQSKNGYAGYIDGGASQEEFYKFIKPILEKMDGTEELLVKLNREDLLRKQRTFDNGSIPHQIHLGELHAILRRQEDFYPFLKDNREKIEKILTFRIPYYVGPLARGNSRFAWMTRKSEETITPWNFEEVVDKGASAQSFIERMTNFDKNLPNEKVLPKHSLLYEYFTVYNELTKVKYVTEGMRKPAFLSGEQKKAIVDLLFKTNRKVTVKQLKEDYFKKIECFDSVEISGVEDRFNASLGTYHDLLKIIKDKDFLDNEENEDILEDIVLTLTLFEDREMIEERLKTYAHLFDDKVMKQLKRRRYTGWGRLSRKLINGIRDKQSGKTILDFLKSDGFANRNFMQLIHDDSLTFKEDIQKAQVSGQGDSLHEHIANLAGSPAIKKGILQTVKVVDELVKVMGRHKPENIVIEMARENQTTQKGQKNSRERMKRIEEGIKELGSQILKEHPVENTQLQNEKLYLYYLQNGRDMYVDQELDINRLSDYDVDHIVPQSFLKDDSIDNKVLTRSDKARGKSDNVPSEEVVKKMKNYWRQLLNAKLITQRKFDNLTKAERGGLSELDKAGFIKRQLVETRQITKHVAQILDSRMNTKYDENDKLIREVKVITLKSKLVSDFRKDFQFYKVREINNYHHAHDAYLNAVVGTALIKKYPKLESEFVYGDYKVYDVRKMIAKSEQEIGKATAKYFFYSNIMNFFKTEITLANGEIRKRPLIETNGETGEIVWDKGRDFATVRKVLSMPQVNIVKKTEVQTGGFSKESILPKRNSDKLIARKKDWDPKKYGGFDSPTVAYSVLVVAKVEKGKSKKLKSVKELLGITIMERSSFEKNPIDFLEAKGYKEVKKDLIIKLPKYSLFELENGRKRMLASAGELQKGNELALPSKYVNFLYLASHYEKLKGSPEDNEQKQLFVEQHKHYLDEIIEQISEFSKRVILADANLDKVLSAYNKHRDKPIREQAENIIHLFTLTNLGAPAAFKYFDTTIDRKRYTSTKEVLDATLIHQSITGLYETRIDLSQLGGDGGGGSEAAAKGGVLNLEEEYRLHEKPVPSSIDPSWLQLFPTVWAERAGMGLANQVPPVVVELRSGASPVAVRQYPMSKEAREGIRPHIQRFLDLGVLVPCQSPWNTPLLPVKKPGTNDYRPVQDLREINKRVQDIHPTVPNPYNLLSSLPPSHTWYSVLDLKDAFFCLKLHPNSQPLFAFEWRDPEKGNTGQLTWTRLPQGFKNSPTLFNEALHRDLAPFRALNPQVVLLQYVDDLLVAAPTYRDCKEGTQKLLQELSKLGYRVSAKKAQLCQKEVTYLGYLLKEGKRWLTPARKATVMKIPPPTTPRQVREFLGKAGFCRLFIPGFASLAAPLYPLTKPSIPFIWTEEHQKAFDRIKEALLSAPALALPDLTKPFTLYVDERAGVARGVLTQTLGPWRRPVAYLSKKLDPVASGWPTCLKAVAAVALLLKDADKLTLGQNVTVIASHSLESIVRQPPDRWMTNARMTHYQSLLLNERVSFAPPAVLNPATLLPVESEATPVHRCSEILAEETGTRRDLKDQPLPGVPAWYTDGSSFIAEGKRRAGAAIVDGKRTVWASSLPEGTSAQKAELVALTQALRLAEGKDINIYTDSRYAFATAHIHGAIYKQRGWLTSAGKDIKNKEEILALLEAIHLPKRVAIIHCPGHQKGNDPVATGNRRADEAAKQAALSTRVLAETTKPAGKRTADGSEFEKRTADGSEFESPKKKAKVE

SEQ ID NO: 6630 - protein, 2092 aa, synthetic construct
MPAAKRVKLDGGDKKYSIGLDIGTNSVGWAVITDEYKVPSKKFKVLGNTDRHSIKKNLIGALLFDSGETAEATRLKRTARRRYTRRKNRICYLQEIFSNEMAKVDDSFFHRLEESFLVEEDKKHERHPIFGNIVDEVAYHEKYPTIYHLRKKLVDSTDKADLRLIYLALAHMIKFRGHFLIEGDLNPDNSDVDKLFIQLVQTYNQLFEENPINASGVDAKAILSARLSKSRRLENLIAQLPGEKKNGLFGNLIALSLGLTPNFKSNFDLAEDAKLQLSKDTYDDDLDNLLAQIGDQYADLFLAAKNLSDAILLSDILRVNTEITKAPLSASMIKRYDEHHQDLTLLKALVRQQLPEKYKEIFFDQSKNGYAGYIDGGASQEEFYKFIKPILEKMDGTEELLVKLNREDLLRKQRTFDNGSIPHQIHLGELHAILRRQEDFYPFLKDNREKIEKILTFRIPYYVGPLARGNSRFAWMTRKSEETITPWNFEEVVDKGASAQSFIERMTNFDKNLPNEKVLPKHSLLYEYFTVYNELTKVKYVTEGMRKPAFLSGEQKKAIVDLLFKTNRKVTVKQLKEDYFKKIECFDSVEISGVEDRFNASLGTYHDLLKIIKDKDFLDNEENEDILEDIVLTLTLFEDREMIEERLKTYAHLFDDKVMKQLKRRRYTGWGRLSRKLINGIRDKQSGKTILDFLKSDGFANRNFMQLIHDDSLTFKEDIQKAQVSGQGDSLHEHIANLAGSPAIKKGILQTVKVVDELVKVMGRHKPENIVIEMARENQTTQKGQKNSRERMKRIEEGIKELGSQILKEHPVENTQLQNEKLYLYYLQNGRDMYVDQELDINRLSDYDVDHIVPQSFLKDDSIDNKVLTRSDKARGKSDNVPSEEVVKKMKNYWRQLLNAKLITQRKFDNLTKAERGGLSELDKAGFIKRQLVETRQITKHVAQILDSRMNTKYDENDKLIREVKVITLKSKLVSDFRKDFQFYKVREINNYHHAHDAYLNAVVGTALIKKYPKLESEFVYGDYKVYDVRKMIAKSEQEIGKATAKYFFYSNIMNFFKTEITLANGEIRKRPLIETNGETGEIVWDKGRDFATVRKVLSMPQVNIVKKTEVQTGGFSKESILPKRNSDKLIARKKDWDPKKYGGFDSPTVAYSVLVVAKVEKGKSKKLKSVKELLGITIMERSSFEKNPIDFLEAKGYKEVKKDLIIKLPKYSLFELENGRKRMLASAGELQKGNELALPSKYVNFLYLASHYEKLKGSPEDNEQKQLFVEQHKHYLDEIIEQISEFSKRVILADANLDKVLSAYNKHRDKPIREQAENIIHLFTLTNLGAPAAFKYFDTTIDRKRYTSTKEVLDATLIHQSITGLYETRIDLSQLGGDGGEAAAKGGSGGTLQLEEEYRLFEPESTQKQEMDIWLKNFPQAWAETGGMGTAHCQAPVLIQLKATATPISIRQYPMPHEAYQGIKPHIRRMLDQGILKPCQSPWNTPLLPVKKPGTEDYRPVQDLREVNKRVEDIHPTVPNPYNLLSTLPPSHPWYTVLDLKDAFFCLRLHSESQLLFAFEWRDPEIGLSGQLTWTRLPQGFKNSPTLFNEALHSDLADFRVRYPALVLLQYVDDLLLAAATRTECLEGTKALLETLGNKGYRASAKKAQICLQEVTYLGYSLKDGQRWLTKARKEAILSIPVPKNSRQVREFLGKAGYCRLFIPGFAELAAPLYPLTRPGTLFQWGTEQQLAFEDIKKALLSSPALGLPDITKPFELFIDENSGFAKGVLVQKLGPWKRPVAYLSKKLDTVASGWPPCLRMVAAIAILVKDAGKLTLGQPLTILTSHPVEALVRQPPNKWLSNARMTHYQAMLLDAERVHFGPTVSLNPATLLPLPSGGNHHDCLQILAETHGTRPDLTDQPLPDADLTWYTDGSSFIRNGEREAGAAVTTESEVIWAAPLPPGTSAQRAELIALTQALKMAEGKKLTVYTDSRYAFATTHVHGEIYRRRGWLTSEGKEIKNKNEILALLEALFLPKRLSIIHCPGHQKGDSPQAKGNRLADDTAKKAATETHSSLTVLPAGKRTADGSEFEKRTADGSEFESPKKKAKVE

SEQ ID NO: 6631 - protein, 2091 aa, synthetic construct
MPAAKRVKLDGGDKKYSIGLDIGTNSVGWAVITDEYKVPSKKFKVLGNTDRHSIKKNLIGALLFDSGETAEATRLKRTARRRYTRRKNRICYLQEIFSNEMAKVDDSFFHRLEESFLVEEDKKHERHPIFGNIVDEVAYHEKYPTIYHLRKKLVDSTDKADLRLIYLALAHMIKFRGHFLIEGDLNPDNSDVDKLFIQLVQTYNQLFEENPINASGVDAKAILSARLSKSRRLENLIAQLPGEKKNGLFGNLIALSLGLTPNFKSNFDLAEDAKLQLSKDTYDDDLDNLLAQIGDQYADLFLAAKNLSDAILLSDILRVNTEITKAPLSASMIKRYDEHHQDLTLLKALVRQQLPEKYKEIFFDQSKNGYAGYIDGGASQEEFYKFIKPILEKMDGTEELLVKLNREDLLRKQRTFDNGSIPHQIHLGELHAILRRQEDFYPFLKDNREKIEKILTFRIPYYVGPLARGNSRFAWMTRKSEETITPWNFEEVVDKGASAQSFIERMTNFDKNLPNEKVLPKHSLLYEYFTVYNELTKVKYVTEGMRKPAFLSGEQKKAIVDLLFKTNRKVTVKQLKEDYFKKIECFDSVEISGVEDRFNASLGTYHDLLKIIKDKDFLDNEENEDILEDIVLTLTLFEDREMIEERLKTYAHLFDDKVMKQLKRRRYTGWGRLSRKLINGIRDKQSGKTILDFLKSDGFANRNFMQLIHDDSLTFKEDIQKAQVSGQGDSLHEHIANLAGSPAIKKGILQTVKVVDELVKVMGRHKPENIVIEMARENQTTQKGQKNSRERMKRIEEGIKELGSQILKEHPVENTQLQNEKLYLYYLQNGRDMYVDQELDINRLSDYDVDHIVPQSFLKDDSIDNKVLTRSDKARGKSDNVPSEEVVKKMKNYWRQLLNAKLITQRKFDNLTKAERGGLSELDKAGFIKRQLVETRQITKHVAQILDSRMNTKYDENDKLIREVKVITLKSKLVSDFRKDFQFYKVREINNYHHAHDAYLNAVVGTALIKKYPKLESEFVYGDYKVYDVRKMIAKSEQEIGKATAKYFFYSNIMNFFKTEITLANGEIRKRPLIETNGETGEIVWDKGRDFATVRKVLSMPQVNIVKKTEVQTGGFSKESILPKRNSDKLIARKKDWDPKKYGGFDSPTVAYSVLVVAKVEKGKSKKLKSVKELLGITIMERSSFEKNPIDFLEAKGYKEVKKDLIIKLPKYSLFELENGRKRMLASAGELQKGNELALPSKYVNFLYLASHYEKLKGSPEDNEQKQLFVEQHKHYLDEIIEQISEFSKRVILADANLDKVLSAYNKHRDKPIREQAENIIHLFTLTNLGAPAAFKYFDTTIDRKRYTSTKEVLDATLIHQSITGLYETRIDLSQLGGDGGEAAAKGGSGGVLNLEEEYRLHEKPVPSSIDPSWLQLFPTVWAERAGMGLANQVPPVVVELRSGASPVAVRQYPMSKEAREGIRPHIQKFLDLGVLVPCRSPWNTPLLPVKKPGTNDYRPVQDLREINKRVQDIHPTVPNPYNLLSSLPPSYTWYSVLDLKDAFFCLRLHPNSQPLFAFEWKDPEKGNTGQLTWTRLPQGFKNSPTLFNEALHRDLAPFRALNPQVVLLQYVDDLLVAAPTYEDCKKGTQKLLQELSKLGYRVSAKKAQLCQREVTYLGYLLKEGKRWLTPARKATVMKIPVPTTPRQVREFLGKAGFCRLFIPGFASLAAPLYPLTKPSIPFIWTEEHQQAFDHIKKALLSAPALALPDLTKPFTLYIDERAGVARGVLTQTLGPWRRPVAYLSKKLDPVASGWPTCLKAVAAVALLLKDADKLTLGQNVTVIASHSLESIVRQPPDRWMTNARMTHYQSLLLNERVSFAPPAVLNPATLLPVESEATPVHRCSEILAEETGTRRDLEDQPLPGVPTWYTDGSSFITEGKRRAGAPIVDGKRTVWASSLPEGTSAQKAELVALTQALRLAEGKNINIYTDSRYAFATAHIHGAIYKQRGWLTSAGKDIKNKEEILALLEAIHLPRRVAIIHCPGHQRGSNPVATGNRRADEAAKQAALSTRVLAGTTKPAGKRTADGSEFEKRTADGSEFESPKKKAKVE

SEQ ID NO: 6632 - protein, 2093 aa, synthetic construct
MPAAKRVKLDGGDKKYSIGLDIGTNSVGWAVITDEYKVPSKKFKVLGNTDRHSIKKNLIGALLFDSGETAEATRLKRTARRRYTRRKNRICYLQEIFSNEMAKVDDSFFHRLEESFLVEEDKKHERHPIFGNIVDEVAYHEKYPTIYHLRKKLVDSTDKADLRLIYLALAHMIKFRGHFLIEGDLNPDNSDVDKLFIQLVQTYNQLFEENPINASGVDAKAILSARLSKSRRLENLIAQLPGEKKNGLFGNLIALSLGLTPNFKSNFDLAEDAKLQLSKDTYDDDLDNLLAQIGDQYADLFLAAKNLSDAILLSDILRVNTEITKAPLSASMIKRYDEHHQDLTLLKALVRQQLPEKYKEIFFDQSKNGYAGYIDGGASQEEFYKFIKPILEKMDGTEELLVKLNREDLLRKQRTFDNGSIPHQIHLGELHAILRRQEDFYPFLKDNREKIEKILTFRIPYYVGPLARGNSRFAWMTRKSEETITPWNFEEVVDKGASAQSFIERMTNFDKNLPNEKVLPKHSLLYEYFTVYNELTKVKYVTEGMRKPAFLSGEQKKAIVDLLFKTNRKVTVKQLKEDYFKKIECFDSVEISGVEDRFNASLGTYHDLLKIIKDKDFLDNEENEDILEDIVLTLTLFEDREMIEERLKTYAHLFDDKVMKQLKRRRYTGWGRLSRKLINGIRDKQSGKTILDFLKSDGFANRNFMQLIHDDSLTFKEDIQKAQVSGQGDSLHEHIANLAGSPAIKKGILQTVKVVDELVKVMGRHKPENIVIEMARENQTTQKGQKNSRERMKRIEEGIKELGSQILKEHPVENTQLQNEKLYLYYLQNGRDMYVDQELDINRLSDYDVDHIVPQSFLKDDSIDNKVLTRSDKARGKSDNVPSEEVVKKMKNYWRQLLNAKLITQRKFDNLTKAERGGLSELDKAGFIKRQLVETRQITKHVAQILDSRMNTKYDENDKLIREVKVITLKSKLVSDFRKDFQFYKVREINNYHHAHDAYLNAVVGTALIKKYPKLESEFVYGDYKVYDVRKMIAKSEQEIGKATAKYFFYSNIMNFFKTEITLANGEIRKRPLIETNGETGEIVWDKGRDFATVRKVLSMPQVNIVKKTEVQTGGFSKESILPKRNSDKLIARKKDWDPKKYGGFDSPTVAYSVLVVAKVEKGKSKKLKSVKELLGITIMERSSFEKNPIDFLEAKGYKEVKKDLIIKLPKYSLFELENGRKRMLASAGELQKGNELALPSKYVNFLYLASHYEKLKGSPEDNEQKQLFVEQHKHYLDEIIEQISEFSKRVILADANLDKVLSAYNKHRDKPIREQAENIIHLFTLTNLGAPAAFKYFDTTIDRKRYTSTKEVLDATLIHQSITGLYETRIDLSQLGGDGGEAAAKGGSGGTLGIEDEYRLHETSTEPDVSLGSTWLSDFPQAWAETGGMGLAVRQAPLIIPLKATSTPVSIQQYPMSHEARLGIKPHIQRLLDQGILVPCQSPWNTPLLPVKKPGTNDYRPVQDLREVNKRVEDIHPTVPNPYNLLSGLPPSHQWYTVLDLKDAFFCLRLHPTSQPLFAFEWRDPGMGISGQLTWTRLPQGFKNSPTLFNEALHRDLADFRIQHPDLILLQYVDDILLAATSELDCQQGTRALLQTLGDLGYRASAKKAQICQKQVKYLGYLLREGQRWLTEARKETVMGQPVPKTPRQLREFLGTAGFCRLWIPGFAEMAAPLYPLTKPGTLFSWGPDQQKAYQEIKQALLTAPALGLPDLTKPFELFVDEKQGYAKGVLTQKLGPWRRPVAYLSKKLDPVAAGWPPCLRMVAAIAVLTKDAGKLTMGQPLVILAPHAVEALVKQPPDRWLSNARMTHYQAMLLDTDRVQFGPVVALNPATLLPLPEEGAPHDCLEILAETHGTRPDLTDQPIPDADHTWYTDGSSFLQEGQRKAGAAVTTETEVIWAGALPAGTSAQRAELIALTQALKMAEGKRLNVYTDSRYAFATAHIHGEIYRRRGWLTSEGREIKNKSEILALLKALFLPKRLSIIHCLGHQKGDSAEARGNRLADQAAREAAIKTPPDTSTLLAGKRTADGSEFEKRTADGSEFESPKKKAKVE

SEQ ID NO: 6633 - protein, 2093 aa, synthetic construct
MPAAKRVKLDGGDKKYSIGLDIGTNSVGWAVITDEYKVPSKKFKVLGNTDRHSIKKNLIGALLFDSGETAEATRLKRTARRRYTRRKNRICYLQEIFSNEMAKVDDSFFHRLEESFLVEEDKKHERHPIFGNIVDEVAYHEKYPTIYHLRKKLVDSTDKADLRLIYLALAHMIKFRGHFLIEGDLNPDNSDVDKLFIQLVQTYNQLFEENPINASGVDAKAILSARLSKSRRLENLIAQLPGEKKNGLFGNLIALSLGLTPNFKSNFDLAEDAKLQLSKDTYDDDLDNLLAQIGDQYADLFLAAKNLSDAILLSDILRVNTEITKAPLSASMIKRYDEHHQDLTLLKALVRQQLPEKYKEIFFDQSKNGYAGYIDGGASQEEFYKFIKPILEKMDGTEELLVKLNREDLLRKQRTFDNGSIPHQIHLGELHAILRRQEDFYPFLKDNREKIEKILTFRIPYYVGPLARGNSRFAWMTRKSEETITPWNFEEVVDKGASAQSFIERMTNFDKNLPNEKVLPKHSLLYEYFTVYNELTKVKYVTEGMRKPAFLSGEQKKAIVDLLFKTNRKVTVKQLKEDYFKKIECFDSVEISGVEDRFNASLGTYHDLLKIIKDKDFLDNEENEDILEDIVLTLTLFEDREMIEERLKTYAHLFDDKVMKQLKRRRYTGWGRLSRKLINGIRDKQSGKTILDFLKSDGFANRNFMQLIHDDSLTFKEDIQKAQVSGQGDSLHEHIANLAGSPAIKKGILQTVKVVDELVKVMGRHKPENIVIEMARENQTTQKGQKNSRERMKRIEEGIKELGSQILKEHPVENTQLQNEKLYLYYLQNGRDMYVDQELDINRLSDYDVDHIVPQSFLKDDSIDNKVLTRSDKARGKSDNVPSEEVVKKMKNYWRQLLNAKLITQRKFDNLTKAERGGLSELDKAGFIKRQLVETRQITKHVAQILDSRMNTKYDENDKLIREVKVITLKSKLVSDFRKDFQFYKVREINNYHHAHDAYLNAVVGTALIKKYPKLESEFVYGDYKVYDVRKMIAKSEQEIGKATAKYFFYSNIMNFFKTEITLANGEIRKRPLIETNGETGEIVWDKGRDFATVRKVLSMPQVNIVKKTEVQTGGFSKESILPKRNSDKLIARKKDWDPKKYGGFDSPTVAYSVLVVAKVEKGKSKKLKSVKELLGITIMERSSFEKNPIDFLEAKGYKEVKKDLIIKLPKYSLFELENGRKRMLASAGELQKGNELALPSKYVNFLYLASHYEKLKGSPEDNEQKQLFVEQHKHYLDEIIEQISEFSKRVILADANLDKVLSAYNKHRDKPIREQAENIIHLFTLTNLGAPAAFKYFDTTIDRKRYTSTKEVLDATLIHQSITGLYETRIDLSQLGGDGGEAAAKGGSGGTLGIEDEYRLHETSTEPDVSLGSTWLSDFPQAWAETGGMGLAVRQAPLIIPLKATSTPVSIQQYPMSHEARLGIKPHIQRLLDQGILVPCQSPWNTPLLPVKKPGTNDYRPVQDLREVNKRVEDIHPTVPNPYNLLSGLPPSHQWYTVLDLKDAFFCLRLHPTSQPLFAFEWRDPGMGISGQLTWTRLPQGFKNSPTLFDEALHRDLADFRIQHPDLILLQYVDDILLAATSELDCQQGTRALLQTLGDLGYRASAKKAQICQKQVKYLGYLLREGQRWLTEARKETVMGQPVPKTPRQLREFLGTAGFCRLWIPGFAEMAAPLYPLTKTGTLFSWGPDQQKAYQEIKQALLTAPALGLPDLTKPFELFVDEKQGYAKGVLTQKLGPWRRPVAYLSKKLDPVAAGWPPCLRMVAAIAVLTKDAGKLTMGQPLVILAPHAVEALVKQPPDRWLSNARMTHYQAMLLDTDRVQFGPVVALNPATLLPLPEEGAPHDCLEILAETHGTRPDLTDQPIPDADHTWYTDGSSFLQEGQRKAGAAVTTETEVIWAGALPAGTSAQRAELIALTQALKMAEGKRLNVYTDSRYAFATAHIHGEIYRRRGLLTSEGREIKNKSEILALLKALFLPKRLSIIHCLGHQKGDSAEARGNRLADQAAREAAIKTPPDTSTLLAGKRTADGSEFEKRTADGSEFESPKKKAKVE

SEQ ID NO: 6634 - protein, 2093 aa, synthetic construct; identical to SEQ ID NO: 6632

SEQ ID NO: 6635 - protein, 2087 aa, synthetic construct
MPAAKRVKLDGGDKKYSIGLDIGTNSVGWAVITDEYKVPSKKFKVLGNTDRHSIKKNLIGALLFDSGETAEATRLKRTARRRYTRRKNRICYLQEIFSNEMAKVDDSFFHRLEESFLVEEDKKHERHPIFGNIVDEVAYHEKYPTIYHLRKKLVDSTDKADLRLIYLALAHMIKFRGHFLIEGDLNPDNSDVDKLFIQLVQTYNQLFEENPINASGVDAKAILSARLSKSRRLENLIAQLPGEKKNGLFGNLIALSLGLTPNFKSNFDLAEDAKLQLSKDTYDDDLDNLLAQIGDQYADLFLAAKNLSDAILLSDILRVNTEITKAPLSASMIKRYDEHHQDLTLLKALVRQQLPEKYKEIFFDQSKNGYAGYIDGGASQEEFYKFIKPILEKMDGTEELLVKLNREDLLRKQRTFDNGSIPHQIHLGELHAILRRQEDFYPFLKDNREKIEKILTFRIPYYVGPLARGNSRFAWMTRKSEETITPWNFEEVVDKGASAQSFIERMTNFDKNLPNEKVLPKHSLLYEYFTVYNELTKVKYVTEGMRKPAFLSGEQKKAIVDLLFKTNRKVTVKQLKEDYFKKIECFDSVEISGVEDRFNASLGTYHDLLKIIKDKDFLDNEENEDILEDIVLTLTLFEDREMIEERLKTYAHLFDDKVMKQLKRRRYTGWGRLSRKLINGIRDKQSGKTILDFLKSDGFANRNFMQLIHDDSLTFKEDIQKAQVSGQGDSLHEHIANLAGSPAIKKGILQTVKVVDELVKVMGRHKPENIVIEMARENQTTQKGQKNSRERMKRIEEGIKELGSQILKEHPVENTQLQNEKLYLYYLQNGRDMYVDQELDINRLSDYDVDHIVPQSFLKDDSIDNKVLTRSDKARGKSDNVPSEEVVKKMKNYWRQLLNAKLITQRKFDNLTKAERGGLSELDKAGFIKRQLVETRQITKHVAQILDSRMNTKYDENDKLIREVKVITLKSKLVSDFRKDFQFYKVREINNYHHAHDAYLNAVVGTALIKKYPKLESEFVYGDYKVYDVRKMIAKSEQEIGKATAKYFFYSNIMNFFKTEITLANGEIRKRPLIETNGETGEIVWDKGRDFATVRKVLSMPQVNIVKKTEVQTGGFSKESILPKRNSDKLIARKKDWDPKKYGGFDSPTVAYSVLVVAKVEKGKSKKLKSVKELLGITIMERSSFEKNPIDFLEAKGYKEVKKDLIIKLPKYSLFELENGRKRMLASAGELQKGNELALPSKYVNFLYLASHYEKLKGSPEDNEQKQLFVEQHKHYLDEIIEQISEFSKRVILADANLDKVLSAYNKHRDKPIREQAENIIHLFTLTNLGAPAAFKYFDTTIDRKRYTSTKEVLDATLIHQSITGLYETRIDLSQLGGDGGEAAAKGGSGGTLQLDDEYRLYSPLVKPDQNIQFWLEQFPQAWAETAGMGLAKQVPPQVIQLKASATPVSVRQYPLSKEAQEGIRPHVQRLIQQGILVPVQSPWNTPLLPVRKPGTNDYRPVQDLREVNKRVQDIHPTVPNPYNLLCALPPQRSWYTVLDLKDAFFCLRLHPTSQPLFAFEWRDPGTGRTGQLTWTRLPQGFKNSPTIFDEALHRDLANFRIQHPQVTLLQYVDDLLLAGATKQDCLEGTKALLLELSDLGYRASAKKAQICRREVTYLGYSLRDGQRWLTEARKKTVVQIPAPTTAKQVREFLGTAGFCRLWIPGFATLAAPLYPLTKEKGEFSWAPEHQKAFDAIKKALLSAPALALPDVTKPFTLYVDERKGVARGVLTQTLGPWRRPVAYLSKKLDPVASGWPVCLKAIAAVAILVKDADKLTLGQNITVIAPHALENIVRQPPDRWMTNARMTHYQSLLLTERVTFAPPAALNPATLLPEETDEPVTHDCHQLLIEETGVRKDLTDIPLTGEVLTWFTDGSSYVVEGKRMAGAAVVDGTRTIWASSLPEGTSAQKAELMALTQALRLAEGKSINIYTDSRYAFATAHVHGAIYKQRGLLTSAGREIKNKEEILSLLEALHLPKRLAIIHCPGHQKAKDPISRGNQMADRVAKQAAQGVNLLAGKRTADGSEFEKRTADGSEFESPKKKAKVE

SEQ ID NO: 6636 - protein, 2087 aa, synthetic construct; identical to SEQ ID NO: 6635

SEQ ID NO: 6637 - protein, 2084 aa, synthetic construct
MPAAKRVKLDGGDKKYSIGLDIGTNSVGWAVITDEYKVPSKKFKVLGNTDRHSIKKNLIGALLFDSGETAEATRLKRTARRRYTRRKNRICYLQEIFSNEMAKVDDSFFHRLEESFLVEEDKKHERHPIFGNIVDEVAYHEKYPTIYHLRKKLVDSTDKADLRLIYLALAHMIKFRGHFLIEGDLNPDNSDVDKLFIQLVQTYNQLFEENPINASGVDAKAILSARLSKSRRLENLIAQLPGEKKNGLFGNLIALSLGLTPNFKSNFDLAEDAKLQLSKDTYDDDLDNLLAQIGDQYADLFLAAKNLSDAILLSDILRVNTEITKAPLSASMIKRYDEHHQDLTLLKALVRQQLPEKYKEIFFDQSKNGYAGYIDGGASQEEFYKFIKPILEKMDGTEELLVKLNREDLLRKQRTFDNGSIPHQIHLGELHAILRRQEDFYPFLKDNREKIEKILTFRIPYYVGPLARGNSRFAWMTRKSEETITPWNFEEVVDKGASAQSFIERMTNFDKNLPNEKVLPKHSLLYEYFTVYNELTKVKYVTEGMRKPAFLSGEQKKAIVDLLFKTNRKVTVKQLKEDYFKKIECFDSVEISGVEDRFNASLGTYHDLLKIIKDKDFLDNEENEDILEDIVLTLTLFEDREMIEERLKTYAHLFDDKVMKQLKRRRYTGWGRLSRKLINGIRDKQSGKTILDFLKSDGFANRNFMQLIHDDSLTFKEDIQKAQVSGQGDSLHEHIANLAGSPAIKKGILQTVKVVDELVKVMGRHKPENIVIEMARENQTTQKGQKNSRERMKRIEEGIKELGSQILKEHPVENTQLQNEKLYLYYLQNGRDMYVDQELDINRLSDYDVDHIVPQSFLKDDSIDNKVLTRSDKARGKSDNVPSEEVVKKMKNYWRQLLNAKLITQRKFDNLTKAERGGLSELDKAGFIKRQLVETRQITKHVAQILDSRMNTKYDENDKLIREVKVITLKSKLVSDFRKDFQFYKVREINNYHHAHDAYLNAVVGTALIKKYPKLESEFVYGDYKVYDVRKMIAKSEQEIGKATAKYFFYSNIMNFFKTEITLANGEIRKRPLIETNGETGEIVWDKGRDFATVRKVLSMPQVNIVKKTEVQTGGFSKESILPKRNSDKLIARKKDWDPKKYGGFDSPTVAYSVLVVAKVEKGKSKKLKSVKELLGITIMERSSFEKNPIDFLEAKGYKEVKKDLIIKLPKYSLFELENGRKRMLASAGELQKGNELALPSKYVNFLYLASHYEKLKGSPEDNEQKQLFVEQHKHYLDEIIEQISEFSKRVILADANLDKVLSAYNKHRDKPIREQAENIIHLFTLTNLGAPAAFKYFDTTIDRKRYTSTKEVLDATLIHQSITGLYETRIDLSQLGGDGGEAAAKGGSGGIPWLMKKPLQLTTLVPLQEYEERLLKQTMLTGSYKEKLQSLFLKYDALWQHWENQVGHRRIKPHHIATGTVNPRPQKQYPINPKAKASIQTVINDLLKQGVLIQQNSIMNTPVYPVPKPDGKWRMVLDYREVNKTIPLIAAQNQHSAGILSSIFRGKYKTTLDLSNGFWAHSITPESYWLTAFTWLGQQYCWTRLPQGFLNSPALFNADVVDLLKEVPNVQVYVDDIYISHDDPREHLEQLEKVFSLLLNAGYVVSLKKSEIAQHEVEFLGFNITKEGRGLTETFKQKLLNITPPRDLKQLQSILGLLNFARNFIPNFSELVKPLYNIIATAPGKYITWTTDNSQQLQNIISMLNSAENLEERNPEVRLIMKVNTSPSAGYIRFYNEFAKRPIMYLNYVYTKAEVKFTNTEKLLTTIHKGLIKALDLGMGQEILVYSPIVSMTKIQKTPLPERKALPIRWITWMSYLEDPRIQFHYDKTLPELQQVPTVTDDIIAKIKHPSEFSMVFYTDGSAIKHPNVNKSHNAGMGIAQVQFKPEFTVINTWSIPLGDHTAQLAEVAAVEFACKKALKIDGPVLIVTDSFYVAESVNKELPYWQSNGFFNNKKKPLKHVSKWKSIADCIQLKPDIIIIHEKGHQPTASTFHTEGNNLADKLATQGSYVVNAGKRTADGSEFEKRTADGSEFESPKKKAKVE

SEQ ID NO: 6638 - protein, 2084 aa, synthetic construct
MPAAKRVKLDGGDKKYSIGLDIGTNSVGWAVITDEYKVPSKKFKVLGNTDRHSIKKNLIGALLFDSGETAEATRLKRTARRRYTRRKNRICYLQEIFSNEMAKVDDSFFHRLEESFLVEEDKKHERHPIFGNIVDEVAYHEKYPTIYHLRKKLVDSTDKADLRLIYLALAHMIKFRGHFLIEGDLNPDNSDVDKLFIQLVQTYNQLFEENPINASGVDAKAILSARLSKSRRLENLIAQLPGEKKNGLFGNLIALSLGLTPNFKSNFDLAEDAKLQLSKDTYDDDLDNLLAQIGDQYADLFLAAKNLSDAILLSDILRVNTEITKAPLSASMIKRYDEHHQDLTLLKALVRQQLPEKYKEIFFDQSKNGYAGYIDGGASQEEFYKFIKPILEKMDGTEELLVKLNREDLLRKQRTFDNGSIPHQIHLGELHAILRRQEDFYPFLKDNREKIEKILTFRIPYYVGPLARGNSRFAWMTRKSEETITPWNFEEVVDKGASAQSFIERMTNFDKNLPNEKVLPKHSLLYEYFTVYNELTKVKYVTEGMRKPAFLSGEQKKAIVDLLFKTNRKVTVKQLKEDYFKKIECFDSVEISGVEDRFNASLGTYHDLLKIIKDKDFLDNEENEDILEDIVLTLTLFEDREMIEERLKTYAHLFDDKVMKQLKRRRYTGWGRLSRKLINGIRDKQSGKTILDFLKSDGFANRNFMQLIHDDSLTFKEDIQKAQVSGQGDSLHEHIANLAGSPAIKKGILQTVKVVDELVKVMGRHKPENIVIEMARENQTTQKGQKNSRERMKRIEEGIKELGSQILKEHPVENTQLQNEKLYLYYLQNGRDMYVDQELDINRLSDYDVDHIVPQSFLKDDSIDNKVLTRSDKARGKSDNVPSEEVVKKMKNYWRQLLNAKLITQRKFDNLTKAERGGLSELDKAGFIKRQLVETRQITKHVAQILDSRMNTKYDENDKLIREVKVITLKSKLVSDFRKDFQFYKVREINNYHHAHDAYLNAVVGTALIKKYPKLESEFVYGDYKVYDVRKMIAKSEQEIGKATAKYFFYSNIMNFFKTEITLANGEIRKRPLIETNGETGEIVWDKGRDFATVRKVLSMPQVNIVKKTEVQTGGFSKESILPKRNSDKLIARKKDWDPKKYGGFDSPTVAYSVLVVAKVEKGKSKKLKSVKELLGITIMERSSFEKNPIDFLEAKGYKEVKKDLIIKLPKYSLFELENGRKRMLASAGELQKGNELALPSKYVNFLYLASHYEKLKGSPEDNEQKQLFVEQHKHYLDEIIEQISEFSKRVILADANLDKVLSAYNKHRDKPIREQAENIIHLFTLTNLGAPAAFKYFDTTIDRKRYTSTKEVLDATLIHQSITGLYETRIDLSQLGGDGGEAAAKGGSGGIPWLMKKPLQLTTLVPLQEYEERLLKQTMLTGSYKEKLQSLFLKYDALWQHWENQVGHRRIKPHHIATGTVNPRPQKQYPINPKAKASIQTVINDLLKQGVLIQQNSIMNTPVYPVPKPDGKWRMVLDYREVNKTIPLIAAQNQHSAGILSSIFRGKYKTTLDLSNGFWAHSITPESYWLTAFTWLGQQYCWTRLPQGFLNSPALFNADVVDLLKEVPNVQVYVDDIYISHDDPREHLEQLEKVFSLLLNAGYVVSLKKSEIAQHEVEFLGFNITKEGRGLTETFKQKLLNITPPRDLKQLQSILGKLNFARNFIPNFSELVKPLYNIIATAPGKYITWTTDNSQQLQNIISMLNSAENLEERNPEVRLIMKVNTSPSAGYIRFYNEFAKRPIMYLNYVYTKAEVKFTNTEKLLTTIHKGLIKALDLGMGQEILVYSPIVSMTKIQKTPLPERKALPIRWITWMSYLEDPRIQFHYDKTLPELQQVPTVTDDIIAKIKHPSEFSMVFYTDGSAIKHPNVNKSHNAGMGIAQVQFKPEFTVINTWSIPLGDHTAQLAEVAAVEFACKKALKIDGPVLIVTDSFYVAESVNKELPYWQSNGFFNNKKKPLKHVSKWKSIADCIQLKPDIIIIHEKGHQPTASTFHTEGNNLADKLATQGSYVVNAGKRTADGSEFEKRTADGSEFESPKKKAKVE

SEQ ID NO: 6639 - protein, 2093 aa, synthetic construct
MPAAKRVKLDGGDKKYSIGLDIGTNSVGWAVITDEYKVPSKKFKVLGNTDRHSIKKNLIGALLFDSGETAEATRLKRTARRRYTRRKNRICYLQEIFSNEMAKVDDSFFHRLEESFLVEEDKKHERHPIFGNIVDEVAYHEKYPTIYHLRKKLVDSTDKADLRLIYLALAHMIKFRGHFLIEGDLNPDNSDVDKLFIQLVQTYNQLFEENPINASGVDAKAILSARLSKSRRLENLIAQLPGEKKNGLFGNLIALSLGLTPNFKSNFDLAEDAKLQLSKDTYDDDLDNLLAQIGDQYADLFLAAKNLSDAILLSDILRVNTEITKAPLSASMIKRYDEHHQDLTLLKALVRQQLPEKYKEIFFDQSKNGYAGYIDGGASQEEFYKFIKPILEKMDGTEELLVKLNREDLLRKQRTFDNGSIPHQIHLGELHAILRRQEDFYPFLKDNREKIEKILTFRIPYYVGPLARGNSRFAWMTRKSEETITPWNFEEVVDKGASAQSFIERMTNFDKNLPNEKVLPKHSLLYEYFTVYNELTKVKYVTEGMRKPAFLSGEQKKAIVDLLFKTNRKVTVKQLKEDYFKKIECFDSVEISGVEDRFNASLGTYHDLLKIIKDKDFLDNEENEDILEDIVLTLTLFEDREMIEERLKTYAHLFDDKVMKQLKRRRYTGWGRLSRKLINGIRDKQSGKTILDFLKSDGFANRNFMQLIHDDSLTFKEDIQKAQVSGQGDSLHEHIANLAGSPAIKKGILQTVKVVDELVKVMGRHKPENIVIEMARENQTTQKGQKNSRERMKRIEEGIKELGSQILKEHPVENTQLQNEKLYLYYLQNGRDMYVDQELDINRLSDYDVDHIVPQSFLKDDSIDNKVLTRSDKARGKSDNVPSEEVVKKMKNYWRQLLNAKLITQRKFDNLTKAERGGLSELDKAGFIKRQLVETRQITKHVAQILDSRMNTKYDENDKLIREVKVITLKSKLVSDFRKDFQFYKVREINNYHHAHDAYLNAVVGTALIKKYPKLESEFVYGDYKVYDVRKMIAKSEQEIGKATAKYFFYSNIMNFFKTEITLANGEIRKRPLIETNGETGEIVWDKGRDFATVRKVLSMPQVNIVKKTEVQTGGFSKESILPKRNSDKLIARKKDWDPKKYGGFDSPTVAYSVLVVAKVEKGKSKKLKSVKELLGITIMERSSFEKNPIDFLEAKGYKEVKKDLIIKLPKYSLFELENGRKRMLASAGELQKGNELALPSKYVNFLYLASHYEKLKGSPEDNEQKQLFVEQHKHYLDEIIEQISEFSKRVILADANLDKVLSAYNKHRDKPIREQAENIIHLFTLTNLGAPAAFKYFDTTIDRKRYTSTKEVLDATLIHQSITGLYETRIDLSQLGGDGGEAAAKGGSGGTLNIEDEYRLHETSKEPDVPLGSTWLSDFPQAWAETGGMGLAVRQAPLIIPLKATSTPVSIKQYPMSQEARLGIKPHIQRLLDQGILVPCQSPWNTPLLPVKKPGTNDYRPVQDLREVNKRVEDIHPTVPNPYNLLSGLPPSHQWYTVLDLKDAFFCLRLHPTSQPLFAFEWRDPEMGISGQLTWTRLPQGFKNSPTLFNEALHRDLADFRIQHPDLILLQYVDDLLLAATSEQDCQRGTRALLQTLGNLGYRASAKKAQICQKQVKYLGYLLKEGQRWLTEARKETVMGQPTPKTPRQLREFLGTAGFCRLWIPGFAEMAAPLYPLTKPGTLFNWGPDQQKAYQEIKQALLTAPALGLPDLTKPFELFVDEKQGYAKGVLTQKLGPWRRPVAYLSKKLDPVAAGWPPCLRMVAAIAVLTKDAGKLTMGQPLVILAPHAVEALVKQPPDRWLSNARMTHYQAMLLDTDRVQFGPVVALNPATLLPLPEKEAPHDCLEILAETHGTRPDLTDQPIPDADYTWYTDGSSFLQEGQRRAGAAVTTETEVIWARALPAGTSAQRAELIALTQALKMAEGKKLNVYTDSRYAFATAHVHGEIYRRRGWLTSEGREIKNKNEILALLKALFLPKRLSIIHCPGHQKGNSAEARGNRMADQAAREAAMKAVLETSTLLAGKRTADGSEFEKRTADGSEFESPKKKAKVE

SEQ ID NO: 6640 - protein, 2097 aa, synthetic construct
MPAAKRVKLDGGDKKYSIGLDIGTNSVGWAVITDEYKVPSKKFKVLGNTDRHSIKKNLIGALLFDSGETAEATRLKRTARRRYTRRKNRICYLQEIFSNEMAKVDDSFFHRLEESFLVEEDKKHERHPIFGNIVDEVAYHEKYPTIYHLRKKLVDSTDKADLRLIYLALAHMIKFRGHFLIEGDLNPDNSDVDKLFIQLVQTYNQLFEENPINASGVDAKAILSARLSKSRRLENLIAQLPGEKKNGLFGNLIALSLGLTPNFKSNFDLAEDAKLQLSKDTYDDDLDNLLAQIGDQYADLFLAAKNLSDAILLSDILRVNTEITKAPLSASMIKRYDEHHQDLTLLKALVRQQLPEKYKEIFFDQSKNGYAGYIDGGASQEEFYKFIKPILEKMDGTEELLVKLNREDLLRKQRTFDNGSIPHQIHLGELHAILRRQEDFYPFLKDNREKIEKILTFRIPYYVGPLARGNSRFAWMTRKSEETITPWNFEEVVDKGASAQSFIERMTNFDKNLPNEKVLPKHSLLYEYFTVYNELTKVKYVTEGMRKPAFLSGEQKKAIVDLLFKTNRKVTVKQLKEDYFKKIECFDSVEISGVEDRFNASLGTYHDLLKIIKDKDFLDNEENEDILEDIVLTLTLFEDREMIEERLKTYAHLFDDKVMKQLKRRRYTGWGRLSRKLINGIRDKQSGKTILDFLKSDGFANRNFMQLIHDDSLTFKEDIQKAQVSGQGDSLHEHIANLAGSPAIKKGILQTVKVVDELVKVMGRHKPENIVIEMARENQTTQKGQKNSRERMKRIEEGIKELGSQILKEHPVENTQLQNEKLYLYYLQNGRDMYVDQELDINRLSDYDVDHIVPQSFLKDDSIDNKVLTRSDKARGKSDNVPSEEVVKKMKNYWRQLLNAKLITQRKFDNLTKAERGGLSELDKAGFIKRQLVETRQITKHVAQILDSRMNTKYDENDKLIREVKVITLKSKLVSDFRKDFQFYKVREINNYHHAHDAYLNAVVGTALIKKYPKLESEFVYGDYKVYDVRKMIAKSEQEIGKATAKYFFYSNIMNFFKTEITLANGEIRKRPLIETNGETGEIVWDKGRDFATVRKVLSMPQVNIVKKTEVQTGGFSKESILPKRNSDKLIARKKDWDPKKYGGFDSPTVAYSVLVVAKVEKGKSKKLKSVKELLGITIMERSSFEKNPIDFLEAKGYKEVKKDLIIKLPKYSLFELENGRKRMLASAGELQKGNELALPSKYVNFLYLASHYEKLKGSPEDNEQKQLFVEQHKHYLDEIIEQISEFSKRVILADANLDKVLSAYNKHRDKPIREQAENIIHLFTLTNLGAPAAFKYFDTTIDRKRYTSTKEVLDATLIHQSITGLYETRIDLSQLGGDGGGGSPAPGGTVSLQDEHRLFDIPVTTSLPDVWLQDFPQAWAETGGLGRAKCQAPIIIDLKPTAVPVSIKQYPMSLEAHMGIRQHIIKFLELGVLRPCRSPWNTPLLPVKKPGTQDYRPVQDLREINKRTVDIHPTVPNPYNLLSTLKPDYSWYTVLDLKDAFFCLPLAPQSQELFAFEWKDPERGISGQLTWTRLPQGFKNSPTLFNEALHRDLTDFRTQHPEVTLLQYVDDLLLAAPTKKACTQGTRHLLQELGEKGYRASAKKAQICQTKVTYLGYILSEGKRWLTPGRIETVARIPPPRNPREVREFLGTAGFCRLWIPGFAELAAPLYALTKPSTPFTWQTEHQLAFEALKKALLSAPALGLPDTSKPFTLFLDERQGIAKGVLTQKLGPWKRPVAYLSKKLDPVAAGWPPCLRIMAATAMLVKDSAKLTLGQPLTVITPHTLEAIVRQPPDRWITNARLTHYQALLLDTDRVQFGPPVTLNPATLLPVPENQPSPHDCRQVLAETHGTREDLKDQELPDADHTWYTDGSSYLDSGTRRAGAAVVDGHNTIWAQSLPPGTSAQKAELIALTKALELSKGKKANIYTDSRYAFATAHTHGSIYERRGWLTSEGKEIKNKAEIIALLKALFLPQEVAIIHCPGHQKGQDPVAVGNRQADRVARQAAMAEVLTLATEPDNTSHITAGKRTADGSEFEKRTADGSEFESPKKKAKVE

SEQ ID NO: 6641 - protein, 2168 aa, synthetic construct
MPAAKRVKLDGGDKKYSIGLDIGTNSVGWAVITDEYKVPSKKFKVLGNTDRHSIKKNLIGALLFDSGETAEATRLKRTARRRYTRRKNRICYLQEIFSNEMAKVDDSFFHRLEESFLVEEDKKHERHPIFGNIVDEVAYHEKYPTIYHLRKKLVDSTDKADLRLIYLALAHMIKFRGHFLIEGDLNPDNSDVDKLFIQLVQTYNQLFEENPINASGVDAKAILSARLSKSRRLENLIAQLPGEKKNGLFGNLIALSLGLTPNFKSNFDLAEDAKLQLSKDTYDDDLDNLLAQIGDQYADLFLAAKNLSDAILLSDILRVNTEITKAPLSASMIKRYDEHHQDLTLLKALVRQQLPEKYKEIFFDQSKNGYAGYIDGGASQEEFYKFIKPILEKMDGTEELLVKLNREDLLRKQRTFDNGSIPHQIHLGELHAILRRQEDFYPFLKDNREKIEKILTFRIPYYVGPLARGNSRFAWMTRKSEETITPWNFEEVVDKGASAQSFIERMTNFDKNLPNEKVLPKHSLLYEYFTVYNELTKVKYVTEGMRKPAFLSGEQKKAIVDLLFKTNRKVTVKQLKEDYFKKIECFDSVEISGVEDRFNASLGTYHDLLKIIKDKDFLDNEENEDILEDIVLTLTLFEDREMIEERLKTYAHLFDDKVMKQLKRRRYTGWGRLSRKLINGIRDKQSGKTILDFLKSDGFANRNFMQLIHDDSLTFKEDIQKAQVSGQGDSLHEHIANLAGSPAIKKGILQTVKVVDELVKVMGRHKPENIVIEMARENQTTQKGQKNSRERMKRIEEGIKELGSQILKEHPVENTQLQNEKLYLYYLQNGRDMYVDQELDINRLSDYDVDHIVPQSFLKDDSIDNKVLTRSDKARGKSDNVPSEEVVKKMKNYWRQLLNAKLITQRKFDNLTKAERGGLSELDKAGFIKRQLVETRQITKHVAQILDSRMNTKYDENDKLIREVKVITLKSKLVSDFRKDFQFYKVREINNYHHAHDAYLNAVVGTALIKKYPKLESEFVYGDYKVYDVRKMIAKSEQEIGKATAKYFFYSNIMNFFKTEITLANGEIRKRPLIETNGETGEIVWDKGRDFATVRKVLSMPQVNIVKKTEVQTGGFSKESILPKRNSDKLIARKKDWDPKKYGGFDSPTVAYSVLVVAKVEKGKSKKLKSVKELLGITIMERSSFEKNPIDFLEAKGYKEVKKDLIIKLPKYSLFELENGRKRMLASAGELQKGNELALPSKYVNFLYLASHYEKLKGSPEDNEQKQLFVEQHKHYLDEIIEQISEFSKRVILADANLDKVLSAYNKHRDKPIREQAENIIHLFTLTNLGAPAAFKYFDTTIDRKRYTSTKEVLDATLIHQSITGLYETRIDLSQLGGDGGGGSPAPGGMDLLKPLTVERKGVKIKGYWNSQADITCVPKDLLQGEEPVRQQNVTTIHGTQEGDVYYVNLKIDGRRINTEVIGTTLDYAIITPGDVPWILKKPLELTIKLDLEEQQGTLLNNSILSKKGKEELKQLFEKYSALWQSWENQVGHRRIRPHKIATGTVKPTPQKQYHINPKAKPDIQIVINDLLKQGVLIQKESTMNTPVYPVPKPNGRWRMVLDYRAVNKVTPLIAVQNQHSYGILGSLFKGRYKTTIDLSNGFWAHPIVPEDYWITAFTWQGKQYCWTVLPQGFLNSPGLFNGDVVDLLQGIPNVEVYVDDVYISHDSEKEHLEYLDILFNRLKEAGYIISLKKSNIANSIVDFLGFQITNEGRGLTDTFKEKLENITAPTTLKQLQSILGLLNFARNFIPDFTELIAPLYALIPKSPKNYVPWQIEHSTTLETLITKLNGAEYLQGRKGDKTLIMKVNASYTTGYIRYYNEGEKKPISYVSIVFSKTELKFTELEKLLTTVHKGLLKALDLSMGQNIHVYSPIVSMQNIQKTPQTAKKALASRWLSWLSYLEDPRIRFFYDPQMPALKDLPAVDTGKDNKKHPSNFQHIFYTDGSAITSPTKEGHLNAGMGIVYFINKDGNLQKQQEWSISLGNHTAQFAEIAAFEFALKKCLPLGGNILVVTDSNYVAKAYNEELDVWASNGFVNNRKKPLKHISKWKSVADLKRLRPDVVVTHEPGHQKLDSSPHAYGNNLADQLATQASFKVHAGKRTADGSEFEKRTADGSEFESPKKKAKVE

SEQ ID NO: 6642 - protein, 2090 aa, synthetic construct
MPAAKRVKLDGGDKKYSIGLDIGTNSVGWAVITDEYKVPSKKFKVLGNTDRHSIKKNLIGALLFDSGETAEATRLKRTARRRYTRRKNRICYLQEIFSNEMAKVDDSFFHRLEESFLVEEDKKHERHPIFGNIVDEVAYHEKYPTIYHLRKKLVDSTDKADLRLIYLALAHMIKFRGHFLIEGDLNPDNSDVDKLFIQLVQTYNQLFEENPINASGVDAKAILSARLSKSRRLENLIAQLPGEKKNGLFGNLIALSLGLTPNFKSNFDLAEDAKLQLSKDTYDDDLDNLLAQIGDQYADLFLAAKNLSDAILLSDILRVNTEITKAPLSASMIKRYDEHHQDLTLLKALVRQQLPEKYKEIFFDQSKNGYAGYIDGGASQEEFYKFIKPILEKMDGTEELLVKLNREDLLRKQRTFDNGSIPHQIHLGELHAILRRQEDFYPFLKDNREKIEKILTFRIPYYVGPLARGNSRFAWMTRKSEETITPWNFEEVVDKGASAQSFIERMTNFDKNLPNEKVLPKHSLLYEYFTVYNELTKVKYVTEGMRKPAFLSGEQKKAIVDLLFKTNRKVTVKQLKEDYFKKIECFDSVEISGVEDRFNASLGTYHDLLKIIKDKDFLDNEENEDILEDIVLTLTLFEDREMIEERLKTYAHLFDDKVMKQLKRRRYTGWGRLSRKLINGIRDKQSGKTILDFLKSDGFANRNFMQLIHDDSLTFKEDIQKAQVSGQGDSLHEHIANLAGSPAIKKGILQTVKVVDELVKVMGRHKPENIVIEMARENQTTQKGQKNSRERMKRIEEGIKELGSQILKEHPVENTQLQNEKLYLYYLQNGRDMYVDQELDINRLSDYDVDHIVPQSFLKDDSIDNKVLTRSDKARGKSDNVPSEEVVKKMKNYWRQLLNAKLITQRKFDNLTKAERGGLSELDKAGFIKRQLVETRQITKHVAQILDSRMNTKYDENDKLIREVKVITLKSKLVSDFRKDFQFYKVREINNYHHAHDAYLNAVVGTALIKKYPKLESEFVYGDYKVYDVRKMIAKSEQEIGKATAKYFFYSNIMNFFKTEITLANGEIRKRPLIETNGETGEIVWDKGRDFATVRKVLSMPQVNIVKKTEVQTGGFSKESILPKRNSDKLIARKKDWDPKKYGGFDSPTVAYSVLVVAKVEKGKSKKLKSVKELLGITIMERSSFEKNPIDFLEAKGYKEVKKDLIIKLPKYSLFELENGRKRMLASAGELQKGNELALPSKYVNFLYLASHYEKLKGSPEDNEQKQLFVEQHKHYLDEIIEQISEFSKRVILADANLDKVLSAYNKHRDKPIREQAENIIHLFTLTNLGAPAAFKYFDTTIDRKRYTSTKEVLDATLIHQSITGLYETRIDLSQLGGDGGGGSPAPGGTLQLEEEYRLFEPESTQKQEMDIWLKNFPQAWAETGGMGTAHCQAPVLIQLKATATPISIRQYPMPHEAYQGIKPHIRRMLDQGILKPCQSPWNTPLLPVKKPGTEDYRPVQDLREVNKRVEDIHPTVPNPYNLLSTLPPSHPWYTVLDLKDAFFCLRLHSESQLLFAFEWRDPEIGLSGQLTWTRLPQGFKNSPTLFNEALHSDLADFRVRYPALVLLQYVDDLLLAAATRTECLEGTKALLETLGNKGYRASAKKAQICLQEVTYLGYSLKDGQRWLTKARKEAILSIPVPKNSRQVREFLGKAGYCRLFIPGFAELAAPLYPLTRPGTLFQWGTEQQLAFEDIKKALLSSPALGLPDITKPFELFIDENSGFAKGVLVQKLGPWKRPVAYLSKKLDTVASGWPPCLRMVAAIAILVKDAGKLTLGQPLTILTSHPVEALVRQPPNKWLSNARMTHYQAMLLDAERVHFGPTVSLNPATLLPLPSGGNHHDCLQILAETHGTRPDLTDQPLPDADLTWYTDGSSFIRNGEREAGAAVTTESEVIWAAPLPPGTSAQRAELIALTQALKMAEGKKLTVYTDSRYAFATTHVHGEIYRRRGWLTSEGKEIKNKNEILALLEALFLPKRLSIIHCPGHQKGDSPQAKGNRLADDTAKKAATETHSSLTVLPAGKRTADGSEFEKRTADGSEFESPKKKAKVE

SEQ ID NO: 6643 - protein, 2171 aa, synthetic construct
MPAAKRVKLDGGDKKYSIGLDIGTNSVGWAVITDEYKVPSKKFKVLGNTDRHSIKKNLIGALLFDSGETAEATRLKRTARRRYTRRKNRICYLQEIFSNEMAKVDDSFFHRLEESFLVEEDKKHERHPIFGNIVDEVAYHEKYPTIYHLRKKLVDSTDKADLRLIYLALAHMIKFRGHFLIEGDLNPDNSDVDKLFIQLVQTYNQLFEENPINASGVDAKAILSARLSKSRRLENLIAQLPGEKKNGLFGNLIALSLGLTPNFKSNFDLAEDAKLQLSKDTYDDDLDNLLAQIGDQYADLFLAAKNLSDAILLSDILRVNTEITKAPLSASMIKRYDEHHQDLTLLKALVRQQLPEKYKEIFFDQSKNGYAGYIDGGASQEEFYKFIKPILEKMDGTEELLVKLNREDLLRKQRTFDNGSIPHQIHLGELHAILRRQEDFYPFLKDNREKIEKILTFRIPYYVGPLARGNSRFAWMTRKSEETITPWNFEEVVDKGASAQSFIERMTNFDKNLPNEKVLPKHSLLYEYFTVYNELTKVKYVTEGMRKPAFLSGEQKKAIVDLLFKTNRKVTVKQLKEDYFKKIECFDSVEISGVEDRFNASLGTYHDLLKIIKDKDFLDNEENEDILEDIVLTLTLFEDREMIEERLKTYAHLFDDKVMKQLKRRRYTGWGRLSRKLINGIRDKQSGKTILDFLKSDGFANRNFMQLIHDDSLTFKEDIQKAQVSGQGDSLHEHIANLAGSPAIKKGILQTVKVVDELVKVMGRHKPENIVIEMARENQTTQKGQKNSRERMKRIEEGIKELGSQILKEHPVENTQLQNEKLYLYYLQNGRDMYVDQELDINRLSDYDVDHIVPQSFLKDDSIDNKVLTRSDKARGKSDNVPSEEVVKKMKNYWRQLLNAKLITQRKFDNLTKAERGGLSELDKAGFIKRQLVETRQITKHVAQILDSRMNTKYDENDKLIREVKVITLKSKLVSDFRKDFQFYKVREINNYHHAHDAYLNAVVGTALIKKYPKLESEFVYGDYKVYDVRKMIAKSEQEIGKATAKYFFYSNIMNFFKTEITLANGEIRKRPLIETNGETGEIVWDKGRDFATVRKVLSMPQVNIVKKTEVQTGGFSKESILPKRNSDKLIARKKDWDPKKYGGFDSPTVAYSVLVVAKVEKGKSKKLKSVKELLGITIMERSSFEKNPIDFLEAKGYKEVKKDLIIKLPKYSLFELENGRKRMLASAGELQKGNELALPSKYVNFLYLASHYEKLKGSPEDNEQKQLFVEQHKHYLDEIIEQISEFSKRVILADANLDKVLSAYNKHRDKPIREQAENIIHLFTLTNLGAPAAFKYFDTTIDRKRYTSTKEVLDATLIHQSITGLYETRIDLSQLGGDGGGGSPAPGGMNPLQLLQPLPAEIKGTKLLAHWNSGATITCIPESFLEDEQPIKKTLIKTIHGEKQQNVYYVTFKVKGRKVEAEVIASPYEYILLSPTDVPWLTQQPLQLTILVPLQEYQEKILSKTALPEDQKQQLKTLFVKYDNLWQHWENQVGHRKIRPHNIATGDYPPRPQKQYPINPKAKPSIQIVIDDLLKQGVLTPQNSTMNTPVYPVPKPDGRWRMVLDYREVNKTIPLTAAQNQHSAGILATIVRQKYKTTLDLANGFWAHPITPESYWLTAFTWQGKQYCWTRLPQGFLNSPALFNADVVDLLKEIPNVQVYVDDIYLSHDDPKEHVQQLEKVFQILLQAGYVVSLKKSEIGQKTVEFLGFNITKEGRGLTDTFKTKLLNITPPKDLKQLQSILGKLNFARNFIPNFAELVQPLYNLIAPAKGKYIEWSEENTKQLNMVIEALNTASNLEERLPEQRLVIKVNTSPSAGYVRYYNETGKKPIMYLNYVFSKAELKFSMLEKLLTTMHKALIKAMDLAMGQEILVYSPIVSMTKIQKTPLPERKALPIRWITWMTYLEDPRIQFHYDKTLPELKHIPDVYTSSQSPVKHPSQYEGVFYTDGSAIKSPDPTKSNNAGMGIVHATYKPEYQVLNQWSIPLGNHTAQMAEIAAVEFACKKALKIPGPVLVITDSFYVAESANKELPYWKSNGFVNNKKKPLKHISKWKSIAECLSMKPDITIQHEKGISLQIPVFILKGNALADKLATQGSYVVNAGKRTADGSEFEKRTADGSEFESPKKKAKVE

SEQ ID NO: 6644 - protein, 2089 aa, synthetic construct
MPAAKRVKLDGGDKKYSIGLDIGTNSVGWAVITDEYKVPSKKFKVLGNTDRHSIKKNLIGALLFDSGETAEATRLKRTARRRYTRRKNRICYLQEIFSNEMAKVDDSFFHRLEESFLVEEDKKHERHPIFGNIVDEVAYHEKYPTIYHLRKKLVDSTDKADLRLIYLALAHMIKFRGHFLIEGDLNPDNSDVDKLFIQLVQTYNQLFEENPINASGVDAKAILSARLSKSRRLENLIAQLPGEKKNGLFGNLIALSLGLTPNFKSNFDLAEDAKLQLSKDTYDDDLDNLLAQIGDQYADLFLAAKNLSDAILLSDILRVNTEITKAPLSASMIKRYDEHHQDLTLLKALVRQQLPEKYKEIFFDQSKNGYAGYIDGGASQEEFYKFIKPILEKMDGTEELLVKLNREDLLRKQRTFDNGSIPHQIHLGELHAILRRQEDFYPFLKDNREKIEKILTFRIPYYVGPLARGNSRFAWMTRKSEETITPWNFEEVVDKGASAQSFIERMTNFDKNLPNEKVLPKHSLLYEYFTVYNELTKVKYVTEGMRKPAFLSGEQKKAIVDLLFKTNRKVTVKQLKEDYFKKIECFDSVEISGVEDRFNASLGTYHDLLKIIKDKDFLDNEENEDILEDIVLTLTLFEDREMIEERLKTYAHLFDDKVMKQLKRRRYTGWGRLSRKLINGIRDKQSGKTILDFLKSDGFANRNFMQLIHDDSLTFKEDIQKAQVSGQGDSLHEHIANLAGSPAIKKGILQTVKVVDELVKVMGRHKPENIVIEMARENQTTQKGQKNSRERMKRIEEGIKELGSQILKEHPVENTQLQNEKLYLYYLQNGRDMYVDQELDINRLSDYDVDHIVPQSFLKDDSIDNKVLTRSDKARGKSDNVPSEEVVKKMKNYWRQLLNAKLITQRKFDNLTKAERGGLSELDKAGFIKRQLVETRQITKHVAQILDSRMNTKYDENDKLIREVKVITLKSKLVSDFRKDFQFYKVREINNYHHAHDAYLNAVVGTALIKKYPKLESEFVYGDYKVYDVRKMIAKSEQEIGKATAKYFFYSNIMNFFKTEITLANGEIRKRPLIETNGETGEIVWDKGRDFATVRKVLSMPQVNIVKKTEVQTGGFSKESILPKRNSDKLIARKKDWDPKKYGGFDSPTVAYSVLVVAKVEKGKSKKLKSVKELLGITIMERSSFEKNPIDFLEAKGYKEVKKDLIIKLPKYSLFELENGRKRMLASAGELQKGNELALPSKYVNFLYLASHYEKLKGSPEDNEQKQLFVEQHKHYLDEIIEQISEFSKRVILADANLDKVLSAYNKHRDKPIREQAENIIHLFTLTNLGAPAAFKYFDTTIDRKRYTSTKEVLDATLIHQSITGLYETRIDLSQLGGDGGGGSPAPGGVLNLEEEYRLHEKPVPSSIDPSWLQLFPTVWAERAGMGLANQVPPVVVELRSGASPVAVRQYPMSKEAREGIRPHIQKFLDLGVLVPCRSPWNTPLLPVKKPGTNDYRPVQDLREINKRVQDIHPTVPNPYNLLSSLPPSYTWYSVLDLKDAFFCLRLHPNSQPLFAFEWKDPEKGNTGQLTWTRLPQGFKNSPTLFNEALHRDLAPFRALNPQVVLLQYVDDLLVAAPTYEDCKKGTQKLLQELSKLGYRVSAKKAQLCQREVTYLGYLLKEGKRWLTPARKATVMKIPVPTTPRQVREFLGTAGFCRLWIPGFASLAAPLYPLTKPSIPFIWTEEHQQAFDHIKKALLSAPALALPDLTKPFTLYIDERAGVARGVLTQTLGPWRRPVAYLSKKLDPVASGWPTCLKAVAAVALLLKDADKLTLGQNVTVIASHSLESIVRQPPDRWMTNARMTHYQSLLLNERVSFAPPAVLNPATLLPVESEATPVHRCSEILAEETGTRRDLEDQPLPGVPTWYTDGSSFITEGKRRAGAPIVDGKRTVWASSLPEGTSAQKAELVALTQALRLAEGKNINIYTDSRYAFATAHIHGAIYKQRGWLTSAGKDIKNKEEILALLEAIHLPRRVAIIHCPGHQRGSNPVATGNRRADEAAKQAALSTRVLAGTTKPAGKRTADGSEFEKRTADGSEFESPKKKAKVE

SEQ ID NO: 6645 - protein, 2213 aa, synthetic construct
MPAAKRVKLDGGDKKYSIGLDIGTNSVGWAVITDEYKVPSKKFKVLGNTDRHSIKKNLIGALLFDSGETAEATRLKRTARRRYTRRKNRICYLQEIFSNEMAKVDDSFFHRLEESFLVEEDKKHERHPIFGNIVDEVAYHEKYPTIYHLRKKLVDSTDKADLRLIYLALAHMIKFRGHFLIEGDLNPDNSDVDKLFIQLVQTYNQLFEENPINASGVDAKAILSARLSKSRRLENLIAQLPGEKKNGLFGNLIALSLGLTPNFKSNFDLAEDAKLQLSKDTYDDDLDNLLAQIGDQYADLFLAAKNLSDAILLSDILRVNTEITKAPLSASMIKRYDEHHQDLTLLKALVRQQLPEKYKEIFFDQSKNGYAGYIDGGASQEEFYKFIKPILEKMDGTEELLVKLNREDLLRKQRTFDNGSIPHQIHLGELHAILRRQEDFYPFLKDNREKIEKILTFRIPYYVGPLARGNSRFAWMTRKSEETITPWNFEEVVDKGASAQSFIERMTNFDKNLPNEKVLPKHSLLYEYFTVYNELTKVKYVTEGMRKPAFLSGEQKKAIVDLLFKTNRKVTVKQLKEDYFKKIECFDSVEISGVEDRFNASLGTYHDLLKIIKDKDFLDNEENEDILEDIVLTLTLFEDREMIEERLKTYAHLFDDKVMKQLKRRRYTGWGRLSRKLINGIRDKQSGKTILDFLKSDGFANRNFMQLIHDDSLTFKEDIQKAQVSGQGDSLHEHIANLAGSPAIKKGILQTVKVVDELVKVMGRHKPENIVIEMARENQTTQKGQKNSRERMKRIEEGIKELGSQILKEHPVENTQLQNEKLYLYYLQNGRDMYVDQELDINRLSDYDVDHIVPQSFLKDDSIDNKVLTRSDKARGKSDNVPSEEVVKKMKNYWRQLLNAKLITQRKFDNLTKAERGGLSELDKAGFIKRQLVETRQITKHVAQILDSRMNTKYDENDKLIREVKVITLKSKLVSDFRKDFQFYKVREINNYHHAHDAYLNAVVGTALIKKYPKLESEFVYGDYKVYDVRKMIAKSEQEIGKATAKYFFYSNIMNFFKTEITLANGEIRKRPLIETNGETGEIVWDKGRDFATVRKVLSMPQVNIVKKTEVQTGGFSKESILPKRNSDKLIARKKDWDPKKYGGFDSPTVAYSVLVVAKVEKGKSKKLKSVKELLGITIMERSSFEKNPIDFLEAKGYKEVKKDLIIKLPKYSLFELENGRKRMLASAGELQKGNELALPSKYVNFLYLASHYEKLKGSPEDNEQKQLFVEQHKHYLDEIIEQISEFSKRVILADANLDKVLSAYNKHRDKPIREQAENIIHLFTLTNLGAPAAFKYFDTTIDRKRYTSTKEVLDATLIHQSITGLYETRIDLSQLGGDGGGGSPAPGGTLGDQGSRGSDPLPEPRVTLTVEGIPTEFLVNTGAEHSVLTKPMGKMGSKRTVVAGATGSKVYPWTTKRLLKIGQKQVTHSFLVIPECPAPLLGRDLLTKLKAQIQFSTEGPQVTWEDRPAMCLVLNLEEEYRLHEKPVPPSIDPSWLQLFPMVWAEKAGMGLANQVPPVVVELKSDASPVAVRQYPMSKEAREGIRPHIQRFLDLGILVPCQSPWNTPLLPVKKPGTNDYRPVQDLREVNKRVQDIHPTVPNPYNLLSSLPPSHTWYSVLDLKDAFFCLKLHPNSQPLFAFEWRDPEKGNTGQLTWTRLPQGFKNSPTLFNEALHRDLASFRALNPQVVMLQYVDDLLVAAPTYRDCKEGTRRLLQELSKLGYRVSAKKAQLCREEVTYLGYLLKGGKRWLTPARKATVMKIPTPTTPRQVREFLGTAGFCRLWIPGFASLAAPLYPLTRPKVPFTWTEAHQEAFGRIKEALLSAPALALPDLTKPFALYVDEKEGVARGVLTQTLGPWRRPVAYLSKKLDPVASGWPTCLKAIAAVALLLKDADKLTLGQNVLVIAPHNLESIVRQPPDRWMTNARMTHYQSLLLNERVSFAPPAILNPATLLPVESDDTPIHICSEILAEETGTRPDLRDQPLPGVPAWYTDGSSFIMDGRRQAGAAIVDNKRTVWASNLPEGTSAQKAELIALTQALRLAEGKSINIYTDSRYAFATAHVHGAIYKQRGWLTSAGKDIKNKEEILALLEAIHLPKRVAIIHCPGHQRGTDPVATGNRKADEAAKQAAQSTRILTETTKNAGKRTADGSEFEKRTADGSEFESPKKKAKVE

SEQ ID NO: 6646 - protein, 2213 aa, synthetic construct
MPAAKRVKLDGGDKKYSIGLDIGTNSVGWAVITDEYKVPSKKFKVLGNTDRHSIKKNLIGALLFDSGETAEATRLKRTARRRYTRRKNRICYLQEIFSNEMAKVDDSFFHRLEESFLVEEDKKHERHPIFGNIVDEVAYHEKYPTIYHLRKKLVDSTDKADLRLIYLALAHMIKFRGHFLIEGDLNPDNSDVDKLFIQLVQTYNQLFEENPINASGVDAKAILSARLSKSRRLENLIAQLPGEKKNGLFGNLIALSLGLTPNFKSNFDLAEDAKLQLSKDTYDDDLDNLLAQIGDQYADLFLAAKNLSDAILLSDILRVNTEITKAPLSASMIKRYDEHHQDLTLLKALVRQQLPEKYKEIFFDQSKNGYAGYIDGGASQEEFYKFIKPILEKMDGTEELLVKLNREDLLRKQRTFDNGSIPHQIHLGELHAILRRQEDFYPFLKDNREKIEKILTFRIPYYVGPLARGNSRFAWMTRKSEETITPWNFEEVVDKGASAQSFIERMTNFDKNLPNEKVLPKHSLLYEYFTVYNELTKVKYVTEGMRKPAFLSGEQKKAIVDLLFKTNRKVTVKQLKEDYFKKIECFDSVEISGVEDRFNASLGTYHDLLKIIKDKDFLDNEENEDILEDIVLTLTLFEDREMIEERLKTYAHLFDDKVMKQLKRRRYTGWGRLSRKLINGIRDKQSGKTILDFLKSDGFANRNFMQLIHDDSLTFKEDIQKAQVSGQGDSLHEHIANLAGSPAIKKGILQTVKVVDELVKVMGRHKPENIVIEMARENQTTQKGQKNSRERMKRIEEGIKELGSQILKEHPVENTQLQNEKLYLYYLQNGRDMYVDQELDINRLSDYDVDHIVPQSFLKDDSIDNKVLTRSDKARGKSDNVPSEEVVKKMKNYWRQLLNAKLITQRKFDNLTKAERGGLSELDKAGFIKRQLVETRQITKHVAQILDSRMNTKYDENDKLIREVKVITLKSKLVSDFRKDFQFYKVREINNYHHAHDAYLNAVVGTALIKKYPKLESEFVYGDYKVYDVRKMIAKSEQEIGKATAKYFFYSNIMNFFKTEITLANGEIRKRPLIETNGETGEIVWDKGRDFATVRKVLSMPQVNIVKKTEVQTGGFSKESILPKRNSDKLIARKKDWDPKKYGGFDSPTVAYSVLVVAKVEKGKSKKLKSVKELLGITIMERSSFEKNPIDFLEAKGYKEVKKDLIIKLPKYSLFELENGRKRMLASAGELQKGNELALPSKYVNFLYLASHYEKLKGSPEDNEQKQLFVEQHKHYLDEIIEQISEFSKRVILADANLDKVLSAYNKHRDKPIREQAENIIHLFTLTNLGAPAAFKYFDTTIDRKRYTSTKEVLDATLIHQSITGLYETRIDLSQLGGDGGGGSPAPGGTLGDQGSRGSDPLPEPRVTLTVEGIPTEFLVNTGAEHSVLTKPMGKMGSKRTVVAGATGSKVYPWTTKRLLKIGQKQVTHSFLVIPECPAPLLGRDLLTKLKAQIQFSTEGPQVTWEDRPAMCLVLNLEEEYRLHEKPVPPSIDPSWLQLFPMVWAEKAGMGLANQVPPVVVELKSDASPVAVRQYPMSKEAREGIRPHIQRFLDLGILVPCQSPWNTPLLPVKKPGTNDYRPVQDLREVNKRVQDIHPTVPNPYNLLSSLPPSHTWYSVLDLKDAFFCLKLHPNSQPLFAFEWRDPEKGNTGQLTWTRLPQGFKNSPTLFNEALHRDLASFRALNPQVVMLQYVDDLLVAAPTYRDCKEGTRRLLQELSKLGYRVSAKKAQLCREEVTYLGYLLKGGKRWLTPARKATVMKIPTPTTPRQVREFLGKAGFCRLFIPGFASLAAPLYPLTRPKVPFTWTEAHQEAFGRIKEALLSAPALALPDLTKPFALYVDEKEGVARGVLTQTLGPWRRPVAYLSKKLDPVASGWPTCLKAIAAVALLLKDADKLTLGQNVLVIAPHNLESIVRQPPDRWMTNARMTHYQSLLLNERVSFAPPAILNPATLLPVESDDTPIHICSEILAEETGTRPDLRDQPLPGVPAWYTDGSSFIMDGRRQAGAAIVDNKRTVWASNLPEGTSAQKAELIALTQALRLAEGKSINIYTDSRYAFATAHVHGAIYKQRGWLTSAGKDIKNKEEILALLEAIHLPKRVAIIHCPGHQRGTDPVATGNRKADEAAKQAAQSTRILTETTKNAGKRTADGSEFEKRTADGSEFESPKKKAKVE

SEQ ID NO: 6647 - protein, 2091 aa, synthetic construct
MPAAKRVKLDGGDKKYSIGLDIGTNSVGWAVITDEYKVPSKKFKVLGNTDRHSIKKNLIGALLFDSGETAEATRLKRTARRRYTRRKNRICYLQEIFSNEMAKVDDSFFHRLEESFLVEEDKKHERHPIFGNIVDEVAYHEKYPTIYHLRKKLVDSTDKADLRLIYLALAHMIKFRGHFLIEGDLNPDNSDVDKLFIQLVQTYNQLFEENPINASGVDAKAILSARLSKSRRLENLIAQLPGEKKNGLFGNLIALSLGLTPNFKSNFDLAEDAKLQLSKDTYDDDLDNLLAQIGDQYADLFLAAKNLSDAILLSDILRVNTEITKAPLSASMIKRYDEHHQDLTLLKALVRQQLPEKYKEIFFDQSKNGYAGYIDGGASQEEFYKFIKPILEKMDGTEELLVKLNREDLLRKQRTFDNGSIPHQIHLGELHAILRRQEDFYPFLKDNREKIEKILTFRIPYYVGPLARGNSRFAWMTRKSEETITPWNFEEVVDKGASAQSFIERMTNFDKNLPNEKVLPKHSLLYEYFTVYNELTKVKYVTEGMRKPAFLSGEQKKAIVDLLFKTNRKVTVKQLKEDYFKKIECFDSVEISGVEDRFNASLGTYHDLLKIIKDKDFLDNEENEDILEDIVLTLTLFEDREMIEERLKTYAHLFDDKVMKQLKRRRYTGWGRLSRKLINGIRDKQSGKTILDFLKSDGFANRNFMQLIHDDSLTFKEDIQKAQVSGQGDSLHEHIANLAGSPAIKKGILQTVKVVDELVKVMGRHKPENIVIEMARENQTTQKGQKNSRERMKRIEEGIKELGSQILKEHPVENTQLQNEKLYLYYLQNGRDMYVDQELDINRLSDYDVDHIVPQSFLKDDSIDNKVLTRSDKARGKSDNVPSEEVVKKMKNYWRQLLNAKLITQRKFDNLTKAERGGLSELDKAGFIKRQLVETRQITKHVAQILDSRMNTKYDENDKLIREVKVITLKSKLVSDFRKDFQFYKVREINNYHHAHDAYLNAVVGTALIKKYPKLESEFVYGDYKVYDVRKMIAKSEQEIGKATAKYFFYSNIMNFFKTEITLANGEIRKRPLIETNGETGEIVWDKGRDFATVRKVLSMPQVNIVKKTEVQTGGFSKESILPKRNSDKLIARKKDWDPKKYGGFDSPTVAYSVLVVAKVEKGKSKKLKSVKELLGITIMERSSFEKNPIDFLEAKGYKEVKKDLIIKLPKYSLFELENGRKRMLASAGELQKGNELALPSKYVNFLYLASHYEKLKGSPEDNEQKQLFVEQHKHYLDEIIEQISEFSKRVILADANLDKVLSAYNKHRDKPIREQAENIIHLFTLTNLGAPAAFKYFDTTIDRKRYTSTKEVLDATLIHQSITGLYETRIDLSQLGGDGGGGSPAPGGTLNIEDEYRLHETSKEPDVSLGSTWLSDFPQAWAETGGMGLAVRQAPLIIPLKATSTPVSIKQYPMSQEARLGIKPHIQRLLDQGILVPCQSPWNTPLLPVKKPGTNDYRPVQDLREVNKRVEDIHPTVPNPYNLLSGLPPSHQWYTVLDLKDAFFCLRLHPTSQPLFAFEWRDPEMGISGQLTWTRLPQGFKNSPTLFNEALHRDLAGFRIQHPDLILLQYVDDLLLAATSELDCQQGTRALLQTLGDLGYRASAKKAQICQKQVKYLGYLLKEGQRWLTEARKETVMGQPIPKTPRQLREFLGTAGFCRLWIPGFAEMAAPLYPLTKPGTLFNWGPDQQKAFQEIKQALLTAPALGLPDLTKPFELFVDEKQGYAKGVLTQKLGPWRRPVAYLSKKLDPVAAGWPPCLRMVAAIAVLTKDAGKLTMGQPLVILAPHAVEALVKQPPDRWLSNARMTHYQALLLDTDRVQFGPVVALNPATLLPLPEEGLQHDCLDILAEAHGTRSDLMDQPLPDADHTWYTDGSSFLQEGQRKAGAAVTTETEVIWARALPAGTSAQRAELIALTQALKMAEGKKLNVYTDSRYAFATAHIHGEIYRRRGWLTSEGKEIKNKDEILALLKALFLPKRLSIIHCPGHQKGNSAEARGNRMADQAAREVATRETPETSTLLAGKRTADGSEFEKRTADGSEFESPKKKAKVE

SEQ ID NO: 6648 - protein, 2091 aa, synthetic construct
MPAAKRVKLDGGDKKYSIGLDIGTNSVGWAVITDEYKVPSKKFKVLGNTDRHSIKKNLIGALLFDSGETAEATRLKRTARRRYTRRKNRICYLQEIFSNEMAKVDDSFFHRLEESFLVEEDKKHERHPIFGNIVDEVAYHEKYPTIYHLRKKLVDSTDKADLRLIYLALAHMIKFRGHFLIEGDLNPDNSDVDKLFIQLVQTYNQLFEENPINASGVDAKAILSARLSKSRRLENLIAQLPGEKKNGLFGNLIALSLGLTPNFKSNFDLAEDAKLQLSKDTYDDDLDNLLAQIGDQYADLFLAAKNLSDAILLSDILRVNTEITKAPLSASMIKRYDEHHQDLTLLKALVRQQLPEKYKEIFFDQSKNGYAGYIDGGASQEEFYKFIKPILEKMDGTEELLVKLNREDLLRKQRTFDNGSIPHQIHLGELHAILRRQEDFYPFLKDNREKIEKILTFRIPYYVGPLARGNSRFAWMTRKSEETITPWNFEEVVDKGASAQSFIERMTNFDKNLPNEKVLPKHSLLYEYFTVYNELTKVKYVTEGMRKPAFLSGEQKKAIVDLLFKTNRKVTVKQLKEDYFKKIECFDSVEISGVEDRFNASLGTYHDLLKIIKDKDFLDNEENEDILEDIVLTLTLFEDREMIEERLKTYAHLFDDKVMKQLKRRRYTGWGRLSRKLINGIRDKQSGKTILDFLKSDGFANRNFMQLIHDDSLTFKEDIQKAQVSGQGDSLHEHIANLAGSPAIKKGILQTVKVVDELVKVMGRHKPENIVIEMARENQTTQKGQKNSRERMKRIEEGIKELGSQILKEHPVENTQLQNEKLYLYYLQNGRDMYVDQELDINRLSDYDVDHIVPQSFLKDDSIDNKVLTRSDKARGKSDNVPSEEVVKKMKNYWRQLLNAKLITQRKFDNLTKAERGGLSELDKAGFIKRQLVETRQITKHVAQILDSRMNTKYDENDKLIREVKVITLKSKLVSDFRKDFQFYKVREINNYHHAHDAYLNAVVGTALIKKYPKLESEFVYGDYKVYDVRKMIAKSEQEIGKATAKYFFYSNIMNFFKTEITLANGEIRKRPLIETNGETGEIVWDKGRDFATVRKVLSMPQVNIVKKTEVQTGGFSKESILPKRNSDKLIARKKDWDPKKYGGFDSPTVAYSVLVVAKVEKGKSKKLKSVKELLGITIMERSSFEKNPIDFLEAKGYKEVKKDLIIKLPKYSLFELENGRKRMLASAGELQKGNELALPSKYVNFLYLASHYEKLKGSPEDNEQKQLFVEQHKHYLDEIIEQISEFSKRVILADANLDKVLSAYNKHRDKPIREQAENIIHLFTLTNLGAPAAFKYFDTTIDRKRYTSTKEVLDATLIHQSITGLYETRIDLSQLGGDGGGGSPAPGGTLNIEDEYRLHETSKGPDVPLGSTWLSDFPQAWAETGGMGLAVRQAPLIIPLKATSTPVSIKQYPMSQEARLGIKPHIQRLLDQGILVPCQSPWNTPLLPVKKPGTNDYRPVQDLREVNKRVEDIHPTVPNPYNLLSGLPPSHQWYTVLDLKDAFFCLRLHPTSQSLFAFEWRDPEMGISGQLTWTRLPQGFKNSPTLFNEALHRDLADFRIQHPDLILLQYVDDLLLAATSELDCQQGTRALLQTLGDLGYRASAKKAQICQKQVKYLGYLLKEGQRWLTEARKETVMGQPTPKTPRQLREFLGKAGFCRLFIPGFAEMAAPLYPLTKPGTLFEWGPDQQKAYQEIKQALLTAPALGLPDLTKPFELFVDEKQGYAKGVLTQKLGPWRRPVAYLSKKLDPVAAGWPPCLRMVAAIAVLTKDAGKLTMGQPLVILAPHAVEALVKQPPDRWLSNARMTHYQALLLDTDRVQFGPIVALNPATLLPLPEEGLQHDCLDILAEAHGTRPDLTDQPLPDADHTWYTDGSSFLQEGQRKAGAAVTTETEVVWAKALPAGTSAQRAELIALTQALKMAEGKKLNVYTDSRYAFATAHIHGEIYRRRGWLTSEGKEIKNKDEILALLKALFLPKRLSIIHCPGHQKGNRAEARGNRMADQAAREVATRETPETSTLLAGKRTADGSEFEKRTADGSEFESPKKKAKVE

SEQ ID NO: 6649 - protein, 2082 aa, synthetic construct
MPAAKRVKLDGGDKKYSIGLDIGTNSVGWAVITDEYKVPSKKFKVLGNTDRHSIKKNLIGALLFDSGETAEATRLKRTARRRYTRRKNRICYLQEIFSNEMAKVDDSFFHRLEESFLVEEDKKHERHPIFGNIVDEVAYHEKYPTIYHLRKKLVDSTDKADLRLIYLALAHMIKFRGHFLIEGDLNPDNSDVDKLFIQLVQTYNQLFEENPINASGVDAKAILSARLSKSRRLENLIAQLPGEKKNGLFGNLIALSLGLTPNFKSNFDLAEDAKLQLSKDTYDDDLDNLLAQIGDQYADLFLAAKNLSDAILLSDILRVNTEITKAPLSASMIKRYDEHHQDLTLLKALVRQQLPEKYKEIFFDQSKNGYAGYIDGGASQEEFYKFIKPILEKMDGTEELLVKLNREDLLRKQRTFDNGSIPHQIHLGELHAILRRQEDFYPFLKDNREKIEKILTFRIPYYVGPLARGNSRFAWMTRKSEETITPWNFEEVVDKGASAQSFIERMTNFDKNLPNEKVLPKHSLLYEYFTVYNELTKVKYVTEGMRKPAFLSGEQKKAIVDLLFKTNRKVTVKQLKEDYFKKIECFDSVEISGVEDRFNASLGTYHDLLKIIKDKDFLDNEENEDILEDIVLTLTLFEDREMIEERLKTYAHLFDDKVMKQLKRRRYTGWGRLSRKLINGIRDKQSGKTILDFLKSDGFANRNFMQLIHDDSLTFKEDIQKAQVSGQGDSLHEHIANLAGSPAIKKGILQTVKVVDELVKVMGRHKPENIVIEMARENQTTQKGQKNSRERMKRIEEGIKELGSQILKEHPVENTQLQNEKLYLYYLQNGRDMYVDQELDINRLSDYDVDHIVPQSFLKDDSIDNKVLTRSDKARGKSDNVPSEEVVKKMKNYWRQLLNAKLITQRKFDNLTKAERGGLSELDKAGFIKRQLVETRQITKHVAQILDSRMNTKYDENDKLIREVKVITLKSKLVSDFRKDFQFYKVREINNYHHAHDAYLNAVVGTALIKKYPKLESEFVYGDYKVYDVRKMIAKSEQEIGKATAKYFFYSNIMNFFKTEITLANGEIRKRPLIETNGETGEIVWDKGRDFATVRKVLSMPQVNIVKKTEVQTGGFSKESILPKRNSDKLIARKKDWDPKKYGGFDSPTVAYSVLVVAKVEKGKSKKLKSVKELLGITIMERSSFEKNPIDFLEAKGYKEVKKDLIIKLPKYSLFELENGRKRMLASAGELQKGNELALPSKYVNFLYLASHYEKLKGSPEDNEQKQLFVEQHKHYLDEIIEQISEFSKRVILADANLDKVLSAYNKHRDKPIREQAENIIHLFTLTNLGAPAAFKYFDTTIDRKRYTSTKEVLDATLIHQSITGLYETRIDLSQLGGDGGGGSPAPGGIPWLMKKPLQLTTLVPLQEYEERLLKQTMLTGSYKEKLQSLFLKYDALWQHWENQVGHRRIKPHHIATGTVNPRPQKQYPINPKAKASIQTVINDLLKQGVLIQQNSIMNTPVYPVPKPDGKWRMVLDYREVNKTIPLIAAQNQHSAGILSSIFRGKYKTTLDLSNGFWAHSITPESYWLTAFTWLGQQYCWTRLPQGFLNSPALFNADVVDLLKEVPNVQVYVDDIYISHDDPREHLEQLEKVFSLLLNAGYVVSLKKSEIAQHEVEFLGFNITKEGRGLTETFKQKLLNITPPRDLKQLQSILGKLNFARNFIPNFSELVKPLYNIIATAPGKYITWTTDNSQQLQNIISMLNSAENLEERNPEVRLIMKVNTSPSAGYIRFYNEFAKRPIMYLNYVYTKAEVKFTNTEKLLTTIHKGLIKALDLGMGQEILVYSPIVSMTKIQKTPLPERKALPIRWITWMSYLEDPRIQFHYDKTLPELQQVPTVTDDIIAKIKHPSEFSMVFYTDGSAIKHPNVNKSHNAGMGIAQVQFKPEFTVINTWSIPLGDHTAQLAEVAAVEFACKKALKIDGPVLIVTDSFYVAESVNKELPYWQSNGFFNNKKKPLKHVSKWKSIADCIQLKPDIIIIHEKGHQPTASTFHTEGNNLADKLATQGSYVVNAGKRTADGSEFEKRTADGSEFESPKKKAKVE

SEQ ID NO: 6650 - protein, 2089 aa, synthetic construct
MPAAKRVKLDGGDKKYSIGLDIGTNSVGWAVITDEYKVPSKKFKVLGNTDRHSIKKNLIGALLFDSGETAEATRLKRTARRRYTRRKNRICYLQEIFSNEMAKVDDSFFHRLEESFLVEEDKKHERHPIFGNIVDEVAYHEKYPTIYHLRKKLVDSTDKADLRLIYLALAHMIKFRGHFLIEGDLNPDNSDVDKLFIQLVQTYNQLFEENPINASGVDAKAILSARLSKSRRLENLIAQLPGEKKNGLFGNLIALSLGLTPNFKSNFDLAEDAKLQLSKDTYDDDLDNLLAQIGDQYADLFLAAKNLSDAILLSDILRVNTEITKAPLSASMIKRYDEHHQDLTLLKALVRQQLPEKYKEIFFDQSKNGYAGYIDGGASQEEFYKFIKPILEKMDGTEELLVKLNREDLLRKQRTFDNGSIPHQIHLGELHAILRRQEDFYPFLKDNREKIEKILTFRIPYYVGPLARGNSRFAWMTRKSEETITPWNFEEVVDKGASAQSFIERMTNFDKNLPNEKVLPKHSLLYEYFTVYNELTKVKYVTEGMRKPAFLSGEQKKAIVDLLFKTNRKVTVKQLKEDYFKKIECFDSVEISGVEDRFNASLGTYHDLLKIIKDKDFLDNEENEDILEDIVLTLTLFEDREMIEERLKTYAHLFDDKVMKQLKRRRYTGWGRLSRKLINGIRDKQSGKTILDFLKSDGFANRNFMQLIHDDSLTFKEDIQKAQVSGQGDSLHEHIANLAGSPAIKKGILQTVKVVDELVKVMGRHKPENIVIEMARENQTTQKGQKNSRERMKRIEEGIKELGSQILKEHPVENTQLQNEKLYLYYLQNGRDMYVDQELDINRLSDYDVDHIVPQSFLKDDSIDNKVLTRSDKARGKSDNVPSEEVVKKMKNYWRQLLNAKLITQRKFDNLTKAERGGLSELDKAGFIKRQLVETRQITKHVAQILDSRMNTKYDENDKLIREVKVITLKSKLVSDFRKDFQFYKVREINNYHHAHDAYLNAVVGTALIKKYPKLESEFVYGDYKVYDVRKMIAKSEQEIGKATAKYFFYSNIMNFFKTEITLANGEIRKRPLIETNGETGEIVWDKGRDFATVRKVLSMPQVNIVKKTEVQTGGFSKESILPKRNSDKLIARKKDWDPKKYGGFDSPTVAYSVLVVAKVEKGKSKKLKSVKELLGITIMERSSFEKNPIDFLEAKGYKEVKKDLIIKLPKYSLFELENGRKRMLASAGELQKGNELALPSKYVNFLYLASHYEKLKGSPEDNEQKQLFVEQHKHYLDEIIEQISEFSKRVILADANLDKVLSAYNKHRDKPIREQAENIIHLFTLTNLGAPAAFKYFDTTIDRKRYTSTKEVLDATLIHQSITGLYETRIDLSQLGGDGGGGSPAPGGVLNLEEEYRLHEKPVPSSIDPSWLQLFPTVWAERAGMGLANQVPPVVVELRSGASPVAVRQYPMSKEAREGIRPHIQRFLDLGVLVPCQSPWNTPLLPVKKPGTNDYRPVQDLREINKRVQDIHPTVPNPYNLLSSLPPSHTWYSVLDLKDAFFCLKLHPNSQPLFAFEWRDPEKGNTGQLTWTRLPQGFKNSPTLFNEALHRDLAPFRALNPQVVLLQYVDDLLVAAPTYRDCKEGTQKLLQELSKLGYRVSAKKAQLCQKEVTYLGYLLKEGKRWLTPARKATVMKIPPPTTPRQVREFLGKAGFCRLFIPGFASLAAPLYPLTKPSIPFIWTEEHQKAFDRIKEALLSAPALALPDLTKPFTLYVDERAGVARGVLTQTLGPWRRPVAYLSKKLDPVASGWPTCLKAVAAVALLLKDADKLTLGQNVTVIASHSLESIVRQPPDRWMTNARMTHYQSLLLNERVSFAPPAVLNPATLLPVESEATPVHRCSEILAEETGTRRDLKDQPLPGVPAWYTDGSSFIAEGKRRAGAAIVDGKRTVWASSLPEGTSAQKAELVALTQALRLAEGKDINIYTDSRYAFATAHIHGAIYKQRGWLTSAGKDIKNKEEILALLEAIHLPKRVAIIHCPGHQKGNDPVATGNRRADEAAKQAALSTRVLAETTKPAGKRTADGSEFEKRTADGSEFESPKKKAKVE

SEQ ID NO: 6651 - protein, 2093 aa, synthetic construct
MPAAKRVKLDGGDKKYSIGLDIGTNSVGWAVITDEYKVPSKKFKVLGNTDRHSIKKNLIGALLFDSGETAEATRLKRTARRRYTRRKNRICYLQEIFSNEMAKVDDSFFHRLEESFLVEEDKKHERHPIFGNIVDEVAYHEKYPTIYHLRKKLVDSTDKADLRLIYLALAHMIKFRGHFLIEGDLNPDNSDVDKLFIQLVQTYNQLFEENPINASGVDAKAILSARLSKSRRLENLIAQLPGEKKNGLFGNLIALSLGLTPNFKSNFDLAEDAKLQLSKDTYDDDLDNLLAQIGDQYADLFLAAKNLSDAILLSDILRVNTEITKAPLSASMIKRYDEHHQDLTLLKALVRQQLPEKYKEIFFDQSKNGYAGYIDGGASQEEFYKFIKPILEKMDGTEELLVKLNREDLLRKQRTFDNGSIPHQIHLGELHAILRRQEDFYPFLKDNREKIEKILTFRIPYYVGPLARGNSRFAWMTRKSEETITPWNFEEVVDKGASAQSFIERMTNFDKNLPNEKVLPKHSLLYEYFTVYNELTKVKYVTEGMRKPAFLSGEQKKAIVDLLFKTNRKVTVKQLKEDYFKKIECFDSVEISGVEDRFNASLGTYHDLLKIIKDKDFLDNEENEDILEDIVLTLTLFEDREMIEERLKTYAHLFDDKVMKQLKRRRYTGWGRLSRKLINGIRDKQSGKTILDFLKSDGFANRNFMQLIHDDSLTFKEDIQKAQVSGQGDSLHEHIANLAGSPAIKKGILQTVKVVDELVKVMGRHKPENIVIEMARENQTTQKGQKNSRERMKRIEEGIKELGSQILKEHPVENTQLQNEKLYLYYLQNGRDMYVDQELDINRLSDYDVDHIVPQSFLKDDSIDNKVLTRSDKARGKSDNVPSEEVVKKMKNYWRQLLNAKLITQRKFDNLTKAERGGLSELDKAGFIKRQLVETRQITKHVAQILDSRMNTKYDENDKLIREVKVITLKSKLVSDFRKDFQFYKVREINNYHHAHDAYLNAVVGTALIKKYPKLESEFVYGDYKVYDVRKMIAKSEQEIGKATAKYFFYSNIMNFFKTEITLANGEIRKRPLIETNGETGEIVWDKGRDFATVRKVLSMPQVNIVKKTEVQTGGFSKESILPKRNSDKLIARKKDWDPKKYGGFDSPTVAYSVLVVAKVEKGKSKKLKSVKELLGITIMERSSFEKNPIDFLEAKGYKEVKKDLIIKLPKYSLFELENGRKRMLASAGELQKGNELALPSKYVNFLYLASHYEKLKGSPEDNEQKQLFVEQHKHYLDEIIEQISEFSKRVILADANLDKVLSAYNKHRDKPIREQAENIIHLFTLTNLGAPAAFKYFDTTIDRKRYTSTKEVLDATLIHQSITGLYETRIDLSQLGGDGGPAPGGSGGTAPLEEEYRLFLEAPIQNVTLLEQWKREIPKVWAEINPPGLASTQAPIHVQLLSTALPVRVRQYPITLEAKRSLRETIRKFRAAGILRPVHSPWNTPLLPVRKSGTSEYRMVQDLREVNKRVETIHPTVPNPYTLLSLLPPDRIWYSVLDLKDAFFCIPLAPESQLIFAFEWADAEEGESGQLTWTRLPQGFKNSPTLFNEALNRDLQGFRLDHPSVSLLQYVDDLLIAADTQAACLSATRDLLMTLAELGYRVSGKKAQLCQEEVTYLGFKIHKGSRSLSNSRTQAILQIPVPKTKRQVREFLGTIGYCRLWIPGFAELAQPLYAATRPGNDPLVWGEKEEEAFQSLKLALTQPPALALPSLDKPFQLFVEETSGAAKGVLTQALGPWKRPVAYLSKRLDPVAAGWPRCLRAIAAAALLTREASKLTFGQDIEITSSHNLESLLRSPPDKWLTNARITQYQVLLLDPPRVRFKQTAALNPATLLPETDDTLPIHHCLDTLDSLTSTRPDLTDQPLAQAEATLFTDGSSYIRDGKRYAGAAVVTLDSVIWAEPLPIGTSAQKAELIALTKALEWSKDKSVNIYTDSRYAFATLHVHGMIYRERGWLTAGGKAIKNAPEILALLTAVWLPKRVAVMHCKGHQKDDAPTSTGNRRADEVAREVAIRPLSTQATISAGKRTADGSEFEKRTADGSEFESPKKKAKVE

SEQ ID NO: 6652 - protein, 2093 aa, synthetic construct
MPAAKRVKLDGGDKKYSIGLDIGTNSVGWAVITDEYKVPSKKFKVLGNTDRHSIKKNLIGALLFDSGETAEATRLKRTARRRYTRRKNRICYLQEIFSNEMAKVDDSFFHRLEESFLVEEDKKHERHPIFGNIVDEVAYHEKYPTIYHLRKKLVDSTDKADLRLIYLALAHMIKFRGHFLIEGDLNPDNSDVDKLFIQLVQTYNQLFEENPINASGVDAKAILSARLSKSRRLENLIAQLPGEKKNGLFGNLIALSLGLTPNFKSNFDLAEDAKLQLSKDTYDDDLDNLLAQIGDQYADLFLAAKNLSDAILLSDILRVNTEITKAPLSASMIKRYDEHHQDLTLLKALVRQQLPEKYKEIFFDQSKNGYAGYIDGGASQEEFYKFIKPILEKMDGTEELLVKLNREDLLRKQRTFDNGSIPHQIHLGELHAILRRQEDFYPFLKDNREKIEKILTFRIPYYVGPLARGNSRFAWMTRKSEETITPWNFEEVVDKGASAQSFIERMTNFDKNLPNEKVLPKHSLLYEYFTVYNELTKVKYVTEGMRKPAFLSGEQKKAIVDLLFKTNRKVTVKQLKEDYFKKIECFDSVEISGVEDRFNASLGTYHDLLKIIKDKDFLDNEENEDILEDIVLTLTLFEDREMIEERLKTYAHLFDDKVMKQLKRRRYTGWGRLSRKLINGIRDKQSGKTILDFLKSDGFANRNFMQLIHDDSLTFKEDIQKAQVSGQGDSLHEHIANLAGSPAIKKGILQTVKVVDELVKVMGRHKPENIVIEMARENQTTQKGQKNSRERMKRIEEGIKELGSQILKEHPVENTQLQNEKLYLYYLQNGRDMYVDQELDINRLSDYDVDHIVPQSFLKDDSIDNKVLTRSDKARGKSDNVPSEEVVKKMKNYWRQLLNAKLITQRKFDNLTKAERGGLSELDKAGFIKRQLVETRQITKHVAQILDSRMNTKYDENDKLIREVKVITLKSKLVSDFRKDFQFYKVREINNYHHAHDAYLNAVVGTALIKKYPKLESEFVYGDYKVYDVRKMIAKSEQEIGKATAKYFFYSNIMNFFKTEITLANGEIRKRPLIETNGETGEIVWDKGRDFATVRKVLSMPQVNIVKKTEVQTGGFSKESILPKRNSDKLIARKKDWDPKKYGGFDSPTVAYSVLVVAKVEKGKSKKLKSVKELLGITIMERSSFEKNPIDFLEAKGYKEVKKDLIIKLPKYSLFELENGRKRMLASAGELQKGNELALPSKYVNFLYLASHYEKLKGSPEDNEQKQLFVEQHKHYLDEIIEQISEFSKRVILADANLDKVLSAYNKHRDKPIREQAENIIHLFTLTNLGAPAAFKYFDTTIDRKRYTSTKEVLDATLIHQSITGLYETRIDLSQLGGDGGPAPGGSGGTAPLEEEYRLFLEAPIQNVTLLEQWKREIPKVWAEINPPGLASTQAPIHVQLLSTALPVRVRQYPITLEAKRSLRETIRKFRAAGILRPVHSPWNTPLLPVRKSGTSEYRMVQDLREVNKRVETIHPTVPNPYTLLSLLPPDRIWYSVLDLKDAFFCIPLAPESQLIFAFEWADAEEGESGQLTWTRLPQGFKNSPTLFNEALNRDLQGFRLDHPSVSLLQYVDDLLIAADTQAACLSATRDLLMTLAELGYRVSGKKAQLCQEEVTYLGFKIHKGSRSLSNSRTQAILQIPVPKTKRQVREFLGKIGYCRLFIPGFAELAQPLYAATRPGNDPLVWGEKEEEAFQSLKLALTQPPALALPSLDKPFQLFVEETSGAAKGVLTQALGPWKRPVAYLSKRLDPVAAGWPRCLRAIAAAALLTREASKLTFGQDIEITSSHNLESLLRSPPDKWLTNARITQYQVLLLDPPRVRFKQTAALNPATLLPETDDTLPIHHCLDTLDSLTSTRPDLTDQPLAQAEATLFTDGSSYIRDGKRYAGAAVVTLDSVIWAEPLPIGTSAQKAELIALTKALEWSKDKSVNIYTDSRYAFATLHVHGMIYRERGWLTAGGKAIKNAPEILALLTAVWLPKRVAVMHCKGHQKDDAPTSTGNRRADEVAREVAIRPLSTQATISAGKRTADGSEFEKRTADGSEFESPKKKAKVE

SEQ ID NO: 6653 - protein, 2089 aa, synthetic construct
MPAAKRVKLDGGDKKYSIGLDIGTNSVGWAVITDEYKVPSKKFKVLGNTDRHSIKKNLIGALLFDSGETAEATRLKRTARRRYTRRKNRICYLQEIFSNEMAKVDDSFFHRLEESFLVEEDKKHERHPIFGNIVDEVAYHEKYPTIYHLRKKLVDSTDKADLRLIYLALAHMIKFRGHFLIEGDLNPDNSDVDKLFIQLVQTYNQLFEENPINASGVDAKAILSARLSKSRRLENLIAQLPGEKKNGLFGNLIALSLGLTPNFKSNFDLAEDAKLQLSKDTYDDDLDNLLAQIGDQYADLFLAAKNLSDAILLSDILRVNTEITKAPLSASMIKRYDEHHQDLTLLKALVRQQLPEKYKEIFFDQSKNGYAGYIDGGASQEEFYKFIKPILEKMDGTEELLVKLNREDLLRKQRTFDNGSIPHQIHLGELHAILRRQEDFYPFLKDNREKIEKILTFRIPYYVGPLARGNSRFAWMTRKSEETITPWNFEEVVDKGASAQSFIERMTNFDKNLPNEKVLPKHSLLYEYFTVYNELTKVKYVTEGMRKPAFLSGEQKKAIVDLLFKTNRKVTVKQLKEDYFKKIECFDSVEISGVEDRFNASLGTYHDLLKIIKDKDFLDNEENEDILEDIVLTLTLFEDREMIEERLKTYAHLFDDKVMKQLKRRRYTGWGRLSRKLINGIRDKQSGKTILDFLKSDGFANRNFMQLIHDDSLTFKEDIQKAQVSGQGDSLHEHIANLAGSPAIKKGILQTVKVVDELVKVMGRHKPENIVIEMARENQTTQKGQKNSRERMKRIEEGIKELGSQILKEHPVENTQLQNEKLYLYYLQNGRDMYVDQELDINRLSDYDVDHIVPQSFLKDDSIDNKVLTRSDKARGKSDNVPSEEVVKKMKNYWRQLLNAKLITQRKFDNLTKAERGGLSELDKAGFIKRQLVETRQITKHVAQILDSRMNTKYDENDKLIREVKVITLKSKLVSDFRKDFQFYKVREINNYHHAHDAYLNAVVGTALIKKYPKLESEFVYGDYKVYDVRKMIAKSEQEIGKATAKYFFYSNIMNFFKTEITLANGEIRKRPLIETNGETGEIVWDKGRDFATVRKVLSMPQVNIVKKTEVQTGGFSKESILPKRNSDKLIARKKDWDPKKYGGFDSPTVAYSVLVVAKVEKGKSKKLKSVKELLGITIMERSSFEKNPIDFLEAKGYKEVKKDLIIKLPKYSLFELENGRKRMLASAGELQKGNELALPSKYVNFLYLASHYEKLKGSPEDNEQKQLFVEQHKHYLDEIIEQISEFSKRVILADANLDKVLSAYNKHRDKPIREQAENIIHLFTLTNLGAPAAFKYFDTTIDRKRYTSTKEVLDATLIHQSITGLYETRIDLSQLGGDGGPAPGGSGGVLNLEEEYRLHEKPVPSSIDPSWLQLFPTVWAERAGMGLANQVPPVVVELRSGASPVAVRQYPMSKEAREGIRPHIQKFLDLGVLVPCRSPWNTPLLPVKKPGTNDYRPVQDLREINKRVQDIHPTVPNPYNLLSSLPPSYTWYSVLDLKDAFFCLRLHPNSQPLFAFEWKDPEKGNTGQLTWTRLPQGFKNSPTLFDEALHRDLAPFRALNPQVVLLQYVDDLLVAAPTYEDCKKGTQKLLQELSKLGYRVSAKKAQLCQREVTYLGYLLKEGKRWLTPARKATVMKIPVPTTPRQVREFLGTAGFCRLWIPGFASLAAPLYPLTKESIPFIWTEEHQQAFDHIKKALLSAPALALPDLTKPFTLYIDERAGVARGVLTQTLGPWRRPVAYLSKKLDPVASGWPTCLKAVAAVALLLKDADKLTLGQNVTVIASHSLESIVRQPPDRWMTNARMTHYQSLLLNERVSFAPPAVLNPATLLPVESEATPVHRCSEILAEETGTRRDLEDQPLPGVPTWYTDGSSFITEGKRRAGAPIVDGKRTVWASSLPEGTSAQKAELVALTQALRLAEGKNINIYTDSRYAFATAHIHGAIYKQRGLLTSAGKDIKNKEEILALLEAIHLPRRVAIIHCPGHQRGSNPVATGNRRADEAAKQAALSTRVLAGTTKPAGKRTADGSEFEKRTADGSEFESPKKKAKVE

SEQ ID NO: 6654 - protein, 2213 aa, synthetic construct
MPAAKRVKLDGGDKKYSIGLDIGTNSVGWAVITDEYKVPSKKFKVLGNTDRHSIKKNLIGALLFDSGETAEATRLKRTARRRYTRRKNRICYLQEIFSNEMAKVDDSFFHRLEESFLVEEDKKHERHPIFGNIVDEVAYHEKYPTIYHLRKKLVDSTDKADLRLIYLALAHMIKFRGHFLIEGDLNPDNSDVDKLFIQLVQTYNQLFEENPINASGVDAKAILSARLSKSRRLENLIAQLPGEKKNGLFGNLIALSLGLTPNFKSNFDLAEDAKLQLSKDTYDDDLDNLLAQIGDQYADLFLAAKNLSDAILLSDILRVNTEITKAPLSASMIKRYDEHHQDLTLLKALVRQQLPEKYKEIFFDQSKNGYAGYIDGGASQEEFYKFIKPILEKMDGTEELLVKLNREDLLRKQRTFDNGSIPHQIHLGELHAILRRQEDFYPFLKDNREKIEKILTFRIPYYVGPLARGNSRFAWMTRKSEETITPWNFEEVVDKGASAQSFIERMTNFDKNLPNEKVLPKHSLLYEYFTVYNELTKVKYVTEGMRKPAFLSGEQKKAIVDLLFKTNRKVTVKQLKEDYFKKIECFDSVEISGVEDRFNASLGTYHDLLKIIKDKDFLDNEENEDILEDIVLTLTLFEDREMIEERLKTYAHLFDDKVMKQLKRRRYTGWGRLSRKLINGIRDKQSGKTILDFLKSDGFANRNFMQLIHDDSLTFKEDIQKAQVSGQGDSLHEHIANLAGSPAIKKGILQTVKVVDELVKVMGRHKPENIVIEMARENQTTQKGQKNSRERMKRIEEGIKELGSQILKEHPVENTQLQNEKLYLYYLQNGRDMYVDQELDINRLSDYDVDHIVPQSFLKDDSIDNKVLTRSDKARGKSDNVPSEEVVKKMKNYWRQLLNAKLITQRKFDNLTKAERGGLSELDKAGFIKRQLVETRQITKHVAQILDSRMNTKYDENDKLIREVKVITLKSKLVSDFRKDFQFYKVREINNYHHAHDAYLNAVVGTALIKKYPKLESEFVYGDYKVYDVRKMIAKSEQEIGKATAKYFFYSNIMNFFKTEITLANGEIRKRPLIETNGETGEIVWDKGRDFATVRKVLSMPQVNIVKKTEVQTGGFSKESILPKRNSDKLIARKKDWDPKKYGGFDSPTVAYSVLVVAKVEKGKSKKLKSVKELLGITIMERSSFEKNPIDFLEAKGYKEVKKDLIIKLPKYSLFELENGRKRMLASAGELQKGNELALPSKYVNFLYLASHYEKLKGSPEDNEQKQLFVEQHKHYLDEIIEQISEFSKRVILADANLDKVLSAYNKHRDKPIREQAENIIHLFTLTNLGAPAAFKYFDTTIDRKRYTSTKEVLDATLIHQSITGLYETRIDLSQLGGDGGPAPGGSGGTLGDQGSRGSDPLPEPRVTLTVEGIPTEFLVNTGAEHSVLTKPMGKMGSKRTVVAGATGSKVYPWTTKRLLKIGQKQVTHSFLVIPECPAPLLGRDLLTKLKAQIQFSTEGPQVTWEDRPAMCLVLNLEEEYRLHEKPVPPSIDPSWLQLFPMVWAEKAGMGLANQVPPVVVELKSDASPVAVRQYPMSKEAREGIRPHIQRFLDLGILVPCQSPWNTPLLPVKKPGTNDYRPVQDLREVNKRVQDIHPTVPNPYNLLSSLPPSHTWYSVLDLKDAFFCLKLHPNSQPLFAFEWRDPEKGNTGQLTWTRLPQGFKNSPTLFNEALHRDLASFRALNPQVVMLQYVDDLLVAAPTYRDCKEGTRRLLQELSKLGYRVSAKKAQLCREEVTYLGYLLKGGKRWLTPARKATVMKIPTPTTPRQVREFLGTAGFCRLWIPGFASLAAPLYPLTRPKVPFTWTEAHQEAFGRIKEALLSAPALALPDLTKPFALYVDEKEGVARGVLTQTLGPWRRPVAYLSKKLDPVASGWPTCLKAIAAVALLLKDADKLTLGQNVLVIAPHNLESIVRQPPDRWMTNARMTHYQSLLLNERVSFAPPAILNPATLLPVESDDTPIHICSEILAEETGTRPDLRDQPLPGVPAWYTDGSSFIMDGRRQAGAAIVDNKRTVWASNLPEGTSAQKAELIALTQALRLAEGKSINIYTDSRYAFATAHVHGAIYKQRGWLTSAGKDIKNKEEILALLEAIHLPKRVAIIHCPGHQRGTDPVATGNRKADEAAKQAAQSTRILTETTKNAGKRTADGSEFEKRTADGSEFESPKKKAKVE

SEQ ID NO: 6655 - protein, 2091 aa, synthetic construct
MPAAKRVKLDGGDKKYSIGLDIGTNSVGWAVITDEYKVPSKKFKVLGNTDRHSIKKNLIGALLFDSGETAEATRLKRTARRRYTRRKNRICYLQEIFSNEMAKVDDSFFHRLEESFLVEEDKKHERHPIFGNIVDEVAYHEKYPTIYHLRKKLVDSTDKADLRLIYLALAHMIKFRGHFLIEGDLNPDNSDVDKLFIQLVQTYNQLFEENPINASGVDAKAILSARLSKSRRLENLIAQLPGEKKNGLFGNLIALSLGLTPNFKSNFDLAEDAKLQLSKDTYDDDLDNLLAQIGDQYADLFLAAKNLSDAILLSDILRVNTEITKAPLSASMIKRYDEHHQDLTLLKALVRQQLPEKYKEIFFDQSKNGYAGYIDGGASQEEFYKFIKPILEKMDGTEELLVKLNREDLLRKQRTFDNGSIPHQIHLGELHAILRRQEDFYPFLKDNREKIEKILTFRIPYYVGPLARGNSRFAWMTRKSEETITPWNFEEVVDKGASAQSFIERMTNFDKNLPNEKVLPKHSLLYEYFTVYNELTKVKYVTEGMRKPAFLSGEQKKAIVDLLFKTNRKVTVKQLKEDYFKKIECFDSVEISGVEDRFNASLGTYHDLLKIIKDKDFLDNEENEDILEDIVLTLTLFEDREMIEERLKTYAHLFDDKVMKQLKRRRYTGWGRLSRKLINGIRDKQSGKTILDFLKSDGFANRNFMQLIHDDSLTFKEDIQKAQVSGQGDSLHEHIANLAGSPAIKKGILQTVKVVDELVKVMGRHKPENIVIEMARENQTTQKGQKNSRERMKRIEEGIKELGSQILKEHPVENTQLQNEKLYLYYLQNGRDMYVDQELDINRLSDYDVDHIVPQSFLKDDSIDNKVLTRSDKARGKSDNVPSEEVVKKMKNYWRQLLNAKLITQRKFDNLTKAERGGLSELDKAGFIKRQLVETRQITKHVAQILDSRMNTKYDENDKLIREVKVITLKSKLVSDFRKDFQFYKVREINNYHHAHDAYLNAVVGTALIKKYPKLESEFVYGDYKVYDVRKMIAKSEQEIGKATAKYFFYSNIMNFFKTEITLANGEIRKRPLIETNGETGEIVWDKGRDFATVRKVLSMPQVNIVKKTEVQTGGFSKESILPKRNSDKLIARKKDWDPKKYGGFDSPTVAYSVLVVAKVEKGKSKKLKSVKELLGITIMERSSFEKNPIDFLEAKGYKEVKKDLIIKLPKYSLFELENGRKRMLASAGELQKGNELALPSKYVNFLYLASHYEKLKGSPEDNEQKQLFVEQHKHYLDEIIEQISEFSKRVILADANLDKVLSAYNKHRDKPIREQAENIIHLFTLTNLGAPAAFKYFDTTIDRKRYTSTKEVLDATLIHQSITGLYETRIDLSQLGGDGGPAPGGSGGTLNLEDEYRLYETSAEPEVSPGSTWLSDFPQAWAETGGMGLAVRQAPLIIPLKATSTPVSIKQYPMSQEAKLGIKPHIQRLLDQGILVPCQSPWNTPLLPVKKPGTNDYRPVQDLREVNKRVEDIHPTVPNPYNLLSGLPPSHRWYTVLDLKDAFFCLRLHPTSQPLFAFEWRDPGMGISGQLTWTRLPQGFKNSPTLFNEALHRDLADFRIQHPDLILLQYVDDILLAATSELDCQQGTRALLLTLGNLGYRASAKKAQLCQKQVKYLGYLLKEGQRWLTEARKETVMGQPTPKTPRQLREFLGKAGFCRLFIPGFAEMAAPLYPLTKPGTLFNWGPDQQKAYQEIKQALLTAPALGLPDLTKPFELFVDEKQGYAKGVLTQKLGPWRRPVAYLSKKLDPVAAGWPPCLRMVAAIAVLRKDAGKLTMGQPLVILAPHAVEALVKQPPDRWLSNARMTHYQAMLLDTDRVQFGPVVALNPATLLPLPEEGAPHDCLEILAETHGTRPDLTDQPIPDADHTWYTDGSSFLQEGQRKAGAAVTTETEVIWARALPAGTSAQRAELIALTQALKMAEGKRLNVYTDSRYAFATAHIHGEIYRRRGWLTSEGREIKNKSEILALLKALFLPKRLSIIHCLGHQKGDSAEARGNRLADQAAREAAIKTPPDTSTLLAGKRTADGSEFEKRTADGSEFESPKKKAKVE

SEQ ID NO: 6656 - protein, 2082 aa, synthetic construct
MPAAKRVKLDGGDKKYSIGLDIGTNSVGWAVITDEYKVPSKKFKVLGNTDRHSIKKNLIGALLFDSGETAEATRLKRTARRRYTRRKNRICYLQEIFSNEMAKVDDSFFHRLEESFLVEEDKKHERHPIFGNIVDEVAYHEKYPTIYHLRKKLVDSTDKADLRLIYLALAHMIKFRGHFLIEGDLNPDNSDVDKLFIQLVQTYNQLFEENPINASGVDAKAILSARLSKSRRLENLIAQLPGEKKNGLFGNLIALSLGLTPNFKSNFDLAEDAKLQLSKDTYDDDLDNLLAQIGDQYADLFLAAKNLSDAILLSDILRVNTEITKAPLSASMIKRYDEHHQDLTLLKALVRQQLPEKYKEIFFDQSKNGYAGYIDGGASQEEFYKFIKPILEKMDGTEELLVKLNREDLLRKQRTFDNGSIPHQIHLGELHAILRRQEDFYPFLKDNREKIEKILTFRIPYYVGPLARGNSRFAWMTRKSEETITPWNFEEVVDKGASAQSFIERMTNFDKNLPNEKVLPKHSLLYEYFTVYNELTKVKYVTEGMRKPAFLSGEQKKAIVDLLFKTNRKVTVKQLKEDYFKKIECFDSVEISGVEDRFNASLGTYHDLLKIIKDKDFLDNEENEDILEDIVLTLTLFEDREMIEERLKTYAHLFDDKVMKQLKRRRYTGWGRLSRKLINGIRDKQSGKTILDFLKSDGFANRNFMQLIHDDSLTFKEDIQKAQVSGQGDSLHEHIANLAGSPAIKKGILQTVKVVDELVKVMGRHKPENIVIEMARENQTTQKGQKNSRERMKRIEEGIKELGSQILKEHPVENTQLQNEKLYLYYLQNGRDMYVDQELDINRLSDYDVDHIVPQSFLKDDSIDNKVLTRSDKARGKSDNVPSEEVVKKMKNYWRQLLNAKLITQRKFDNLTKAERGGLSELDKAGFIKRQLVETRQITKHVAQILDSRMNTKYDENDKLIREVKVITLKSKLVSDFRKDFQFYKVREINNYHHAHDAYLNAVVGTALIKKYPKLESEFVYGDYKVYDVRKMIAKSEQEIGKATAKYFFYSNIMNFFKTEITLANGEIRKRPLIETNGETGEIVWDKGRDFATVRKVLSMPQVNIVKKTEVQTGGFSKESILPKRNSDKLIARKKDWDPKKYGGFDSPTVAYSVLVVAKVEKGKSKKLKSVKELLGITIMERSSFEKNPIDFLEAKGYKEVKKDLIIKLPKYSLFELENGRKRMLASAGELQKGNELALPSKYVNFLYLASHYEKLKGSPEDNEQKQLFVEQHKHYLDEIIEQISEFSKRVILADANLDKVLSAYNKHRDKPIREQAENIIHLFTLTNLGAPAAFKYFDTTIDRKRYTSTKEVLDATLIHQSITGLYETRIDLSQLGGDGGPAPGGSGGIPWLMKKPLQLTTLVPLQEYEERLLKQTMLTGSYKEKLQSLFLKYDALWQHWENQVGHRRIKPHHIATGTVNPRPQKQYPINPKAKASIQTVINDLLKQGVLIQQNSIMNTPVYPVPKPDGKWRMVLDYREVNKTIPLIAAQNQHSAGILSSIFRGKYKTTLDLSNGFWAHSITPESYWLTAFTWLGQQYCWTRLPQGFLNSPALFNADVVDLLKEVPNVQVYVDDIYISHDDPREHLEQLEKVFSLLLNAGYVVSLKKSEIAQHEVEFLGFNITKEGRGLTETFKQKLLNITPPRDLKQLQSILGKLNFARNFIPNFSELVKPLYNIIATAPGKYITWTTDNSQQLQNIISMLNSAENLEERNPEVRLIMKVNTSPSAGYIRFYNEFAKRPIMYLNYVYTKAEVKFTNTEKLLTTIHKGLIKALDLGMGQEILVYSPIVSMTKIQKTPLPERKALPIRWITWMSYLEDPRIQFHYDKTLPELQQVPTVTDDIIAKIKHPSEFSMVFYTDGSAIKHPNVNKSHNAGMGIAQVQFKPEFTVINTWSIPLGDHTAQLAEVAAVEFACKKALKIDGPVLIVTDSFYVAESVNKELPYWQSNGFFNNKKKPLKHVSKWKSIADCIQLKPDIIIIHEKGHQPTASTFHTEGNNLADKLATQGSYVVNAGKRTADGSEFEKRTADGSEFESPKKKAKVE

SEQ ID NO: 6657 - protein, 2089 aa, synthetic construct
MPAAKRVKLDGGDKKYSIGLDIGTNSVGWAVITDEYKVPSKKFKVLGNTDRHSIKKNLIGALLFDSGETAEATRLKRTARRRYTRRKNRICYLQEIFSNEMAKVDDSFFHRLEESFLVEEDKKHERHPIFGNIVDEVAYHEKYPTIYHLRKKLVDSTDKADLRLIYLALAHMIKFRGHFLIEGDLNPDNSDVDKLFIQLVQTYNQLFEENPINASGVDAKAILSARLSKSRRLENLIAQLPGEKKNGLFGNLIALSLGLTPNFKSNFDLAEDAKLQLSKDTYDDDLDNLLAQIGDQYADLFLAAKNLSDAILLSDILRVNTEITKAPLSASMIKRYDEHHQDLTLLKALVRQQLPEKYKEIFFDQSKNGYAGYIDGGASQEEFYKFIKPILEKMDGTEELLVKLNREDLLRKQRTFDNGSIPHQIHLGELHAILRRQEDFYPFLKDNREKIEKILTFRIPYYVGPLARGNSRFAWMTRKSEETITPWNFEEVVDKGASAQSFIERMTNFDKNLPNEKVLPKHSLLYEYFTVYNELTKVKYVTEGMRKPAFLSGEQKKAIVDLLFKTNRKVTVKQLKEDYFKKIECFDSVEISGVEDRFNASLGTYHDLLKIIKDKDFLDNEENEDILEDIVLTLTLFEDREMIEERLKTYAHLFDDKVMKQLKRRRYTGWGRLSRKLINGIRDKQSGKTILDFLKSDGFANRNFMQLIHDDSLTFKEDIQKAQVSGQGDSLHEHIANLAGSPAIKKGILQTVKVVDELVKVMGRHKPENIVIEMARENQTTQKGQKNSRERMKRIEEGIKELGSQILKEHPVENTQLQNEKLYLYYLQNGRDMYVDQELDINRLSDYDVDHIVPQSFLKDDSIDNKVLTRSDKARGKSDNVPSEEVVKKMKNYWRQLLNAKLITQRKFDNLTKAERGGLSELDKAGFIKRQLVETRQITKHVAQILDSRMNTKYDENDKLIREVKVITLKSKLVSDFRKDFQFYKVREINNYHHAHDAYLNAVVGTALIKKYPKLESEFVYGDYKVYDVRKMIAKSEQEIGKATAKYFFYSNIMNFFKTEITLANGEIRKRPLIETNGETGEIVWDKGRDFATVRKVLSMPQVNIVKKTEVQTGGFSKESILPKRNSDKLIARKKDWDPKKYGGFDSPTVAYSVLVVAKVEKGKSKKLKSVKELLGITIMERSSFEKNPIDFLEAKGYKEVKKDLIIKLPKYSLFELENGRKRMLASAGELQKGNELALPSKYVNFLYLASHYEKLKGSPEDNEQKQLFVEQHKHYLDEIIEQISEFSKRVILADANLDKVLSAYNKHRDKPIREQAENIIHLFTLTNLGAPAAFKYFDTTIDRKRYTSTKEVLDATLIHQSITGLYETRIDLSQLGGDGGPAPGGSGGVLNLEEEYRLHEKPVPSSIDPSWLQLFPTVWAERAGMGLANQVPPVVVELRSGASPVAVRQYPMSKEAREGIRPHIQRFLDLGVLVPCQSPWNTPLLPVKKPGTNDYRPVQDLREINKRVQDIHPTVPNPYNLLSSLPPSHTWYSVLDLKDAFFCLKLHPNSQPLFAFEWRDPEKGNTGQLTWTRLPQGFKNSPTLFNEALHRDLAPFRALNPQVVLLQYVDDLLVAAPTYRDCKEGTQKLLQELSKLGYRVSAKKAQLCQKEVTYLGYLLKEGKRWLTPARKATVMKIPPPTTPRQVREFLGTAGFCRLWIPGFASLAAPLYPLTKPSIPFIWTEEHQKAFDRIKEALLSAPALALPDLTKPFTLYVDERAGVARGVLTQTLGPWRRPVAYLSKKLDPVASGWPTCLKAVAAVALLLKDADKLTLGQNVTVIASHSLESIVRQPPDRWMTNARMTHYQSLLLNERVSFAPPAVLNPATLLPVESEATPVHRCSEILAEETGTRRDLKDQPLPGVPAWYTDGSSFIAEGKRRAGAAIVDGKRTVWASSLPEGTSAQKAELVALTQALRLAEGKDINIYTDSRYAFATAHIHGAIYKQRGWLTSAGKDIKNKEEILALLEAIHLPKRVAIIHCPGHQKGNDPVATGNRRADEAAKQAALSTRVLAETTKPAGKRTADGSEFEKRTADGSEFESPKKKAKVE

SEQ ID NO: 6658 - protein, 2091 aa, synthetic construct
MPAAKRVKLDGGDKKYSIGLDIGTNSVGWAVITDEYKVPSKKFKVLGNTDRHSIKKNLIGALLFDSGETAEATRLKRTARRRYTRRKNRICYLQEIFSNEMAKVDDSFFHRLEESFLVEEDKKHERHPIFGNIVDEVAYHEKYPTIYHLRKKLVDSTDKADLRLIYLALAHMIKFRGHFLIEGDLNPDNSDVDKLFIQLVQTYNQLFEENPINASGVDAKAILSARLSKSRRLENLIAQLPGEKKNGLFGNLIALSLGLTPNFKSNFDLAEDAKLQLSKDTYDDDLDNLLAQIGDQYADLFLAAKNLSDAILLSDILRVNTEITKAPLSASMIKRYDEHHQDLTLLKALVRQQLPEKYKEIFFDQSKNGYAGYIDGGASQEEFYKFIKPILEKMDGTEELLVKLNREDLLRKQRTFDNGSIPHQIHLGELHAILRRQEDFYPFLKDNREKIEKILTFRIPYYVGPLARGNSRFAWMTRKSEETITPWNFEEVVDKGASAQSFIERMTNFDKNLPNEKVLPKHSLLYEYFTVYNELTKVKYVTEGMRKPAFLSGEQKKAIVDLLFKTNRKVTVKQLKEDYFKKIECFDSVEISGVEDRFNASLGTYHDLLKIIKDKDFLDNEENEDILEDIVLTLTLFEDREMIEERLKTYAHLFDDKVMKQLKRRRYTGWGRLSRKLINGIRDKQSGKTILDFLKSDGFANRNFMQLIHDDSLTFKEDIQKAQVSGQGDSLHEHIANLAGSPAIKKGILQTVKVVDELVKVMGRHKPENIVIEMARENQTTQKGQKNSRERMKRIEEGIKELGSQILKEHPVENTQLQNEKLYLYYLQNGRDMYVDQELDINRLSDYDVDHIVPQSFLKDDSIDNKVLTRSDKARGKSDNVPSEEVVKKMKNYWRQLLNAKLITQRKFDNLTKAERGGLSELDKAGFIKRQLVETRQITKHVAQILDSRMNTKYDENDKLIREVKVITLKSKLVSDFRKDFQFYKVREINNYHHAHDAYLNAVVGTALIKKYPKLESEFVYGDYKVYDVRKMIAKSEQEIGKATAKYFFYSNIMNFFKTEITLANGEIRKRPLIETNGETGEIVWDKGRDFATVRKVLSMPQVNIVKKTEVQTGGFSKESILPKRNSDKLIARKKDWDPKKYGGFDSPTVAYSVLVVAKVEKGKSKKLKSVKELLGITIMERSSFEKNPIDFLEAKGYKEVKKDLIIKLPKYSLFELENGRKRMLASAGELQKGNELALPSKYVNFLYLASHYEKLKGSPEDNEQKQLFVEQHKHYLDEIIEQISEFSKRVILADANLDKVLSAYNKHRDKPIREQAENIIHLFTLTNLGAPAAFKYFDTTIDRKRYTSTKEVLDATLIHQSITGLYETRIDLSQLGGDGGPAPGGSGGTLNIEDEYRLHETSKEPDVPLGSTWLSDFPQAWAETGGMGLAVRQAPLIIPLKATSTPVSIKQYPMSQEARLGIKPHIQRLLDQGILVPCQSPWNTPLLPVKKPGTNDYRPVQDLREVNKRVEDIHPTVPNPYNLLSGLPPSHQWYTVLDLKDAFFCLRLHPTSQPLFAFEWRDPEMGISGQLTWTRLPQGFKNSPTLFNEALHRDLADFRIQHPDLILLQYVDDLLLAATSEQDCQRGTRALLQTLGNLGYRASAKKAQICQKQVKYLGYLLKEGQRWLTEARKETVMGQPTPKTPRQLREFLGTAGFCRLWIPGFAEMAAPLYPLTKPGTLFNWGPDQQKAYQEIKQALLTAPALGLPDLTKPFELFVDEKQGYAKGVLTQKLGPWRRPVAYLSKKLDPVAAGWPPCLRMVAAIAVLTKDAGKLTMGQPLVILAPHAVEALVKQPPDRWLSNARMTHYQAMLLDTDRVQFGPVVALNPATLLPLPEKEAPHDCLEILAETHGTRPDLTDQPIPDADYTWYTDGSSFLQEGQRRAGAAVTTETEVIWARALPAGTSAQRAELIALTQALKMAEGKKLNVYTDSRYAFATAHVHGEIYRRRGWLTSEGREIKNKNEILALLKALFLPKRLSIIHCPGHQKGNSAEARGNRMADQAAREAAMKAVLETSTLLAGKRTADGSEFEKRTADGSEFESPKKKAKVE

SEQ ID NO: 6659 - protein, 2093 aa, synthetic construct
MPAAKRVKLDGGDKKYSIGLDIGTNSVGWAVITDEYKVPSKKFKVLGNTDRHSIKKNLIGALLFDSGETAEATRLKRTARRRYTRRKNRICYLQEIFSNEMAKVDDSFFHRLEESFLVEEDKKHERHPIFGNIVDEVAYHEKYPTIYHLRKKLVDSTDKADLRLIYLALAHMIKFRGHFLIEGDLNPDNSDVDKLFIQLVQTYNQLFEENPINASGVDAKAILSARLSKSRRLENLIAQLPGEKKNGLFGNLIALSLGLTPNFKSNFDLAEDAKLQLSKDTYDDDLDNLLAQIGDQYADLFLAAKNLSDAILLSDILRVNTEITKAPLSASMIKRYDEHHQDLTLLKALVRQQLPEKYKEIFFDQSKNGYAGYIDGGASQEEFYKFIKPILEKMDGTEELLVKLNREDLLRKQRTFDNGSIPHQIHLGELHAILRRQEDFYPFLKDNREKIEKILTFRIPYYVGPLARGNSRFAWMTRKSEETITPWNFEEVVDKGASAQSFIERMTNFDKNLPNEKVLPKHSLLYEYFTVYNELTKVKYVTEGMRKPAFLSGEQKKAIVDLLFKTNRKVTVKQLKEDYFKKIECFDSVEISGVEDRFNASLGTYHDLLKIIKDKDFLDNEENEDILEDIVLTLTLFEDREMIEERLKTYAHLFDDKVMKQLKRRRYTGWGRLSRKLINGIRDKQSGKTILDFLKSDGFANRNFMQLIHDDSLTFKEDIQKAQVSGQGDSLHEHIANLAGSPAIKKGILQTVKVVDELVKVMGRHKPENIVIEMARENQTTQKGQKNSRERMKRIEEGIKELGSQILKEHPVENTQLQNEKLYLYYLQNGRDMYVDQELDINRLSDYDVDHIVPQSFLKDDSIDNKVLTRSDKARGKSDNVPSEEVVKKMKNYWRQLLNAKLITQRKFDNLTKAERGGLSELDKAGFIKRQLVETRQITKHVAQILDSRMNTKYDENDKLIREVKVITLKSKLVSDFRKDFQFYKVREINNYHHAHDAYLNAVVGTALIKKYPKLESEFVYGDYKVYDVRKMIAKSEQEIGKATAKYFFYSNIMNFFKTEITLANGEIRKRPLIETNGETGEIVWDKGRDFATVRKVLSMPQVNIVKKTEVQTGGFSKESILPKRNSDKLIARKKDWDPKKYGGFDSPTVAYSVLVVAKVEKGKSKKLKSVKELLGITIMERSSFEKNPIDFLEAKGYKEVKKDLIIKLPKYSLFELENGRKRMLASAGELQKGNELALPSKYVNFLYLASHYEKLKGSPEDNEQKQLFVEQHKHYLDEIIEQISEFSKRVILADANLDKVLSAYNKHRDKPIREQAENIIHLFTLTNLGAPAAFKYFDTTIDRKRYTSTKEVLDATLIHQSITGLYETRIDLSQLGGDGGGGGGSSGGTAPLEEEYRLFLEAPIQNVTLLEQWKREIPKVWAEINPPGLASTQAPIHVQLLSTALPVRVRQYPITLEAKRSLRETIRKFRAAGILRPVHSPWNTPLLPVRKSGTSEYRMVQDLREVNKRVETIHPTVPNPYTLLSLLPPDRIWYSVLDLKDAFFCIPLAPESQLIFAFEWADAEEGESGQLTWTRLPQGFKNSPTLFNEALNRDLQGFRLDHPSVSLLQYVDDLLIAADTQAACLSATRDLLMTLAELGYRVSGKKAQLCQEEVTYLGFKIHKGSRSLSNSRTQAILQIPVPKTKRQVREFLGTIGYCRLWIPGFAELAQPLYAATRPGNDPLVWGEKEEEAFQSLKLALTQPPALALPSLDKPFQLFVEETSGAAKGVLTQALGPWKRPVAYLSKRLDPVAAGWPRCLRAIAAAALLTREASKLTFGQDIEITSSHNLESLLRSPPDKWLTNARITQYQVLLLDPPRVRFKQTAALNPATLLPETDDTLPIHHCLDTLDSLTSTRPDLTDQPLAQAEATLFTDGSSYIRDGKRYAGAAVVTLDSVIWAEPLPIGTSAQKAELIALTKALEWSKDKSVNIYTDSRYAFATLHVHGMIYRERGWLTAGGKAIKNAPEILALLTAVWLPKRVAVMHCKGHQKDDAPTSTGNRRADEVAREVAIRPLSTQATISAGKRTADGSEFEKRTADGSEFESPKKKAKVE

SEQ ID NO: 6660 - protein, 2082 aa, synthetic construct
MPAAKRVKLDGGDKKYSIGLDIGTNSVGWAVITDEYKVPSKKFKVLGNTDRHSIKKNLIGALLFDSGETAEATRLKRTARRRYTRRKNRICYLQEIFSNEMAKVDDSFFHRLEESFLVEEDKKHERHPIFGNIVDEVAYHEKYPTIYHLRKKLVDSTDKADLRLIYLALAHMIKFRGHFLIEGDLNPDNSDVDKLFIQLVQTYNQLFEENPINASGVDAKAILSARLSKSRRLENLIAQLPGEKKNGLFGNLIALSLGLTPNFKSNFDLAEDAKLQLSKDTYDDDLDNLLAQIGDQYADLFLAAKNLSDAILLSDILRVNTEITKAPLSASMIKRYDEHHQDLTLLKALVRQQLPEKYKEIFFDQSKNGYAGYIDGGASQEEFYKFIKPILEKMDGTEELLVKLNREDLLRKQRTFDNGSIPHQIHLGELHAILRRQEDFYPFLKDNREKIEKILTFRIPYYVGPLARGNSRFAWMTRKSEETITPWNFEEVVDKGASAQSFIERMTNFDKNLPNEKVLPKHSLLYEYFTVYNELTKVKYVTEGMRKPAFLSGEQKKAIVDLLFKTNRKVTVKQLKEDYFKKIECFDSVEISGVEDRFNASLGTYHDLLKIIKDKDFLDNEENEDILEDIVLTLTLFEDREMIEERLKTYAHLFDDKVMKQLKRRRYTGWGRLSRKLINGIRDKQSGKTILDFLKSDGFANRNFMQLIHDDSLTFKEDIQKAQVSGQGDSLHEHIANLAGSPAIKKGILQTVKVVDELVKVMGRHKPENIVIEMARENQTTQKGQKNSRERMKRIEEGIKELGSQILKEHPVENTQLQNEKLYLYYLQNGRDMYVDQELDINRLSDYDVDHIVPQSFLKDDSIDNKVLTRSDKARGKSDNVPSEEVVKKMKNYWRQLLNAKLITQRKFDNLTKAERGGLSELDKAGFIKRQLVETRQITKHVAQILDSRMNTKYDENDKLIREVKVITLKSKLVSDFRKDFQFYKVREINNYHHAHDAYLNAVVGTALIKKYPKLESEFVYGDYKVYDVRKMIAKSEQEIGKATAKYFFYSNIMNFFKTEITLANGEIRKRPLIETNGETGEIVWDKGRDFATVRKVLSMPQVNIVKKTEVQTGGFSKESILPKRNSDKLIARKKDWDPKKYGGFDSPTVAYSVLVVAKVEKGKSKKLKSVKELLGITIMERSSFEKNPIDFLEAKGYKEVKKDLIIKLPKYSLFELENGRKRMLASAGELQKGNELALPSKYVNFLYLASHYEKLKGSPEDNEQKQLFVEQHKHYLDEIIEQISEFSKRVILADANLDKVLSAYNKHRDKPIREQAENIIHLFTLTNLGAPAAFKYFDTTIDRKRYTSTKEVLDATLIHQSITGLYETRIDLSQLGGDGGGGGGSSGGVPWILKKPLELTIKLDLEEQQGTLLNNSILSKKGKEELKQLFEKYSALWQSWENQVGHRRIRPHKIATGTVKPTPQKQYHINPKAKPDIQIVINDLLKQGVLIQKESTMNTPVYPVPKPNGRWRMVLDYRAVNKVTPLIAVQNQHSYGILGSLFKGRYKTTIDLSNGFWAHPIVPEDYWITAFTWQGKQYCWTVLPQGFLNSPGLFTGDVVDLLQGIPNVEVYVDDVYISHDSEKEHLEYLDILFNRLKEAGYIISLKKSNIANSIVDFLGFQITNEGRGLTDTFKEKLENITAPTTLKQLQSILGLLNFARNFIPDFTELIAPLYALIPKSTKNYVPWQIEHSTTLETLITKLNGAEYLQGRKGDKTLIMKVNASYTTGYIRYYNEGEKKPISYVSIVFSKTELKFTELEKLLTTVHKGLLKALDLSMGQNIHVYSPIVSMQNIQKTPQTAKKALASRWLSWLSYLEDPRIRFFYDPQMPALKDLPAVDTGKDNKKHPSNFQHIFYTDGSAITSPTKEGHLNAGMGIVYFINKDGNLQKQQEWSISLGNHTAQFAEIAAFEFALKKCLPLGGNILVVTDSNYVAKAYNEELDVWASNGFVNNRKKPLKHISKWKSVADLKRLRPDVVVTHEPGHQKLDSSPHAYGNNLADQLATQASFKVHAGKRTADGSEFEKRTADGSEFESPKKKAKVE

SEQ ID NO: 6661 - protein, 2091 aa, synthetic construct
MPAAKRVKLDGGDKKYSIGLDIGTNSVGWAVITDEYKVPSKKFKVLGNTDRHSIKKNLIGALLFDSGETAEATRLKRTARRRYTRRKNRICYLQEIFSNEMAKVDDSFFHRLEESFLVEEDKKHERHPIFGNIVDEVAYHEKYPTIYHLRKKLVDSTDKADLRLIYLALAHMIKFRGHFLIEGDLNPDNSDVDKLFIQLVQTYNQLFEENPINASGVDAKAILSARLSKSRRLENLIAQLPGEKKNGLFGNLIALSLGLTPNFKSNFDLAEDAKLQLSKDTYDDDLDNLLAQIGDQYADLFLAAKNLSDAILLSDILRVNTEITKAPLSASMIKRYDEHHQDLTLLKALVRQQLPEKYKEIFFDQSKNGYAGYIDGGASQEEFYKFIKPILEKMDGTEELLVKLNREDLLRKQRTFDNGSIPHQIHLGELHAILRRQEDFYPFLKDNREKIEKILTFRIPYYVGPLARGNSRFAWMTRKSEETITPWNFEEVVDKGASAQSFIERMTNFDKNLPNEKVLPKHSLLYEYFTVYNELTKVKYVTEGMRKPAFLSGEQKKAIVDLLFKTNRKVTVKQLKEDYFKKIECFDSVEISGVEDRFNASLGTYHDLLKIIKDKDFLDNEENEDILEDIVLTLTLFEDREMIEERLKTYAHLFDDKVMKQLKRRRYTGWGRLSRKLINGIRDKQSGKTILDFLKSDGFANRNFMQLIHDDSLTFKEDIQKAQVSGQGDSLHEHIANLAGSPAIKKGILQTVKVVDELVKVMGRHKPENIVIEMARENQTTQKGQKNSRERMKRIEEGIKELGSQILKEHPVENTQLQNEKLYLYYLQNGRDMYVDQELDINRLSDYDVDHIVPQSFLKDDSIDNKVLTRSDKARGKSDNVPSEEVVKKMKNYWRQLLNAKLITQRKFDNLTKAERGGLSELDKAGFIKRQLVETRQITKHVAQILDSRMNTKYDENDKLIREVKVITLKSKLVSDFRKDFQFYKVREINNYHHAHDAYLNAVVGTALIKKYPKLESEFVYGDYKVYDVRKMIAKSEQEIGKATAKYFFYSNIMNFFKTEITLANGEIRKRPLIETNGETGEIVWDKGRDFATVRKVLSMPQVNIVKKTEVQTGGFSKESILPKRNSDKLIARKKDWDPKKYGGFDSPTVAYSVLVVAKVEKGKSKKLKSVKELLGITIMERSSFEKNPIDFLEAKGYKEVKKDLIIKLPKYSLFELENGRKRMLASAGELQKGNELALPSKYVNFLYLASHYEKLKGSPEDNEQKQLFVEQHKHYLDEIIEQISEFSKRVILADANLDKVLSAYNKHRDKPIREQAENIIHLFTLTNLGAPAAFKYFDTTIDRKRYTSTKEVLDATLIHQSITGLYETRIDLSQLGGDGGGGGGSSGGTLGIEDEYRLHETSTEPDVSLGSTWLSDFPQAWAETGGMGLAVRQAPLIIPLKATSTPVSIQQYPMSHEARLGIKPHIQRLLDQGILVPCQSPWNTPLLPVKKPGTNDYRPVQDLREVNKRVEDIHPTVPNPYNLLSGLPPSHQWYTVLDLKDAFFCLRLHPTSQPLFAFEWRDPGMGISGQLTWTRLPQGFKNSPTLFDEALHRDLADFRIQHPDLILLQYVDDILLAATSELDCQQGTRALLQTLGDLGYRASAKKAQICQKQVKYLGYLLREGQRWLTEARKETVMGQPVPKTPRQLREFLGTAGFCRLWIPGFAEMAAPLYPLTKTGTLFSWGPDQQKAYQEIKQALLTAPALGLPDLTKPFELFVDEKQGYAKGVLTQKLGPWRRPVAYLSKKLDPVAAGWPPCLRMVAAIAVLTKDAGKLTMGQPLVILAPHAVEALVKQPPDRWLSNARMTHYQAMLLDTDRVQFGPVVALNPATLLPLPEEGAPHDCLEILAETHGTRPDLTDQPIPDADHTWYTDGSSFLQEGQRKAGAAVTTETEVIWAGALPAGTSAQRAELIALTQALKMAEGKRLNVYTDSRYAFATAHIHGEIYRRRGLLTSEGREIKNKSEILALLKALFLPKRLSIIHCLGHQKGDSAEARGNRLADQAAREAAIKTPPDTSTLLAGKRTADGSEFEKRTADGSEFESPKKKAKVE

SEQ ID NO: 6662 - protein, 2091 aa, synthetic construct
MPAAKRVKLDGGDKKYSIGLDIGTNSVGWAVITDEYKVPSKKFKVLGNTDRHSIKKNLIGALLFDSGETAEATRLKRTARRRYTRRKNRICYLQEIFSNEMAKVDDSFFHRLEESFLVEEDKKHERHPIFGNIVDEVAYHEKYPTIYHLRKKLVDSTDKADLRLIYLALAHMIKFRGHFLIEGDLNPDNSDVDKLFIQLVQTYNQLFEENPINASGVDAKAILSARLSKSRRLENLIAQLPGEKKNGLFGNLIALSLGLTPNFKSNFDLAEDAKLQLSKDTYDDDLDNLLAQIGDQYADLFLAAKNLSDAILLSDILRVNTEITKAPLSASMIKRYDEHHQDLTLLKALVRQQLPEKYKEIFFDQSKNGYAGYIDGGASQEEFYKFIKPILEKMDGTEELLVKLNREDLLRKQRTFDNGSIPHQIHLGELHAILRRQEDFYPFLKDNREKIEKILTFRIPYYVGPLARGNSRFAWMTRKSEETITPWNFEEVVDKGASAQSFIERMTNFDKNLPNEKVLPKHSLLYEYFTVYNELTKVKYVTEGMRKPAFLSGEQKKAIVDLLFKTNRKVTVKQLKEDYFKKIECFDSVEISGVEDRFNASLGTYHDLLKIIKDKDFLDNEENEDILEDIVLTLTLFEDREMIEERLKTYAHLFDDKVMKQLKRRRYTGWGRLSRKLINGIRDKQSGKTILDFLKSDGFANRNFMQLIHDDSLTFKEDIQKAQVSGQGDSLHEHIANLAGSPAIKKGILQTVKVVDELVKVMGRHKPENIVIEMARENQTTQKGQKNSRERMKRIEEGIKELGSQILKEHPVENTQLQNEKLYLYYLQNGRDMYVDQELDINRLSDYDVDHIVPQSFLKDDSIDNKVLTRSDKARGKSDNVPSEEVVKKMKNYWRQLLNAKLITQRKFDNLTKAERGGLSELDKAGFIKRQLVETRQITKHVAQILDSRMNTKYDENDKLIREVKVITLKSKLVSDFRKDFQFYKVREINNYHHAHDAYLNAVVGTALIKKYPKLESEFVYGDYKVYDVRKMIAKSEQEIGKATAKYFFYSNIMNFFKTEITLANGEIRKRPLIETNGETGEIVWDKGRDFATVRKVLSMPQVNIVKKTEVQTGGFSKESILPKRNSDKLIARKKDWDPKKYGGFDSPTVAYSVLVVAKVEKGKSKKLKSVKELLGITIMERSSFEKNPIDFLEAKGYKEVKKDLIIKLPKYSLFELENGRKRMLASAGELQKGNELALPSKYVNFLYLASHYEKLKGSPEDNEQKQLFVEQHKHYLDEIIEQISEFSKRVILADANLDKVLSAYNKHRDKPIREQAENIIHLFTLTNLGAPAAFKYFDTTIDRKRYTSTKEVLDATLIHQSITGLYETRIDLSQLGGDGGGGGGSSGGTLNIEDEYRLHETSKEPDVSLGSTWLSDFPQAWAETGGMGLAVRQAPLIIPLKATSTPVSIKQYPMSQEARLGIKPHIQRLLDQGILVPCQSPWNTPLLPVKKPGTNDYRPVQDLREVNKRVEDIHPTVPNPYNLLSGLPPSHQWYTVLDLKDAFFCLRLHPTSQPLFAFEWRDPEMGISGQLTWTRLPQGFKNSPTLFNEALHRDLAGFRIQHPDLILLQYVDDLLLAATSELDCQQGTRALLQTLGDLGYRASAKKAQICQKQVKYLGYLLKEGQRWLTEARKETVMGQPIPKTPRQLREFLGTAGFCRLWIPGFAEMAAPLYPLTKPGTLFNWGPDQQKAFQEIKQALLTAPALGLPDLTKPFELFVDEKQGYAKGVLTQKLGPWRRPVAYLSKKLDPVAAGWPPCLRMVAAIAVLTKDAGKLTMGQPLVILAPHAVEALVKQPPDRWLSNARMTHYQALLLDTDRVQFGPVVALNPATLLPLPEEGLQHDCLDILAEAHGTRSDLMDQPLPDADHTWYTDGSSFLQEGQRKAGAAVTTETEVIWARALPAGTSAQRAELIALTQALKMAEGKKLNVYTDSRYAFATAHIHGEIYRRRGWLTSEGKEIKNKDEILALLKALFLPKRLSIIHCPGHQKGNSAEARGNRMADQAAREVATRETPETSTLLAGKRTADGSEFEKRTADGSEFESPKKKAKVE

SEQ ID NO: 6663 - protein, 2091 aa, synthetic construct
MPAAKRVKLDGGDKKYSIGLDIGTNSVGWAVITDEYKVPSKKFKVLGNTDRHSIKKNLIGALLFDSGETAEATRLKRTARRRYTRRKNRICYLQEIFSNEMAKVDDSFFHRLEESFLVEEDKKHERHPIFGNIVDEVAYHEKYPTIYHLRKKLVDSTDKADLRLIYLALAHMIKFRGHFLIEGDLNPDNSDVDKLFIQLVQTYNQLFEENPINASGVDAKAILSARLSKSRRLENLIAQLPGEKKNGLFGNLIALSLGLTPNFKSNFDLAEDAKLQLSKDTYDDDLDNLLAQIGDQYADLFLAAKNLSDAILLSDILRVNTEITKAPLSASMIKRYDEHHQDLTLLKALVRQQLPEKYKEIFFDQSKNGYAGYIDGGASQEEFYKFIKPILEKMDGTEELLVKLNREDLLRKQRTFDNGSIPHQIHLGELHAILRRQEDFYPFLKDNREKIEKILTFRIPYYVGPLARGNSRFAWMTRKSEETITPWNFEEVVDKGASAQSFIERMTNFDKNLPNEKVLPKHSLLYEYFTVYNELTKVKYVTEGMRKPAFLSGEQKKAIVDLLFKTNRKVTVKQLKEDYFKKIECFDSVEISGVEDRFNASLGTYHDLLKIIKDKDFLDNEENEDILEDIVLTLTLFEDREMIEERLKTYAHLFDDKVMKQLKRRRYTGWGRLSRKLINGIRDKQSGKTILDFLKSDGFANRNFMQLIHDDSLTFKEDIQKAQVSGQGDSLHEHIANLAGSPAIKKGILQTVKVVDELVKVMGRHKPENIVIEMARENQTTQKGQKNSRERMKRIEEGIKELGSQILKEHPVENTQLQNEKLYLYYLQNGRDMYVDQELDINRLSDYDVDHIVPQSFLKDDSIDNKVLTRSDKARGKSDNVPSEEVVKKMKNYWRQLLNAKLITQRKFDNLTKAERGGLSELDKAGFIKRQLVETRQITKHVAQILDSRMNTKYDENDKLIREVKVITLKSKLVSDFRKDFQFYKVREINNYHHAHDAYLNAVVGTALIKKYPKLESEFVYGDYKVYDVRKMIAKSEQEIGKATAKYFFYSNIMNFFKTEITLANGEIRKRPLIETNGETGEIVWDKGRDFATVRKVLSMPQVNIVKKTEVQTGGFSKESILPKRNSDKLIARKKDWDPKKYGGFDSPTVAYSVLVVAKVEKGKSKKLKSVKELLGITIMERSSFEKNPIDFLEAKGYKEVKKDLIIKLPKYSLFELENGRKRMLASAGELQKGNELALPSKYVNFLYLASHYEKLKGSPEDNEQKQLFVEQHKHYLDEIIEQISEFSKRVILADANLDKVLSAYNKHRDKPIREQAENIIHLFTLTNLGAPAAFKYFDTTIDRKRYTSTKEVLDATLIHQSITGLYETRIDLSQLGGDGGGGGGSSGGTLNIEDEHRLHETSKEPDVSLGSTWLSDFPQAWAETGGMGLAVRQAPLIIPLKATSTPVSIKQYPMSQEARLGIKPHIQRLLDQGILVPCQSPWNTPLLPVKKPGTNDYRPVQDLREVNKRVEDIHPTVPNPYNLLSGLPPSHQWYTVLDLKDAFFCLRLHPTSQPLFAFEWRDPEMGISGQLTWTRLPQGFKNSPTLFNEALHRDLADFRIQHPDLILLQYVDDLLLAATSELDCQQGTRALLQTLGNLGYRASAKKAQICQKQVKYLGYLLKEGQRWLTEARKETVMGQPTPKTPRQLREFLGTAGFCRLWIPGFAEMAAPLYPLTKPGTLFNWGPDQQKAYQEIKQALLTAPALGLPDLTKPFELFVDEKQGYAKGVLTQKLGPWRRPVAYLSKKLDPVAAGWPPCLRMVAAIAVLTKDAGKLTMGQPLVILAPHAVEALVKQPPDRWLSNARMTHYQALLLDTDRVQFGPVVALNPATLLPLPEEGLQHNCLDILAEAHGTRPDLTDQPLPDADHTWYTDGSSLLQEGQRKAGAAVTTETEVIWAKALPAGTSAQRAELIALTQALKMAEGKKLNVYTDSRYAFATAHIHGEIYRRRGWLTSEGKEIKNKDEILALLKALFLPKRLSIIHCPGHQKGHSAEARGNRMADQAARKAAITETPDTSTLLAGKRTADGSEFEKRTADGSEFESPKKKAKVE

SEQ ID NO: 6664 - protein, 2091 aa, synthetic construct; identical to SEQ ID NO: 6663

SEQ ID NO: 6665 - protein, 2083 aa, synthetic construct
MPAAKRVKLDGGDKKYSIGLDIGTNSVGWAVITDEYKVPSKKFKVLGNTDRHSIKKNLIGALLFDSGETAEATRLKRTARRRYTRRKNRICYLQEIFSNEMAKVDDSFFHRLEESFLVEEDKKHERHPIFGNIVDEVAYHEKYPTIYHLRKKLVDSTDKADLRLIYLALAHMIKFRGHFLIEGDLNPDNSDVDKLFIQLVQTYNQLFEENPINASGVDAKAILSARLSKSRRLENLIAQLPGEKKNGLFGNLIALSLGLTPNFKSNFDLAEDAKLQLSKDTYDDDLDNLLAQIGDQYADLFLAAKNLSDAILLSDILRVNTEITKAPLSASMIKRYDEHHQDLTLLKALVRQQLPEKYKEIFFDQSKNGYAGYIDGGASQEEFYKFIKPILEKMDGTEELLVKLNREDLLRKQRTFDNGSIPHQIHLGELHAILRRQEDFYPFLKDNREKIEKILTFRIPYYVGPLARGNSRFAWMTRKSEETITPWNFEEVVDKGASAQSFIERMTNFDKNLPNEKVLPKHSLLYEYFTVYNELTKVKYVTEGMRKPAFLSGEQKKAIVDLLFKTNRKVTVKQLKEDYFKKIECFDSVEISGVEDRFNASLGTYHDLLKIIKDKDFLDNEENEDILEDIVLTLTLFEDREMIEERLKTYAHLFDDKVMKQLKRRRYTGWGRLSRKLINGIRDKQSGKTILDFLKSDGFANRNFMQLIHDDSLTFKEDIQKAQVSGQGDSLHEHIANLAGSPAIKKGILQTVKVVDELVKVMGRHKPENIVIEMARENQTTQKGQKNSRERMKRIEEGIKELGSQILKEHPVENTQLQNEKLYLYYLQNGRDMYVDQELDINRLSDYDVDHIVPQSFLKDDSIDNKVLTRSDKARGKSDNVPSEEVVKKMKNYWRQLLNAKLITQRKFDNLTKAERGGLSELDKAGFIKRQLVETRQITKHVAQILDSRMNTKYDENDKLIREVKVITLKSKLVSDFRKDFQFYKVREINNYHHAHDAYLNAVVGTALIKKYPKLESEFVYGDYKVYDVRKMIAKSEQEIGKATAKYFFYSNIMNFFKTEITLANGEIRKRPLIETNGETGEIVWDKGRDFATVRKVLSMPQVNIVKKTEVQTGGFSKESILPKRNSDKLIARKKDWDPKKYGGFDSPTVAYSVLVVAKVEKGKSKKLKSVKELLGITIMERSSFEKNPIDFLEAKGYKEVKKDLIIKLPKYSLFELENGRKRMLASAGELQKGNELALPSKYVNFLYLASHYEKLKGSPEDNEQKQLFVEQHKHYLDEIIEQISEFSKRVILADANLDKVLSAYNKHRDKPIREQAENIIHLFTLTNLGAPAAFKYFDTTIDRKRYTSTKEVLDATLIHQSITGLYETRIDLSQLGGDGGGGGGSSGGLDDEYRLYSPLVKPDQNIQFWLEQFPQAWAETAGMGLAKQVPPQVIQLKASATPVSVRQYPLSKEAQEGIRPHVQRLIQQGILVPVQSPWNTPLLPVRKPGTNDYRPVQDLREVNKRVQDIHPTVPNPYNLLCALPPQRSWYTVLDLKDAFFCLRLHPTSQPLFAFEWRDPGTGRTGQLTWTRLPQGFKNSPTIFNEALHRDLANFRIQHPQVTLLQYVDDLLLAGATKQDCLEGTKALLLELSDLGYRASAKKAQICRREVTYLGYSLRDGQRWLTEARKKTVVQIPAPTTAKQVREFLGKAGFCRLFIPGFATLAAPLYPLTKPKGEFSWAPEHQKAFDAIKKALLSAPALALPDVTKPFTLYVDERKGVARGVLTQTLGPWRRPVAYLSKKLDPVASGWPVCLKAIAAVAILVKDADKLTLGQNITVIAPHALENIVRQPPDRWMTNARMTHYQSLLLTERVTFAPPAALNPATLLPEETDEPVTHDCHQLLIEETGVRKDLTDIPLTGEVLTWFTDGSSYVVEGKRMAGAAVVDGTRTIWASSLPEGTSAQKAELMALTQALRLAEGKSINIYTDSRYAFATAHVHGAIYKQRGWLTSAGREIKNKEEILSLLEALHLPKRLAIIHCPGHQKAKDPISRGNQMADRVAKQAAQGVNLLPAGKRTADGSEFEKRTADGSEFESPKKKAKVE

SEQ ID NO: 6666 - protein, 2083 aa, synthetic construct; identical to SEQ ID NO: 6665

SEQ ID NO: 6667 - protein, 2082 aa, synthetic construct
MPAAKRVKLDGGDKKYSIGLDIGTNSVGWAVITDEYKVPSKKFKVLGNTDRHSIKKNLIGALLFDSGETAEATRLKRTARRRYTRRKNRICYLQEIFSNEMAKVDDSFFHRLEESFLVEEDKKHERHPIFGNIVDEVAYHEKYPTIYHLRKKLVDSTDKADLRLIYLALAHMIKFRGHFLIEGDLNPDNSDVDKLFIQLVQTYNQLFEENPINASGVDAKAILSARLSKSRRLENLIAQLPGEKKNGLFGNLIALSLGLTPNFKSNFDLAEDAKLQLSKDTYDDDLDNLLAQIGDQYADLFLAAKNLSDAILLSDILRVNTEITKAPLSASMIKRYDEHHQDLTLLKALVRQQLPEKYKEIFFDQSKNGYAGYIDGGASQEEFYKFIKPILEKMDGTEELLVKLNREDLLRKQRTFDNGSIPHQIHLGELHAILRRQEDFYPFLKDNREKIEKILTFRIPYYVGPLARGNSRFAWMTRKSEETITPWNFEEVVDKGASAQSFIERMTNFDKNLPNEKVLPKHSLLYEYFTVYNELTKVKYVTEGMRKPAFLSGEQKKAIVDLLFKTNRKVTVKQLKEDYFKKIECFDSVEISGVEDRFNASLGTYHDLLKIIKDKDFLDNEENEDILEDIVLTLTLFEDREMIEERLKTYAHLFDDKVMKQLKRRRYTGWGRLSRKLINGIRDKQSGKTILDFLKSDGFANRNFMQLIHDDSLTFKEDIQKAQVSGQGDSLHEHIANLAGSPAIKKGILQTVKVVDELVKVMGRHKPENIVIEMARENQTTQKGQKNSRERMKRIEEGIKELGSQILKEHPVENTQLQNEKLYLYYLQNGRDMYVDQELDINRLSDYDVDHIVPQSFLKDDSIDNKVLTRSDKARGKSDNVPSEEVVKKMKNYWRQLLNAKLITQRKFDNLTKAERGGLSELDKAGFIKRQLVETRQITKHVAQILDSRMNTKYDENDKLIREVKVITLKSKLVSDFRKDFQFYKVREINNYHHAHDAYLNAVVGTALIKKYPKLESEFVYGDYKVYDVRKMIAKSEQEIGKATAKYFFYSNIMNFFKTEITLANGEIRKRPLIETNGETGEIVWDKGRDFATVRKVLSMPQVNIVKKTEVQTGGFSKESILPKRNSDKLIARKKDWDPKKYGGFDSPTVAYSVLVVAKVEKGKSKKLKSVKELLGITIMERSSFEKNPIDFLEAKGYKEVKKDLIIKLPKYSLFELENGRKRMLASAGELQKGNELALPSKYVNFLYLASHYEKLKGSPEDNEQKQLFVEQHKHYLDEIIEQISEFSKRVILADANLDKVLSAYNKHRDKPIREQAENIIHLFTLTNLGAPAAFKYFDTTIDRKRYTSTKEVLDATLIHQSITGLYETRIDLSQLGGDGGGGGGSSGGIPWLMKKPLQLTTLVPLQEYEERLLKQTMLTGSYKEKLQSLFLKYDALWQHWENQVGHRRIKPHHIATGTVNPRPQKQYPINPKAKASIQTVINDLLKQGVLIQQNSIMNTPVYPVPKPDGKWRMVLDYREVNKTIPLIAAQNQHSAGILSSIFRGKYKTTLDLSNGFWAHSITPESYWLTAFTWLGQQYCWTRLPQGFLNSPALFNADVVDLLKEVPNVQVYVDDIYISHDDPREHLEQLEKVFSLLLNAGYVVSLKKSEIAQHEVEFLGFNITKEGRGLTETFKQKLLNITPPRDLKQLQSILGLLNFARNFIPNFSELVKPLYNIIATAPGKYITWTTDNSQQLQNIISMLNSAENLEERNPEVRLIMKVNTSPSAGYIRFYNEFAKRPIMYLNYVYTKAEVKFTNTEKLLTTIHKGLIKALDLGMGQEILVYSPIVSMTKIQKTPLPERKALPIRWITWMSYLEDPRIQFHYDKTLPELQQVPTVTDDIIAKIKHPSEFSMVFYTDGSAIKHPNVNKSHNAGMGIAQVQFKPEFTVINTWSIPLGDHTAQLAEVAAVEFACKKALKIDGPVLIVTDSFYVAESVNKELPYWQSNGFFNNKKKPLKHVSKWKSIADCIQLKPDIIIIHEKGHQPTASTFHTEGNNLADKLATQGSYVVNAGKRTADGSEFEKRTADGSEFESPKKKAKVE

SEQ ID NO: 6668 - protein, 2089 aa, synthetic construct
MPAAKRVKLDGGDKKYSIGLDIGTNSVGWAVITDEYKVPSKKFKVLGNTDRHSIKKNLIGALLFDSGETAEATRLKRTARRRYTRRKNRICYLQEIFSNEMAKVDDSFFHRLEESFLVEEDKKHERHPIFGNIVDEVAYHEKYPTIYHLRKKLVDSTDKADLRLIYLALAHMIKFRGHFLIEGDLNPDNSDVDKLFIQLVQTYNQLFEENPINASGVDAKAILSARLSKSRRLENLIAQLPGEKKNGLFGNLIALSLGLTPNFKSNFDLAEDAKLQLSKDTYDDDLDNLLAQIGDQYADLFLAAKNLSDAILLSDILRVNTEITKAPLSASMIKRYDEHHQDLTLLKALVRQQLPEKYKEIFFDQSKNGYAGYIDGGASQEEFYKFIKPILEKMDGTEELLVKLNREDLLRKQRTFDNGSIPHQIHLGELHAILRRQEDFYPFLKDNREKIEKILTFRIPYYVGPLARGNSRFAWMTRKSEETITPWNFEEVVDKGASAQSFIERMTNFDKNLPNEKVLPKHSLLYEYFTVYNELTKVKYVTEGMRKPAFLSGEQKKAIVDLLFKTNRKVTVKQLKEDYFKKIECFDSVEISGVEDRFNASLGTYHDLLKIIKDKDFLDNEENEDILEDIVLTLTLFEDREMIEERLKTYAHLFDDKVMKQLKRRRYTGWGRLSRKLINGIRDKQSGKTILDFLKSDGFANRNFMQLIHDDSLTFKEDIQKAQVSGQGDSLHEHIANLAGSPAIKKGILQTVKVVDELVKVMGRHKPENIVIEMARENQTTQKGQKNSRERMKRIEEGIKELGSQILKEHPVENTQLQNEKLYLYYLQNGRDMYVDQELDINRLSDYDVDHIVPQSFLKDDSIDNKVLTRSDKARGKSDNVPSEEVVKKMKNYWRQLLNAKLITQRKFDNLTKAERGGLSELDKAGFIKRQLVETRQITKHVAQILDSRMNTKYDENDKLIREVKVITLKSKLVSDFRKDFQFYKVREINNYHHAHDAYLNAVVGTALIKKYPKLESEFVYGDYKVYDVRKMIAKSEQEIGKATAKYFFYSNIMNFFKTEITLANGEIRKRPLIETNGETGEIVWDKGRDFATVRKVLSMPQVNIVKKTEVQTGGFSKESILPKRNSDKLIARKKDWDPKKYGGFDSPTVAYSVLVVAKVEKGKSKKLKSVKELLGITIMERSSFEKNPIDFLEAKGYKEVKKDLIIKLPKYSLFELENGRKRMLASAGELQKGNELALPSKYVNFLYLASHYEKLKGSPEDNEQKQLFVEQHKHYLDEIIEQISEFSKRVILADANLDKVLSAYNKHRDKPIREQAENIIHLFTLTNLGAPAAFKYFDTTIDRKRYTSTKEVLDATLIHQSITGLYETRIDLSQLGGDGGGGGGSSGGVLNLEEEYRLHEKPVPSSIDPSWLQLFPTVWAERAGMGLANQVPPVVVELRSGASPVAVRQYPMSKEAREGIRPHIQRFLDLGVLVPCQSPWNTPLLPVKKPGTNDYRPVQDLREINKRVQDIHPTVPNPYNLLSSLPPSHTWYSVLDLKDAFFCLKLHPNSQPLFAFEWRDPEKGNTGQLTWTRLPQGFKNSPTLFNEALHRDLAPFRALNPQVVLLQYVDDLLVAAPTYRDCKEGTQKLLQELSKLGYRVSAKKAQLCQKEVTYLGYLLKEGKRWLTPARKATVMKIPPPTTPRQVREFLGTAGFCRLWIPGFASLAAPLYPLTKPSIPFIWTEEHQKAFDRIKEALLSAPALALPDLTKPFTLYVDERAGVARGVLTQTLGPWRRPVAYLSKKLDPVASGWPTCLKAVAAVALLLKDADKLTLGQNVTVIASHSLESIVRQPPDRWMTNARMTHYQSLLLNERVSFAPPAVLNPATLLPVESEATPVHRCSEILAEETGTRRDLKDQPLPGVPAWYTDGSSFIAEGKRRAGAAIVDGKRTVWASSLPEGTSAQKAELVALTQALRLAEGKDINIYTDSRYAFATAHIHGAIYKQRGWLTSAGKDIKNKEEILALLEAIHLPKRVAIIHCPGHQKGNDPVATGNRRADEAAKQAALSTRVLAETTKPAGKRTADGSEFEKRTADGSEFESPKKKAKVE

SEQ ID NO: 6669 - protein, 2089 aa, synthetic construct
MPAAKRVKLDGGDKKYSIGLDIGTNSVGWAVITDEYKVPSKKFKVLGNTDRHSIKKNLIGALLFDSGETAEATRLKRTARRRYTRRKNRICYLQEIFSNEMAKVDDSFFHRLEESFLVEEDKKHERHPIFGNIVDEVAYHEKYPTIYHLRKKLVDSTDKADLRLIYLALAHMIKFRGHFLIEGDLNPDNSDVDKLFIQLVQTYNQLFEENPINASGVDAKAILSARLSKSRRLENLIAQLPGEKKNGLFGNLIALSLGLTPNFKSNFDLAEDAKLQLSKDTYDDDLDNLLAQIGDQYADLFLAAKNLSDAILLSDILRVNTEITKAPLSASMIKRYDEHHQDLTLLKALVRQQLPEKYKEIFFDQSKNGYAGYIDGGASQEEFYKFIKPILEKMDGTEELLVKLNREDLLRKQRTFDNGSIPHQIHLGELHAILRRQEDFYPFLKDNREKIEKILTFRIPYYVGPLARGNSRFAWMTRKSEETITPWNFEEVVDKGASAQSFIERMTNFDKNLPNEKVLPKHSLLYEYFTVYNELTKVKYVTEGMRKPAFLSGEQKKAIVDLLFKTNRKVTVKQLKEDYFKKIECFDSVEISGVEDRFNASLGTYHDLLKIIKDKDFLDNEENEDILEDIVLTLTLFEDREMIEERLKTYAHLFDDKVMKQLKRRRYTGWGRLSRKLINGIRDKQSGKTILDFLKSDGFANRNFMQLIHDDSLTFKEDIQKAQVSGQGDSLHEHIANLAGSPAIKKGILQTVKVVDELVKVMGRHKPENIVIEMARENQTTQKGQKNSRERMKRIEEGIKELGSQILKEHPVENTQLQNEKLYLYYLQNGRDMYVDQELDINRLSDYDVDHIVPQSFLKDDSIDNKVLTRSDKARGKSDNVPSEEVVKKMKNYWRQLLNAKLITQRKFDNLTKAERGGLSELDKAGFIKRQLVETRQITKHVAQILDSRMNTKYDENDKLIREVKVITLKSKLVSDFRKDFQFYKVREINNYHHAHDAYLNAVVGTALIKKYPKLESEFVYGDYKVYDVRKMIAKSEQEIGKATAKYFFYSNIMNFFKTEITLANGEIRKRPLIETNGETGEIVWDKGRDFATVRKVLSMPQVNIVKKTEVQTGGFSKESILPKRNSDKLIARKKDWDPKKYGGFDSPTVAYSVLVVAKVEKGKSKKLKSVKELLGITIMERSSFEKNPIDFLEAKGYKEVKKDLIIKLPKYSLFELENGRKRMLASAGELQKGNELALPSKYVNFLYLASHYEKLKGSPEDNEQKQLFVEQHKHYLDEIIEQISEFSKRVILADANLDKVLSAYNKHRDKPIREQAENIIHLFTLTNLGAPAAFKYFDTTIDRKRYTSTKEVLDATLIHQSITGLYETRIDLSQLGGDGGGGGGSSGGVLNLEEEYRLHEKPVPSSIDPSWLQLFPTVWAERAGMGLANQVPPVVVELRSGASPVAVRQYPMSKEAREGIRPHIQRFLDLGVLVPCQSPWNTPLLPVKKPGTNDYRPVQDLREINKRVQDIHPTVPNPYNLLSSLPPSHTWYSVLDLKDAFFCLKLHPNSQPLFAFEWRDPEKGNTGQLTWTRLPQGFKNSPTLFNEALHRDLAPFRALNPQVVLLQYVDDLLVAAPTYRDCKEGTQKLLQELSKLGYRVSAKKAQLCQKEVTYLGYLLKEGKRWLTPARKATVMKIPPPTTPRQVREFLGKAGFCRLFIPGFASLAAPLYPLTKPSIPFIWTEEHQKAFDRIKEALLSAPALALPDLTKPFTLYVDERAGVARGVLTQTLGPWRRPVAYLSKKLDPVASGWPTCLKAVAAVALLLKDADKLTLGQNVTVIASHSLESIVRQPPDRWMTNARMTHYQSLLLNERVSFAPPAVLNPATLLPVESEATPVHRCSEILAEETGTRRDLKDQPLPGVPAWYTDGSSFIAEGKRRAGAAIVDGKRTVWASSLPEGTSAQKAELVALTQALRLAEGKDINIYTDSRYAFATAHIHGAIYKQRGWLTSAGKDIKNKEEILALLEAIHLPKRVAIIHCPGHQKGNDPVATGNRRADEAAKQAALSTRVLAETTKPAGKRTADGSEFEKRTADGSEFESPKKKAKVE

SEQ ID NO: 6670 - protein, 2091 aa, synthetic construct
MPAAKRVKLDGGDKKYSIGLDIGTNSVGWAVITDEYKVPSKKFKVLGNTDRHSIKKNLIGALLFDSGETAEATRLKRTARRRYTRRKNRICYLQEIFSNEMAKVDDSFFHRLEESFLVEEDKKHERHPIFGNIVDEVAYHEKYPTIYHLRKKLVDSTDKADLRLIYLALAHMIKFRGHFLIEGDLNPDNSDVDKLFIQLVQTYNQLFEENPINASGVDAKAILSARLSKSRRLENLIAQLPGEKKNGLFGNLIALSLGLTPNFKSNFDLAEDAKLQLSKDTYDDDLDNLLAQIGDQYADLFLAAKNLSDAILLSDILRVNTEITKAPLSASMIKRYDEHHQDLTLLKALVRQQLPEKYKEIFFDQSKNGYAGYIDGGASQEEFYKFIKPILEKMDGTEELLVKLNREDLLRKQRTFDNGSIPHQIHLGELHAILRRQEDFYPFLKDNREKIEKILTFRIPYYVGPLARGNSRFAWMTRKSEETITPWNFEEVVDKGASAQSFIERMTNFDKNLPNEKVLPKHSLLYEYFTVYNELTKVKYVTEGMRKPAFLSGEQKKAIVDLLFKTNRKVTVKQLKEDYFKKIECFDSVEISGVEDRFNASLGTYHDLLKIIKDKDFLDNEENEDILEDIVLTLTLFEDREMIEERLKTYAHLFDDKVMKQLKRRRYTGWGRLSRKLINGIRDKQSGKTILDFLKSDGFANRNFMQLIHDDSLTFKEDIQKAQVSGQGDSLHEHIANLAGSPAIKKGILQTVKVVDELVKVMGRHKPENIVIEMARENQTTQKGQKNSRERMKRIEEGIKELGSQILKEHPVENTQLQNEKLYLYYLQNGRDMYVDQELDINRLSDYDVDHIVPQSFLKDDSIDNKVLTRSDKARGKSDNVPSEEVVKKMKNYWRQLLNAKLITQRKFDNLTKAERGGLSELDKAGFIKRQLVETRQITKHVAQILDSRMNTKYDENDKLIREVKVITLKSKLVSDFRKDFQFYKVREINNYHHAHDAYLNAVVGTALIKKYPKLESEFVYGDYKVYDVRKMIAKSEQEIGKATAKYFFYSNIMNFFKTEITLANGEIRKRPLIETNGETGEIVWDKGRDFATVRKVLSMPQVNIVKKTEVQTGGFSKESILPKRNSDKLIARKKDWDPKKYGGFDSPTVAYSVLVVAKVEKGKSKKLKSVKELLGITIMERSSFEKNPIDFLEAKGYKEVKKDLIIKLPKYSLFELENGRKRMLASAGELQKGNELALPSKYVNFLYLASHYEKLKGSPEDNEQKQLFVEQHKHYLDEIIEQISEFSKRVILADANLDKVLSAYNKHRDKPIREQAENIIHLFTLTNLGAPAAFKYFDTTIDRKRYTSTKEVLDATLIHQSITGLYETRIDLSQLGGDGGGGGGSSGGTLNIEDEYRLHETSKEPDVPLGSTWLSDFPQAWAETGGMGLAVRQAPLIIPLKATSTPVSIKQYPMSQEARLGIKPHIQRLLDQGILVPCQSPWNTPLLPVKKPGTNDYRPVQDLREVNKRVEDIHPTVPNPYNLLSGLPPSHQWYTVLDLKDAFFCLRLHPTSQPLFAFEWRDPEMGISGQLTWTRLPQGFKNSPTLFNEALHRDLADFRIQHPDLILLQYVDDLLLAATSEQDCQRGTRALLQTLGNLGYRASAKKAQICQKQVKYLGYLLKEGQRWLTEARKETVMGQPTPKTPRQLREFLGTAGFCRLWIPGFAEMAAPLYPLTKPGTLFNWGPDQQKAYQEIKQALLTAPALGLPDLTKPFELFVDEKQGYAKGVLTQKLGPWRRPVAYLSKKLDPVAAGWPPCLRMVAAIAVLTKDAGKLTMGQPLVILAPHAVEALVKQPPDRWLSNARMTHYQAMLLDTDRVQFGPVVALNPATLLPLPEKEAPHDCLEILAETHGTRPDLTDQPIPDADYTWYTDGSSFLQEGQRRAGAAVTTETEVIWARALPAGTSAQRAELIALTQALKMAEGKKLNVYTDSRYAFATAHVHGEIYRRRGWLTSEGREIKNKNEILALLKALFLPKRLSIIHCPGHQKGNSAEARGNRMADQAAREAAMKAVLETSTLLAGKRTADGSEFEKRTADGSEFESPKKKAKVE

SEQ ID NO: 6671 - protein, 2093 aa, synthetic construct
MPAAKRVKLDGGDKKYSIGLDIGTNSVGWAVITDEYKVPSKKFKVLGNTDRHSIKKNLIGALLFDSGETAEATRLKRTARRRYTRRKNRICYLQEIFSNEMAKVDDSFFHRLEESFLVEEDKKHERHPIFGNIVDEVAYHEKYPTIYHLRKKLVDSTDKADLRLIYLALAHMIKFRGHFLIEGDLNPDNSDVDKLFIQLVQTYNQLFEENPINASGVDAKAILSARLSKSRRLENLIAQLPGEKKNGLFGNLIALSLGLTPNFKSNFDLAEDAKLQLSKDTYDDDLDNLLAQIGDQYADLFLAAKNLSDAILLSDILRVNTEITKAPLSASMIKRYDEHHQDLTLLKALVRQQLPEKYKEIFFDQSKNGYAGYIDGGASQEEFYKFIKPILEKMDGTEELLVKLNREDLLRKQRTFDNGSIPHQIHLGELHAILRRQEDFYPFLKDNREKIEKILTFRIPYYVGPLARGNSRFAWMTRKSEETITPWNFEEVVDKGASAQSFIERMTNFDKNLPNEKVLPKHSLLYEYFTVYNELTKVKYVTEGMRKPAFLSGEQKKAIVDLLFKTNRKVTVKQLKEDYFKKIECFDSVEISGVEDRFNASLGTYHDLLKIIKDKDFLDNEENEDILEDIVLTLTLFEDREMIEERLKTYAHLFDDKVMKQLKRRRYTGWGRLSRKLINGIRDKQSGKTILDFLKSDGFANRNFMQLIHDDSLTFKEDIQKAQVSGQGDSLHEHIANLAGSPAIKKGILQTVKVVDELVKVMGRHKPENIVIEMARENQTTQKGQKNSRERMKRIEEGIKELGSQILKEHPVENTQLQNEKLYLYYLQNGRDMYVDQELDINRLSDYDVDHIVPQSFLKDDSIDNKVLTRSDKARGKSDNVPSEEVVKKMKNYWRQLLNAKLITQRKFDNLTKAERGGLSELDKAGFIKRQLVETRQITKHVAQILDSRMNTKYDENDKLIREVKVITLKSKLVSDFRKDFQFYKVREINNYHHAHDAYLNAVVGTALIKKYPKLESEFVYGDYKVYDVRKMIAKSEQEIGKATAKYFFYSNIMNFFKTEITLANGEIRKRPLIETNGETGEIVWDKGRDFATVRKVLSMPQVNIVKKTEVQTGGFSKESILPKRNSDKLIARKKDWDPKKYGGFDSPTVAYSVLVVAKVEKGKSKKLKSVKELLGITIMERSSFEKNPIDFLEAKGYKEVKKDLIIKLPKYSLFELENGRKRMLASAGELQKGNELALPSKYVNFLYLASHYEKLKGSPEDNEQKQLFVEQHKHYLDEIIEQISEFSKRVILADANLDKVLSAYNKHRDKPIREQAENIIHLFTLTNLGAPAAFKYFDTTIDRKRYTSTKEVLDATLIHQSITGLYETRIDLSQLGGDGGGSSGGGGGTAPLEEEYRLFLEAPIQNVTLLEQWKREIPKVWAEINPPGLASTQAPIHVQLLSTALPVRVRQYPITLEAKRSLRETIRKFRAAGILRPVHSPWNTPLLPVRKSGTSEYRMVQDLREVNKRVETIHPTVPNPYTLLSLLPPDRIWYSVLDLKDAFFCIPLAPESQLIFAFEWADAEEGESGQLTWTRLPQGFKNSPTLFDEALNRDLQGFRLDHPSVSLLQYVDDLLIAADTQAACLSATRDLLMTLAELGYRVSGKKAQLCQEEVTYLGFKIHKGSRSLSNSRTQAILQIPVPKTKRQVREFLGTIGYCRLWIPGFAELAQPLYAATRGGNDPLVWGEKEEEAFQSLKLALTQPPALALPSLDKPFQLFVEETSGAAKGVLTQALGPWKRPVAYLSKRLDPVAAGWPRCLRAIAAAALLTREASKLTFGQDIEITSSHNLESLLRSPPDKWLTNARITQYQVLLLDPPRVRFKQTAALNPATLLPETDDTLPIHHCLDTLDSLTSTRPDLTDQPLAQAEATLFTDGSSYIRDGKRYAGAAVVTLDSVIWAEPLPIGTSAQKAELIALTKALEWSKDKSVNIYTDSRYAFATLHVHGMIYRERGLLTAGGKAIKNAPEILALLTAVWLPKRVAVMHCKGHQKDDAPTSTGNRRADEVAREVAIRPLSTQATISAGKRTADGSEFEKRTADGSEFESPKKKAKVE

SEQ ID NO: 6672 - protein, 2097 aa, synthetic construct
MPAAKRVKLDGGDKKYSIGLDIGTNSVGWAVITDEYKVPSKKFKVLGNTDRHSIKKNLIGALLFDSGETAEATRLKRTARRRYTRRKNRICYLQEIFSNEMAKVDDSFFHRLEESFLVEEDKKHERHPIFGNIVDEVAYHEKYPTIYHLRKKLVDSTDKADLRLIYLALAHMIKFRGHFLIEGDLNPDNSDVDKLFIQLVQTYNQLFEENPINASGVDAKAILSARLSKSRRLENLIAQLPGEKKNGLFGNLIALSLGLTPNFKSNFDLAEDAKLQLSKDTYDDDLDNLLAQIGDQYADLFLAAKNLSDAILLSDILRVNTEITKAPLSASMIKRYDEHHQDLTLLKALVRQQLPEKYKEIFFDQSKNGYAGYIDGGASQEEFYKFIKPILEKMDGTEELLVKLNREDLLRKQRTFDNGSIPHQIHLGELHAILRRQEDFYPFLKDNREKIEKILTFRIPYYVGPLARGNSRFAWMTRKSEETITPWNFEEVVDKGASAQSFIERMTNFDKNLPNEKVLPKHSLLYEYFTVYNELTKVKYVTEGMRKPAFLSGEQKKAIVDLLFKTNRKVTVKQLKEDYFKKIECFDSVEISGVEDRFNASLGTYHDLLKIIKDKDFLDNEENEDILEDIVLTLTLFEDREMIEERLKTYAHLFDDKVMKQLKRRRYTGWGRLSRKLINGIRDKQSGKTILDFLKSDGFANRNFMQLIHDDSLTFKEDIQKAQVSGQGDSLHEHIANLAGSPAIKKGILQTVKVVDELVKVMGRHKPENIVIEMARENQTTQKGQKNSRERMKRIEEGIKELGSQILKEHPVENTQLQNEKLYLYYLQNGRDMYVDQELDINRLSDYDVDHIVPQSFLKDDSIDNKVLTRSDKARGKSDNVPSEEVVKKMKNYWRQLLNAKLITQRKFDNLTKAERGGLSELDKAGFIKRQLVETRQITKHVAQILDSRMNTKYDENDKLIREVKVITLKSKLVSDFRKDFQFYKVREINNYHHAHDAYLNAVVGTALIKKYPKLESEFVYGDYKVYDVRKMIAKSEQEIGKATAKYFFYSNIMNFFKTEITLANGEIRKRPLIETNGETGEIVWDKGRDFATVRKVLSMPQVNIVKKTEVQTGGFSKESILPKRNSDKLIARKKDWDPKKYGGFDSPTVAYSVLVVAKVEKGKSKKLKSVKELLGITIMERSSFEKNPIDFLEAKGYKEVKKDLIIKLPKYSLFELENGRKRMLASAGELQKGNELALPSKYVNFLYLASHYEKLKGSPEDNEQKQLFVEQHKHYLDEIIEQISEFSKRVILADANLDKVLSAYNKHRDKPIREQAENIIHLFTLTNLGAPAAFKYFDTTIDRKRYTSTKEVLDATLIHQSITGLYETRIDLSQLGGDGGGSSGGGGGTVSLQDEHRLFDIPVTTSLPDVWLQDFPQAWAETGGLGRAKCQAPIIIDLKPTAVPVSIKQYPMSLEAHMGIRQHIIKFLELGVLRPCRSPWNTPLLPVKKPGTQDYRPVQDLREINKRTVDIHPTVPNPYNLLSTLKPDYSWYTVLDLKDAFFCLPLAPQSQELFAFEWKDPERGISGQLTWTRLPQGFKNSPTLFNEALHRDLTDFRTQHPEVTLLQYVDDLLLAAPTKKACTQGTRHLLQELGEKGYRASAKKAQICQTKVTYLGYILSEGKRWLTPGRIETVARIPPPRNPREVREFLGKAGFCRLFIPGFAELAAPLYALTKPSTPFTWQTEHQLAFEALKKALLSAPALGLPDTSKPFTLFLDERQGIAKGVLTQKLGPWKRPVAYLSKKLDPVAAGWPPCLRIMAATAMLVKDSAKLTLGQPLTVITPHTLEAIVRQPPDRWITNARLTHYQALLLDTDRVQFGPPVTLNPATLLPVPENQPSPHDCRQVLAETHGTREDLKDQELPDADHTWYTDGSSYLDSGTRRAGAAVVDGHNTIWAQSLPPGTSAQKAELIALTKALELSKGKKANIYTDSRYAFATAHTHGSIYERRGWLTSEGKEIKNKAEIIALLKALFLPQEVAIIHCPGHQKGQDPVAVGNRQADRVARQAAMAEVLTLATEPDNTSHITAGKRTADGSEFEKRTADGSEFESPKKKAKVE

SEQ ID NO: 6673 - protein, 2008 aa, synthetic construct
MPAAKRVKLDGGDKKYSIGLDIGTNSVGWAVITDEYKVPSKKFKVLGNTDRHSIKKNLIGALLFDSGETAEATRLKRTARRRYTRRKNRICYLQEIFSNEMAKVDDSFFHRLEESFLVEEDKKHERHPIFGNIVDEVAYHEKYPTIYHLRKKLVDSTDKADLRLIYLALAHMIKFRGHFLIEGDLNPDNSDVDKLFIQLVQTYNQLFEENPINASGVDAKAILSARLSKSRRLENLIAQLPGEKKNGLFGNLIALSLGLTPNFKSNFDLAEDAKLQLSKDTYDDDLDNLLAQIGDQYADLFLAAKNLSDAILLSDILRVNTEITKAPLSASMIKRYDEHHQDLTLLKALVRQQLPEKYKEIFFDQSKNGYAGYIDGGASQEEFYKFIKPILEKMDGTEELLVKLNREDLLRKQRTFDNGSIPHQIHLGELHAILRRQEDFYPFLKDNREKIEKILTFRIPYYVGPLARGNSRFAWMTRKSEETITPWNFEEVVDKGASAQSFIERMTNFDKNLPNEKVLPKHSLLYEYFTVYNELTKVKYVTEGMRKPAFLSGEQKKAIVDLLFKTNRKVTVKQLKEDYFKKIECFDSVEISGVEDRFNASLGTYHDLLKIIKDKDFLDNEENEDILEDIVLTLTLFEDREMIEERLKTYAHLFDDKVMKQLKRRRYTGWGRLSRKLINGIRDKQSGKTILDFLKSDGFANRNFMQLIHDDSLTFKEDIQKAQVSGQGDSLHEHIANLAGSPAIKKGILQTVKVVDELVKVMGRHKPENIVIEMARENQTTQKGQKNSRERMKRIEEGIKELGSQILKEHPVENTQLQNEKLYLYYLQNGRDMYVDQELDINRLSDYDVDHIVPQSFLKDDSIDNKVLTRSDKARGKSDNVPSEEVVKKMKNYWRQLLNAKLITQRKFDNLTKAERGGLSELDKAGFIKRQLVETRQITKHVAQILDSRMNTKYDENDKLIREVKVITLKSKLVSDFRKDFQFYKVREINNYHHAHDAYLNAVVGTALIKKYPKLESEFVYGDYKVYDVRKMIAKSEQEIGKATAKYFFYSNIMNFFKTEITLANGEIRKRPLIETNGETGEIVWDKGRDFATVRKVLSMPQVNIVKKTEVQTGGFSKESILPKRNSDKLIARKKDWDPKKYGGFDSPTVAYSVLVVAKVEKGKSKKLKSVKELLGITIMERSSFEKNPIDFLEAKGYKEVKKDLIIKLPKYSLFELENGRKRMLASAGELQKGNELALPSKYVNFLYLASHYEKLKGSPEDNEQKQLFVEQHKHYLDEIIEQISEFSKRVILADANLDKVLSAYNKHRDKPIREQAENIIHLFTLTNLGAPAAFKYFDTTIDRKRYTSTKEVLDATLIHQSITGLYETRIDLSQLGGDGGGSSGGGGGAVLGLEHLPRPPQISQFPLNPERLQALQHLVRKALEAGHIEPYTGPGNNPVFPVKKANGTWRFIHDLRATNSLTIDLSSSSPGPPDLSSLPTTLAHLQTIDLRDAFFQIPLPKQFQPYFAFTVPQQCNYGPGTRYAWKVLPQGFKNSPTLFEMQLAHILQPIRQAFPQCTILQYMDDILLASPSHEDLLLLSEATMASLISHGLPVSENKTQQTPGTIKFLGQIISPNHLTYDAVPTVPIRSRWALPELQALLGEIQWVSKGTPTLRQPLHSLYCALQRHTDPRDQIYLNPSQVQSLVQLRQALSQNCRSRLVQTLPLLGAIMLTLTGTTTVVFQSKEQWPLVWLHAPLPHTSQCPWGQLLASAVLLLDKYTLQSYGLLCQTIHHNISTQTFNQFIQTSDHPSVPILLHHSHRFKNLGAQTGELWNTFLKTAAPLAPVKALMPVFTLSPVIINTAPCLFSDGSTSRAAYILWDKQILSQRSFPLPPPHKSAQRAELLGLLHGLSSARSWRCLNIFLDSKYLYHYLRTLALGTFQGRSSQAPFQALLPRLLSRKVVYLHHVRSHTNLPDPISRLNALTDALLITPVLQLAGKRTADGSEFEKRTADGSEFESPKKKAKVE

SEQ ID NO: 6674 - protein, 2122 aa, synthetic construct
MPAAKRVKLDGGDKKYSIGLDIGTNSVGWAVITDEYKVPSKKFKVLGNTDRHSIKKNLIGALLFDSGETAEATRLKRTARRRYTRRKNRICYLQEIFSNEMAKVDDSFFHRLEESFLVEEDKKHERHPIFGNIVDEVAYHEKYPTIYHLRKKLVDSTDKADLRLIYLALAHMIKFRGHFLIEGDLNPDNSDVDKLFIQLVQTYNQLFEENPINASGVDAKAILSARLSKSRRLENLIAQLPGEKKNGLFGNLIALSLGLTPNFKSNFDLAEDAKLQLSKDTYDDDLDNLLAQIGDQYADLFLAAKNLSDAILLSDILRVNTEITKAPLSASMIKRYDEHHQDLTLLKALVRQQLPEKYKEIFFDQSKNGYAGYIDGGASQEEFYKFIKPILEKMDGTEELLVKLNREDLLRKQRTFDNGSIPHQIHLGELHAILRRQEDFYPFLKDNREKIEKILTFRIPYYVGPLARGNSRFAWMTRKSEETITPWNFEEVVDKGASAQSFIERMTNFDKNLPNEKVLPKHSLLYEYFTVYNELTKVKYVTEGMRKPAFLSGEQKKAIVDLLFKTNRKVTVKQLKEDYFKKIECFDSVEISGVEDRFNASLGTYHDLLKIIKDKDFLDNEENEDILEDIVLTLTLFEDREMIEERLKTYAHLFDDKVMKQLKRRRYTGWGRLSRKLINGIRDKQSGKTILDFLKSDGFANRNFMQLIHDDSLTFKEDIQKAQVSGQGDSLHEHIANLAGSPAIKKGILQTVKVVDELVKVMGRHKPENIVIEMARENQTTQKGQKNSRERMKRIEEGIKELGSQILKEHPVENTQLQNEKLYLYYLQNGRDMYVDQELDINRLSDYDVDHIVPQSFLKDDSIDNKVLTRSDKARGKSDNVPSEEVVKKMKNYWRQLLNAKLITQRKFDNLTKAERGGLSELDKAGFIKRQLVETRQITKHVAQILDSRMNTKYDENDKLIREVKVITLKSKLVSDFRKDFQFYKVREINNYHHAHDAYLNAVVGTALIKKYPKLESEFVYGDYKVYDVRKMIAKSEQEIGKATAKYFFYSNIMNFFKTEITLANGEIRKRPLIETNGETGEIVWDKGRDFATVRKVLSMPQVNIVKKTEVQTGGFSKESILPKRNSDKLIARKKDWDPKKYGGFDSPTVAYSVLVVAKVEKGKSKKLKSVKELLGITIMERSSFEKNPIDFLEAKGYKEVKKDLIIKLPKYSLFELENGRKRMLASAGELQKGNELALPSKYVNFLYLASHYEKLKGSPEDNEQKQLFVEQHKHYLDEIIEQISEFSKRVILADANLDKVLSAYNKHRDKPIREQAENIIHLFTLTNLGAPAAFKYFDTTIDRKRYTSTKEVLDATLIHQSITGLYETRIDLSQLGGDGGGSSGGGGGLLGRDLLTKLKAQIQFSTEGPQVTWEDRPAMCLVLNLEEEYRLHEKPVPPSIDPSWLQLFPMVWAEKAGMGLANQVPPVVVELKSDASPVAVRQYPMSKEAREGIRPHIQRFLDLGILVPCQSPWNTPLLPVKKPGTNDYRPVQDLREVNKRVQDIHPTVPNPYNLLSSLPPSHTWYSVLDLKDAFFCLKLHPNSQPLFAFEWRDPEKGNTGQLTWTRLPQGFKNSPTLFNEALHRDLASFRALNPQVVMLQYVDDLLVAAPTYRDCKEGTRRLLQELSKLGYRVSAKKAQLCREEVTYLGYLLKGGKRWLTPARKATVMKIPTPTTPRQVREFLGTAGFCRLWIPGFASLAAPLYPLTRPKVPFTWTEAHQEAFGRIKEALLSAPALALPDLTKPFALYVDEKEGVARGVLTQTLGPWRRPVAYLSKKLDPVASGWPTCLKAIAAVALLLKDADKLTLGQNVLVIAPHNLESIVRQPPDRWMTNARMTHYQSLLLNERVSFAPPAILNPATLLPVESDDTPIHICSEILAEETGTRPDLRDQPLPGVPAWYTDGSSFIMDGRRQAGAAIVDNKRTVWASNLPEGTSAQKAELIALTQALRLAEGKSINIYTDSRYAFATAHVHGAIYKQRGWLTSAGKDIKNKEEILALLEAIHLPKRVAIIHCPGHQRGTDPVATGNRKADEAAKQAAQSTRILTETTKNAGKRTADGSEFEKRTADGSEFESPKKKAKVE

SEQ ID NO: 6675 - protein, 2213 aa, synthetic construct
MPAAKRVKLDGGDKKYSIGLDIGTNSVGWAVITDEYKVPSKKFKVLGNTDRHSIKKNLIGALLFDSGETAEATRLKRTARRRYTRRKNRICYLQEIFSNEMAKVDDSFFHRLEESFLVEEDKKHERHPIFGNIVDEVAYHEKYPTIYHLRKKLVDSTDKADLRLIYLALAHMIKFRGHFLIEGDLNPDNSDVDKLFIQLVQTYNQLFEENPINASGVDAKAILSARLSKSRRLENLIAQLPGEKKNGLFGNLIALSLGLTPNFKSNFDLAEDAKLQLSKDTYDDDLDNLLAQIGDQYADLFLAAKNLSDAILLSDILRVNTEITKAPLSASMIKRYDEHHQDLTLLKALVRQQLPEKYKEIFFDQSKNGYAGYIDGGASQEEFYKFIKPILEKMDGTEELLVKLNREDLLRKQRTFDNGSIPHQIHLGELHAILRRQEDFYPFLKDNREKIEKILTFRIPYYVGPLARGNSRFAWMTRKSEETITPWNFEEVVDKGASAQSFIERMTNFDKNLPNEKVLPKHSLLYEYFTVYNELTKVKYVTEGMRKPAFLSGEQKKAIVDLLFKTNRKVTVKQLKEDYFKKIECFDSVEISGVEDRFNASLGTYHDLLKIIKDKDFLDNEENEDILEDIVLTLTLFEDREMIEERLKTYAHLFDDKVMKQLKRRRYTGWGRLSRKLINGIRDKQSGKTILDFLKSDGFANRNFMQLIHDDSLTFKEDIQKAQVSGQGDSLHEHIANLAGSPAIKKGILQTVKVVDELVKVMGRHKPENIVIEMARENQTTQKGQKNSRERMKRIEEGIKELGSQILKEHPVENTQLQNEKLYLYYLQNGRDMYVDQELDINRLSDYDVDHIVPQSFLKDDSIDNKVLTRSDKARGKSDNVPSEEVVKKMKNYWRQLLNAKLITQRKFDNLTKAERGGLSELDKAGFIKRQLVETRQITKHVAQILDSRMNTKYDENDKLIREVKVITLKSKLVSDFRKDFQFYKVREINNYHHAHDAYLNAVVGTALIKKYPKLESEFVYGDYKVYDVRKMIAKSEQEIGKATAKYFFYSNIMNFFKTEITLANGEIRKRPLIETNGETGEIVWDKGRDFATVRKVLSMPQVNIVKKTEVQTGGFSKESILPKRNSDKLIARKKDWDPKKYGGFDSPTVAYSVLVVAKVEKGKSKKLKSVKELLGITIMERSSFEKNPIDFLEAKGYKEVKKDLIIKLPKYSLFELENGRKRMLASAGELQKGNELALPSKYVNFLYLASHYEKLKGSPEDNEQKQLFVEQHKHYLDEIIEQISEFSKRVILADANLDKVLSAYNKHRDKPIREQAENIIHLFTLTNLGAPAAFKYFDTTIDRKRYTSTKEVLDATLIHQSITGLYETRIDLSQLGGDGGGSSGGGGGTLGDQGSRGSDPLPEPRVTLTVEGIPTEFLVNTGAEHSVLTKPMGKMGSKRTVVAGATGSKVYPWTTKRLLKIGQKQVTHSFLVIPECPAPLLGRDLLTKLKAQIQFSTEGPQVTWEDRPAMCLVLNLEEEYRLHEKPVPPSIDPSWLQLFPMVWAEKAGMGLANQVPPVVVELKSDASPVAVRQYPMSKEAREGIRPHIQRFLDLGILVPCQSPWNTPLLPVKKPGTNDYRPVQDLREVNKRVQDIHPTVPNPYNLLSSLPPSHTWYSVLDLKDAFFCLKLHPNSQPLFAFEWRDPEKGNTGQLTWTRLPQGFKNSPTLFNEALHRDLASFRALNPQVVMLQYVDDLLVAAPTYRDCKEGTRRLLQELSKLGYRVSAKKAQLCREEVTYLGYLLKGGKRWLTPARKATVMKIPTPTTPRQVREFLGTAGFCRLWIPGFASLAAPLYPLTRPKVPFTWTEAHQEAFGRIKEALLSAPALALPDLTKPFALYVDEKEGVARGVLTQTLGPWRRPVAYLSKKLDPVASGWPTCLKAIAAVALLLKDADKLTLGQNVLVIAPHNLESIVRQPPDRWMTNARMTHYQSLLLNERVSFAPPAILNPATLLPVESDDTPIHICSEILAEETGTRPDLRDQPLPGVPAWYTDGSSFIMDGRRQAGAAIVDNKRTVWASNLPEGTSAQKAELIALTQALRLAEGKSINIYTDSRYAFATAHVHGAIYKQRGWLTSAGKDIKNKEEILALLEAIHLPKRVAIIHCPGHQRGTDPVATGNRKADEAAKQAAQSTRILTETTKNAGKRTADGSEFEKRTADGSEFESPKKKAKVE

SEQ ID NO: 6676 - protein, 2213 aa, synthetic construct
MPAAKRVKLDGGDKKYSIGLDIGTNSVGWAVITDEYKVPSKKFKVLGNTDRHSIKKNLIGALLFDSGETAEATRLKRTARRRYTRRKNRICYLQEIFSNEMAKVDDSFFHRLEESFLVEEDKKHERHPIFGNIVDEVAYHEKYPTIYHLRKKLVDSTDKADLRLIYLALAHMIKFRGHFLIEGDLNPDNSDVDKLFIQLVQTYNQLFEENPINASGVDAKAILSARLSKSRRLENLIAQLPGEKKNGLFGNLIALSLGLTPNFKSNFDLAEDAKLQLSKDTYDDDLDNLLAQIGDQYADLFLAAKNLSDAILLSDILRVNTEITKAPLSASMIKRYDEHHQDLTLLKALVRQQLPEKYKEIFFDQSKNGYAGYIDGGASQEEFYKFIKPILEKMDGTEELLVKLNREDLLRKQRTFDNGSIPHQIHLGELHAILRRQEDFYPFLKDNREKIEKILTFRIPYYVGPLARGNSRFAWMTRKSEETITPWNFEEVVDKGASAQSFIERMTNFDKNLPNEKVLPKHSLLYEYFTVYNELTKVKYVTEGMRKPAFLSGEQKKAIVDLLFKTNRKVTVKQLKEDYFKKIECFDSVEISGVEDRFNASLGTYHDLLKIIKDKDFLDNEENEDILEDIVLTLTLFEDREMIEERLKTYAHLFDDKVMKQLKRRRYTGWGRLSRKLINGIRDKQSGKTILDFLKSDGFANRNFMQLIHDDSLTFKEDIQKAQVSGQGDSLHEHIANLAGSPAIKKGILQTVKVVDELVKVMGRHKPENIVIEMARENQTTQKGQKNSRERMKRIEEGIKELGSQILKEHPVENTQLQNEKLYLYYLQNGRDMYVDQELDINRLSDYDVDHIVPQSFLKDDSIDNKVLTRSDKARGKSDNVPSEEVVKKMKNYWRQLLNAKLITQRKFDNLTKAERGGLSELDKAGFIKRQLVETRQITKHVAQILDSRMNTKYDENDKLIREVKVITLKSKLVSDFRKDFQFYKVREINNYHHAHDAYLNAVVGTALIKKYPKLESEFVYGDYKVYDVRKMIAKSEQEIGKATAKYFFYSNIMNFFKTEITLANGEIRKRPLIETNGETGEIVWDKGRDFATVRKVLSMPQVNIVKKTEVQTGGFSKESILPKRNSDKLIARKKDWDPKKYGGFDSPTVAYSVLVVAKVEKGKSKKLKSVKELLGITIMERSSFEKNPIDFLEAKGYKEVKKDLIIKLPKYSLFELENGRKRMLASAGELQKGNELALPSKYVNFLYLASHYEKLKGSPEDNEQKQLFVEQHKHYLDEIIEQISEFSKRVILADANLDKVLSAYNKHRDKPIREQAENIIHLFTLTNLGAPAAFKYFDTTIDRKRYTSTKEVLDATLIHQSITGLYETRIDLSQLGGDGGGSSGGGGGTLGDQGSRGSDPLPEPRVTLTVEGIPTEFLVNTGAEHSVLTKPMGKMGSKRTVVAGATGSKVYPWTTKRLLKIGQKQVTHSFLVIPECPAPLLGRDLLTKLKAQIQFSTEGPQVTWEDRPAMCLVLNLEEEYRLHEKPVPPSIDPSWLQLFPMVWAEKAGMGLANQVPPVVVELKSDASPVAVRQYPMSKEAREGIRPHIQRFLDLGILVPCQSPWNTPLLPVKKPGTNDYRPVQDLREVNKRVQDIHPTVPNPYNLLSSLPPSHTWYSVLDLKDAFFCLKLHPNSQPLFAFEWRDPEKGNTGQLTWTRLPQGFKNSPTLFNEALHRDLASFRALNPQVVMLQYVDDLLVAAPTYRDCKEGTRRLLQELSKLGYRVSAKKAQLCREEVTYLGYLLKGGKRWLTPARKATVMKIPTPTTPRQVREFLGKAGFCRLFIPGFASLAAPLYPLTRPKVPFTWTEAHQEAFGRIKEALLSAPALALPDLTKPFALYVDEKEGVARGVLTQTLGPWRRPVAYLSKKLDPVASGWPTCLKAIAAVALLLKDADKLTLGQNVLVIAPHNLESIVRQPPDRWMTNARMTHYQSLLLNERVSFAPPAILNPATLLPVESDDTPIHICSEILAEETGTRPDLRDQPLPGVPAWYTDGSSFIMDGRRQAGAAIVDNKRTVWASNLPEGTSAQKAELIALTQALRLAEGKSINIYTDSRYAFATAHVHGAIYKQRGWLTSAGKDIKNKEEILALLEAIHLPKRVAIIHCPGHQRGTDPVATGNRKADEAAKQAAQSTRILTETTKNAGKRTADGSEFEKRTADGSEFESPKKKAKVE

SEQ ID NO: 6677 - protein, 2091 aa, synthetic construct
MPAAKRVKLDGGDKKYSIGLDIGTNSVGWAVITDEYKVPSKKFKVLGNTDRHSIKKNLIGALLFDSGETAEATRLKRTARRRYTRRKNRICYLQEIFSNEMAKVDDSFFHRLEESFLVEEDKKHERHPIFGNIVDEVAYHEKYPTIYHLRKKLVDSTDKADLRLIYLALAHMIKFRGHFLIEGDLNPDNSDVDKLFIQLVQTYNQLFEENPINASGVDAKAILSARLSKSRRLENLIAQLPGEKKNGLFGNLIALSLGLTPNFKSNFDLAEDAKLQLSKDTYDDDLDNLLAQIGDQYADLFLAAKNLSDAILLSDILRVNTEITKAPLSASMIKRYDEHHQDLTLLKALVRQQLPEKYKEIFFDQSKNGYAGYIDGGASQEEFYKFIKPILEKMDGTEELLVKLNREDLLRKQRTFDNGSIPHQIHLGELHAILRRQEDFYPFLKDNREKIEKILTFRIPYYVGPLARGNSRFAWMTRKSEETITPWNFEEVVDKGASAQSFIERMTNFDKNLPNEKVLPKHSLLYEYFTVYNELTKVKYVTEGMRKPAFLSGEQKKAIVDLLFKTNRKVTVKQLKEDYFKKIECFDSVEISGVEDRFNASLGTYHDLLKIIKDKDFLDNEENEDILEDIVLTLTLFEDREMIEERLKTYAHLFDDKVMKQLKRRRYTGWGRLSRKLINGIRDKQSGKTILDFLKSDGFANRNFMQLIHDDSLTFKEDIQKAQVSGQGDSLHEHIANLAGSPAIKKGILQTVKVVDELVKVMGRHKPENIVIEMARENQTTQKGQKNSRERMKRIEEGIKELGSQILKEHPVENTQLQNEKLYLYYLQNGRDMYVDQELDINRLSDYDVDHIVPQSFLKDDSIDNKVLTRSDKARGKSDNVPSEEVVKKMKNYWRQLLNAKLITQRKFDNLTKAERGGLSELDKAGFIKRQLVETRQITKHVAQILDSRMNTKYDENDKLIREVKVITLKSKLVSDFRKDFQFYKVREINNYHHAHDAYLNAVVGTALIKKYPKLESEFVYGDYKVYDVRKMIAKSEQEIGKATAKYFFYSNIMNFFKTEITLANGEIRKRPLIETNGETGEIVWDKGRDFATVRKVLSMPQVNIVKKTEVQTGGFSKESILPKRNSDKLIARKKDWDPKKYGGFDSPTVAYSVLVVAKVEKGKSKKLKSVKELLGITIMERSSFEKNPIDFLEAKGYKEVKKDLIIKLPKYSLFELENGRKRMLASAGELQKGNELALPSKYVNFLYLASHYEKLKGSPEDNEQKQLFVEQHKHYLDEIIEQISEFSKRVILADANLDKVLSAYNKHRDKPIREQAENIIHLFTLTNLGAPAAFKYFDTTIDRKRYTSTKEVLDATLIHQSITGLYETRIDLSQLGGDGGGSSGGGGGTLNLEDEYRLYETSAEPEVSPGSTWLSDFPQAWAETGGMGLAVRQAPLIIPLKATSTPVSIKQYPMSQEAKLGIKPHIQRLLDQGILVPCQSPWNTPLLPVKKPGTNDYRPVQDLREVNKRVEDIHPTVPNPYNLLSGLPPSHRWYTVLDLKDAFFCLRLHPTSQPLFAFEWRDPGMGISGQLTWTRLPQGFKNSPTLFNEALHRDLADFRIQHPDLILLQYVDDILLAATSELDCQQGTRALLLTLGNLGYRASAKKAQLCQKQVKYLGYLLKEGQRWLTEARKETVMGQPTPKTPRQLREFLGTAGFCRLWIPGFAEMAAPLYPLTKPGTLFNWGPDQQKAYQEIKQALLTAPALGLPDLTKPFELFVDEKQGYAKGVLTQKLGPWRRPVAYLSKKLDPVAAGWPPCLRMVAAIAVLRKDAGKLTMGQPLVILAPHAVEALVKQPPDRWLSNARMTHYQAMLLDTDRVQFGPVVALNPATLLPLPEEGAPHDCLEILAETHGTRPDLTDQPIPDADHTWYTDGSSFLQEGQRKAGAAVTTETEVIWARALPAGTSAQRAELIALTQALKMAEGKRLNVYTDSRYAFATAHIHGEIYRRRGWLTSEGREIKNKSEILALLKALFLPKRLSIIHCLGHQKGDSAEARGNRLADQAAREAAIKTPPDTSTLLAGKRTADGSEFEKRTADGSEFESPKKKAKVE

SEQ ID NO: 6678 - protein, 2091 aa, synthetic construct
MPAAKRVKLDGGDKKYSIGLDIGTNSVGWAVITDEYKVPSKKFKVLGNTDRHSIKKNLIGALLFDSGETAEATRLKRTARRRYTRRKNRICYLQEIFSNEMAKVDDSFFHRLEESFLVEEDKKHERHPIFGNIVDEVAYHEKYPTIYHLRKKLVDSTDKADLRLIYLALAHMIKFRGHFLIEGDLNPDNSDVDKLFIQLVQTYNQLFEENPINASGVDAKAILSARLSKSRRLENLIAQLPGEKKNGLFGNLIALSLGLTPNFKSNFDLAEDAKLQLSKDTYDDDLDNLLAQIGDQYADLFLAAKNLSDAILLSDILRVNTEITKAPLSASMIKRYDEHHQDLTLLKALVRQQLPEKYKEIFFDQSKNGYAGYIDGGASQEEFYKFIKPILEKMDGTEELLVKLNREDLLRKQRTFDNGSIPHQIHLGELHAILRRQEDFYPFLKDNREKIEKILTFRIPYYVGPLARGNSRFAWMTRKSEETITPWNFEEVVDKGASAQSFIERMTNFDKNLPNEKVLPKHSLLYEYFTVYNELTKVKYVTEGMRKPAFLSGEQKKAIVDLLFKTNRKVTVKQLKEDYFKKIECFDSVEISGVEDRFNASLGTYHDLLKIIKDKDFLDNEENEDILEDIVLTLTLFEDREMIEERLKTYAHLFDDKVMKQLKRRRYTGWGRLSRKLINGIRDKQSGKTILDFLKSDGFANRNFMQLIHDDSLTFKEDIQKAQVSGQGDSLHEHIANLAGSPAIKKGILQTVKVVDELVKVMGRHKPENIVIEMARENQTTQKGQKNSRERMKRIEEGIKELGSQILKEHPVENTQLQNEKLYLYYLQNGRDMYVDQELDINRLSDYDVDHIVPQSFLKDDSIDNKVLTRSDKARGKSDNVPSEEVVKKMKNYWRQLLNAKLITQRKFDNLTKAERGGLSELDKAGFIKRQLVETRQITKHVAQILDSRMNTKYDENDKLIREVKVITLKSKLVSDFRKDFQFYKVREINNYHHAHDAYLNAVVGTALIKKYPKLESEFVYGDYKVYDVRKMIAKSEQEIGKATAKYFFYSNIMNFFKTEITLANGEIRKRPLIETNGETGEIVWDKGRDFATVRKVLSMPQVNIVKKTEVQTGGFSKESILPKRNSDKLIARKKDWDPKKYGGFDSPTVAYSVLVVAKVEKGKSKKLKSVKELLGITIMERSSFEKNPIDFLEAKGYKEVKKDLIIKLPKYSLFELENGRKRMLASAGELQKGNELALPSKYVNFLYLASHYEKLKGSPEDNEQKQLFVEQHKHYLDEIIEQISEFSKRVILADANLDKVLSAYNKHRDKPIREQAENIIHLFTLTNLGAPAAFKYFDTTIDRKRYTSTKEVLDATLIHQSITGLYETRIDLSQLGGDGGGSSGGGGGTLGIEDEYRLHETSTEPDVSLGSTWLSDFPQAWAETGGMGLAVRQAPLIIPLKATSTPVSIQQYPMSHEARLGIKPHIQRLLDQGILVPCQSPWNTPLLPVKKPGTNDYRPVQDLREVNKRVEDIHPTVPNPYNLLSGLPPSHQWYTVLDLKDAFFCLRLHPTSQPLFAFEWRDPGMGISGQLTWTRLPQGFKNSPTLFDEALHRDLADFRIQHPDLILLQYVDDILLAATSELDCQQGTRALLQTLGDLGYRASAKKAQICQKQVKYLGYLLREGQRWLTEARKETVMGQPVPKTPRQLREFLGTAGFCRLWIPGFAEMAAPLYPLTKTGTLFSWGPDQQKAYQEIKQALLTAPALGLPDLTKPFELFVDEKQGYAKGVLTQKLGPWRRPVAYLSKKLDPVAAGWPPCLRMVAAIAVLTKDAGKLTMGQPLVILAPHAVEALVKQPPDRWLSNARMTHYQAMLLDTDRVQFGPVVALNPATLLPLPEEGAPHDCLEILAETHGTRPDLTDQPIPDADHTWYTDGSSFLQEGQRKAGAAVTTETEVIWAGALPAGTSAQRAELIALTQALKMAEGKRLNVYTDSRYAFATAHIHGEIYRRRGLLTSEGREIKNKSEILALLKALFLPKRLSIIHCLGHQKGDSAEARGNRLADQAAREAAIKTPPDTSTLLAGKRTADGSEFEKRTADGSEFESPKKKAKVE

SEQ ID NO: 6679 - protein, 2091 aa, synthetic construct
MPAAKRVKLDGGDKKYSIGLDIGTNSVGWAVITDEYKVPSKKFKVLGNTDRHSIKKNLIGALLFDSGETAEATRLKRTARRRYTRRKNRICYLQEIFSNEMAKVDDSFFHRLEESFLVEEDKKHERHPIFGNIVDEVAYHEKYPTIYHLRKKLVDSTDKADLRLIYLALAHMIKFRGHFLIEGDLNPDNSDVDKLFIQLVQTYNQLFEENPINASGVDAKAILSARLSKSRRLENLIAQLPGEKKNGLFGNLIALSLGLTPNFKSNFDLAEDAKLQLSKDTYDDDLDNLLAQIGDQYADLFLAAKNLSDAILLSDILRVNTEITKAPLSASMIKRYDEHHQDLTLLKALVRQQLPEKYKEIFFDQSKNGYAGYIDGGASQEEFYKFIKPILEKMDGTEELLVKLNREDLLRKQRTFDNGSIPHQIHLGELHAILRRQEDFYPFLKDNREKIEKILTFRIPYYVGPLARGNSRFAWMTRKSEETITPWNFEEVVDKGASAQSFIERMTNFDKNLPNEKVLPKHSLLYEYFTVYNELTKVKYVTEGMRKPAFLSGEQKKAIVDLLFKTNRKVTVKQLKEDYFKKIECFDSVEISGVEDRFNASLGTYHDLLKIIKDKDFLDNEENEDILEDIVLTLTLFEDREMIEERLKTYAHLFDDKVMKQLKRRRYTGWGRLSRKLINGIRDKQSGKTILDFLKSDGFANRNFMQLIHDDSLTFKEDIQKAQVSGQGDSLHEHIANLAGSPAIKKGILQTVKVVDELVKVMGRHKPENIVIEMARENQTTQKGQKNSRERMKRIEEGIKELGSQILKEHPVENTQLQNEKLYLYYLQNGRDMYVDQELDINRLSDYDVDHIVPQSFLKDDSIDNKVLTRSDKARGKSDNVPSEEVVKKMKNYWRQLLNAKLITQRKFDNLTKAERGGLSELDKAGFIKRQLVETRQITKHVAQILDSRMNTKYDENDKLIREVKVITLKSKLVSDFRKDFQFYKVREINNYHHAHDAYLNAVVGTALIKKYPKLESEFVYGDYKVYDVRKMIAKSEQEIGKATAKYFFYSNIMNFFKTEITLANGEIRKRPLIETNGETGEIVWDKGRDFATVRKVLSMPQVNIVKKTEVQTGGFSKESILPKRNSDKLIARKKDWDPKKYGGFDSPTVAYSVLVVAKVEKGKSKKLKSVKELLGITIMERSSFEKNPIDFLEAKGYKEVKKDLIIKLPKYSLFELENGRKRMLASAGELQKGNELALPSKYVNFLYLASHYEKLKGSPEDNEQKQLFVEQHKHYLDEIIEQISEFSKRVILADANLDKVLSAYNKHRDKPIREQAENIIHLFTLTNLGAPAAFKYFDTTIDRKRYTSTKEVLDATLIHQSITGLYETRIDLSQLGGDGGGSSGGGGGTLNIEDEYRLHETSKGPDVPLGSTWLSDFPQAWAETGGMGLAVRQAPLIIPLKATSTPVSIKQYPMSQEARLGIKPHIQRLLDQGILVPCQSPWNTPLLPVKKPGTNDYRPVQDLREVNKRVEDIHPTVPNPYNLLSGLPPSHQWYTVLDLKDAFFCLRLHPTSQSLFAFEWRDPEMGISGQLTWTRLPQGFKNSPTLFNEALHRDLADFRIQHPDLILLQYVDDLLLAATSELDCQQGTRALLQTLGDLGYRASAKKAQICQKQVKYLGYLLKEGQRWLTEARKETVMGQPTPKTPRQLREFLGTAGFCRLWIPGFAEMAAPLYPLTKPGTLFEWGPDQQKAYQEIKQALLTAPALGLPDLTKPFELFVDEKQGYAKGVLTQKLGPWRRPVAYLSKKLDPVAAGWPPCLRMVAAIAVLTKDAGKLTMGQPLVILAPHAVEALVKQPPDRWLSNARMTHYQALLLDTDRVQFGPIVALNPATLLPLPEEGLQHDCLDILAEAHGTRPDLTDQPLPDADHTWYTDGSSFLQEGQRKAGAAVTTETEVVWAKALPAGTSAQRAELIALTQALKMAEGKKLNVYTDSRYAFATAHIHGEIYRRRGWLTSEGKEIKNKDEILALLKALFLPKRLSIIHCPGHQKGNRAEARGNRMADQAAREVATRETPETSTLLAGKRTADGSEFEKRTADGSEFESPKKKAKVE

SEQ ID NO: 6680 - protein, 2085 aa, synthetic construct
MPAAKRVKLDGGDKKYSIGLDIGTNSVGWAVITDEYKVPSKKFKVLGNTDRHSIKKNLIGALLFDSGETAEATRLKRTARRRYTRRKNRICYLQEIFSNEMAKVDDSFFHRLEESFLVEEDKKHERHPIFGNIVDEVAYHEKYPTIYHLRKKLVDSTDKADLRLIYLALAHMIKFRGHFLIEGDLNPDNSDVDKLFIQLVQTYNQLFEENPINASGVDAKAILSARLSKSRRLENLIAQLPGEKKNGLFGNLIALSLGLTPNFKSNFDLAEDAKLQLSKDTYDDDLDNLLAQIGDQYADLFLAAKNLSDAILLSDILRVNTEITKAPLSASMIKRYDEHHQDLTLLKALVRQQLPEKYKEIFFDQSKNGYAGYIDGGASQEEFYKFIKPILEKMDGTEELLVKLNREDLLRKQRTFDNGSIPHQIHLGELHAILRRQEDFYPFLKDNREKIEKILTFRIPYYVGPLARGNSRFAWMTRKSEETITPWNFEEVVDKGASAQSFIERMTNFDKNLPNEKVLPKHSLLYEYFTVYNELTKVKYVTEGMRKPAFLSGEQKKAIVDLLFKTNRKVTVKQLKEDYFKKIECFDSVEISGVEDRFNASLGTYHDLLKIIKDKDFLDNEENEDILEDIVLTLTLFEDREMIEERLKTYAHLFDDKVMKQLKRRRYTGWGRLSRKLINGIRDKQSGKTILDFLKSDGFANRNFMQLIHDDSLTFKEDIQKAQVSGQGDSLHEHIANLAGSPAIKKGILQTVKVVDELVKVMGRHKPENIVIEMARENQTTQKGQKNSRERMKRIEEGIKELGSQILKEHPVENTQLQNEKLYLYYLQNGRDMYVDQELDINRLSDYDVDHIVPQSFLKDDSIDNKVLTRSDKARGKSDNVPSEEVVKKMKNYWRQLLNAKLITQRKFDNLTKAERGGLSELDKAGFIKRQLVETRQITKHVAQILDSRMNTKYDENDKLIREVKVITLKSKLVSDFRKDFQFYKVREINNYHHAHDAYLNAVVGTALIKKYPKLESEFVYGDYKVYDVRKMIAKSEQEIGKATAKYFFYSNIMNFFKTEITLANGEIRKRPLIETNGETGEIVWDKGRDFATVRKVLSMPQVNIVKKTEVQTGGFSKESILPKRNSDKLIARKKDWDPKKYGGFDSPTVAYSVLVVAKVEKGKSKKLKSVKELLGITIMERSSFEKNPIDFLEAKGYKEVKKDLIIKLPKYSLFELENGRKRMLASAGELQKGNELALPSKYVNFLYLASHYEKLKGSPEDNEQKQLFVEQHKHYLDEIIEQISEFSKRVILADANLDKVLSAYNKHRDKPIREQAENIIHLFTLTNLGAPAAFKYFDTTIDRKRYTSTKEVLDATLIHQSITGLYETRIDLSQLGGDGGGSSGGGGGTLQLDDEYRLYSPLVKPDQNIQFWLEQFPQAWAETAGMGLAKQVPPQVIQLKASATPVSVRQYPLSKEAQEGIRPHVQRLIQQGILVPVQSPWNTPLLPVRKPGTNDYRPVQDLREVNKRVQDIHPTVPNPYNLLCALPPQRSWYTVLDLKDAFFCLRLHPTSQPLFAFEWRDPGTGRTGQLTWTRLPQGFKNSPTIFDEALHRDLANFRIQHPQVTLLQYVDDLLLAGATKQDCLEGTKALLLELSDLGYRASAKKAQICRREVTYLGYSLRDGQRWLTEARKKTVVQIPAPTTAKQVREFLGTAGFCRLWIPGFATLAAPLYPLTKEKGEFSWAPEHQKAFDAIKKALLSAPALALPDVTKPFTLYVDERKGVARGVLTQTLGPWRRPVAYLSKKLDPVASGWPVCLKAIAAVAILVKDADKLTLGQNITVIAPHALENIVRQPPDRWMTNARMTHYQSLLLTERVTFAPPAALNPATLLPEETDEPVTHDCHQLLIEETGVRKDLTDIPLTGEVLTWFTDGSSYVVEGKRMAGAAVVDGTRTIWASSLPEGTSAQKAELMALTQALRLAEGKSINIYTDSRYAFATAHVHGAIYKQRGLLTSAGREIKNKEEILSLLEALHLPKRLAIIHCPGHQKAKDPISRGNQMADRVAKQAAQGVNLLAGKRTADGSEFEKRTADGSEFESPKKKAKVE

SEQ ID NO: 6681 - protein, 2171 aa, synthetic construct
MPAAKRVKLDGGDKKYSIGLDIGTNSVGWAVITDEYKVPSKKFKVLGNTDRHSIKKNLIGALLFDSGETAEATRLKRTARRRYTRRKNRICYLQEIFSNEMAKVDDSFFHRLEESFLVEEDKKHERHPIFGNIVDEVAYHEKYPTIYHLRKKLVDSTDKADLRLIYLALAHMIKFRGHFLIEGDLNPDNSDVDKLFIQLVQTYNQLFEENPINASGVDAKAILSARLSKSRRLENLIAQLPGEKKNGLFGNLIALSLGLTPNFKSNFDLAEDAKLQLSKDTYDDDLDNLLAQIGDQYADLFLAAKNLSDAILLSDILRVNTEITKAPLSASMIKRYDEHHQDLTLLKALVRQQLPEKYKEIFFDQSKNGYAGYIDGGASQEEFYKFIKPILEKMDGTEELLVKLNREDLLRKQRTFDNGSIPHQIHLGELHAILRRQEDFYPFLKDNREKIEKILTFRIPYYVGPLARGNSRFAWMTRKSEETITPWNFEEVVDKGASAQSFIERMTNFDKNLPNEKVLPKHSLLYEYFTVYNELTKVKYVTEGMRKPAFLSGEQKKAIVDLLFKTNRKVTVKQLKEDYFKKIECFDSVEISGVEDRFNASLGTYHDLLKIIKDKDFLDNEENEDILEDIVLTLTLFEDREMIEERLKTYAHLFDDKVMKQLKRRRYTGWGRLSRKLINGIRDKQSGKTILDFLKSDGFANRNFMQLIHDDSLTFKEDIQKAQVSGQGDSLHEHIANLAGSPAIKKGILQTVKVVDELVKVMGRHKPENIVIEMARENQTTQKGQKNSRERMKRIEEGIKELGSQILKEHPVENTQLQNEKLYLYYLQNGRDMYVDQELDINRLSDYDVDHIVPQSFLKDDSIDNKVLTRSDKARGKSDNVPSEEVVKKMKNYWRQLLNAKLITQRKFDNLTKAERGGLSELDKAGFIKRQLVETRQITKHVAQILDSRMNTKYDENDKLIREVKVITLKSKLVSDFRKDFQFYKVREINNYHHAHDAYLNAVVGTALIKKYPKLESEFVYGDYKVYDVRKMIAKSEQEIGKATAKYFFYSNIMNFFKTEITLANGEIRKRPLIETNGETGEIVWDKGRDFATVRKVLSMPQVNIVKKTEVQTGGFSKESILPKRNSDKLIARKKDWDPKKYGGFDSPTVAYSVLVVAKVEKGKSKKLKSVKELLGITIMERSSFEKNPIDFLEAKGYKEVKKDLIIKLPKYSLFELENGRKRMLASAGELQKGNELALPSKYVNFLYLASHYEKLKGSPEDNEQKQLFVEQHKHYLDEIIEQISEFSKRVILADANLDKVLSAYNKHRDKPIREQAENIIHLFTLTNLGAPAAFKYFDTTIDRKRYTSTKEVLDATLIHQSITGLYETRIDLSQLGGDGGGSSGGGGGMDPLQLLQPLEAEIKGTKLKAHWNSGATITCVPQAFLEEEVPIKNIWIKTIHGEKEQPVYYLTFKIQGRKVEAEVISSPYDYILVSPSDIPWLMKKPLQLTTLVPLQEYEERLLKQTMLTGSYKEKLQSLFLKYDALWQHWENQVGHRRIKPHHIATGTVNPRPQKQYPINPKAKASIQTVINDLLKQGVLIQQNSIMNTPVYPVPKPDGKWRMVLDYREVNKTIPLIAAQNQHSAGILSSIFRGKYKTTLDLSNGFWAHSITPESYWLTAFTWLGQQYCWTRLPQGFLNSPALFNADVVDLLKEVPNVQVYVDDIYISHDDPREHLEQLEKVFSLLLNAGYVVSLKKSEIAQHEVEFLGFNITKEGRGLTETFKQKLLNITPPRDLKQLQSILGKLNFARNFIPNFSELVKPLYNIIATAPGKYITWTTDNSQQLQNIISMLNSAENLEERNPEVRLIMKVNTSPSAGYIRFYNEFAKRPIMYLNYVYTKAEVKFTNTEKLLTTIHKGLIKALDLGMGQEILVYSPIVSMTKIQKTPLPERKALPIRWITWMSYLEDPRIQFHYDKTLPELQQVPTVTDDIIAKIKHPSEFSMVFYTDGSAIKHPNVNKSHNAGMGIAQVQFKPEFTVINTWSIPLGDHTAQLAEVAAVEFACKKALKIDGPVLIVTDSFYVAESVNKELPYWQSNGFFNNKKKPLKHVSKWKSIADCIQLKPDIIIIHEKGHQPTASTFHTEGNNLADKLATQGSYVVNAGKRTADGSEFEKRTADGSEFESPKKKAKVE

SEQ ID NO: 6682 - protein, 2089 aa, synthetic construct
MPAAKRVKLDGGDKKYSIGLDIGTNSVGWAVITDEYKVPSKKFKVLGNTDRHSIKKNLIGALLFDSGETAEATRLKRTARRRYTRRKNRICYLQEIFSNEMAKVDDSFFHRLEESFLVEEDKKHERHPIFGNIVDEVAYHEKYPTIYHLRKKLVDSTDKADLRLIYLALAHMIKFRGHFLIEGDLNPDNSDVDKLFIQLVQTYNQLFEENPINASGVDAKAILSARLSKSRRLENLIAQLPGEKKNGLFGNLIALSLGLTPNFKSNFDLAEDAKLQLSKDTYDDDLDNLLAQIGDQYADLFLAAKNLSDAILLSDILRVNTEITKAPLSASMIKRYDEHHQDLTLLKALVRQQLPEKYKEIFFDQSKNGYAGYIDGGASQEEFYKFIKPILEKMDGTEELLVKLNREDLLRKQRTFDNGSIPHQIHLGELHAILRRQEDFYPFLKDNREKIEKILTFRIPYYVGPLARGNSRFAWMTRKSEETITPWNFEEVVDKGASAQSFIERMTNFDKNLPNEKVLPKHSLLYEYFTVYNELTKVKYVTEGMRKPAFLSGEQKKAIVDLLFKTNRKVTVKQLKEDYFKKIECFDSVEISGVEDRFNASLGTYHDLLKIIKDKDFLDNEENEDILEDIVLTLTLFEDREMIEERLKTYAHLFDDKVMKQLKRRRYTGWGRLSRKLINGIRDKQSGKTILDFLKSDGFANRNFMQLIHDDSLTFKEDIQKAQVSGQGDSLHEHIANLAGSPAIKKGILQTVKVVDELVKVMGRHKPENIVIEMARENQTTQKGQKNSRERMKRIEEGIKELGSQILKEHPVENTQLQNEKLYLYYLQNGRDMYVDQELDINRLSDYDVDHIVPQSFLKDDSIDNKVLTRSDKARGKSDNVPSEEVVKKMKNYWRQLLNAKLITQRKFDNLTKAERGGLSELDKAGFIKRQLVETRQITKHVAQILDSRMNTKYDENDKLIREVKVITLKSKLVSDFRKDFQFYKVREINNYHHAHDAYLNAVVGTALIKKYPKLESEFVYGDYKVYDVRKMIAKSEQEIGKATAKYFFYSNIMNFFKTEITLANGEIRKRPLIETNGETGEIVWDKGRDFATVRKVLSMPQVNIVKKTEVQTGGFSKESILPKRNSDKLIARKKDWDPKKYGGFDSPTVAYSVLVVAKVEKGKSKKLKSVKELLGITIMERSSFEKNPIDFLEAKGYKEVKKDLIIKLPKYSLFELENGRKRMLASAGELQKGNELALPSKYVNFLYLASHYEKLKGSPEDNEQKQLFVEQHKHYLDEIIEQISEFSKRVILADANLDKVLSAYNKHRDKPIREQAENIIHLFTLTNLGAPAAFKYFDTTIDRKRYTSTKEVLDATLIHQSITGLYETRIDLSQLGGDGGGSSGGGGGVLNLEEEYRLHEKPVPSSIDPSWLQLFPTVWAERAGMGLANQVPPVVVELRSGASPVAVRQYPMSKEAREGIRPHIQRFLDLGVLVPCQSPWNTPLLPVKKPGTNDYRPVQDLREINKRVQDIHPTVPNPYNLLSSLPPSHTWYSVLDLKDAFFCLKLHPNSQPLFAFEWRDPEKGNTGQLTWTRLPQGFKNSPTLFDEALHRDLAPFRALNPQVVLLQYVDDLLVAAPTYRDCKEGTQKLLQELSKLGYRVSAKKAQLCQKEVTYLGYLLKEGKRWLTPARKATVMKIPPPTTPRQVREFLGTAGFCRLWIPGFASLAAPLYPLTKESIPFIWTEEHQKAFDRIKEALLSAPALALPDLTKPFTLYVDERAGVARGVLTQTLGPWRRPVAYLSKKLDPVASGWPTCLKAVAAVALLLKDADKLTLGQNVTVIASHSLESIVRQPPDRWMTNARMTHYQSLLLNERVSFAPPAVLNPATLLPVESEATPVHRCSEILAEETGTRRDLKDQPLPGVPAWYTDGSSFIAEGKRRAGAAIVDGKRTVWASSLPEGTSAQKAELVALTQALRLAEGKDINIYTDSRYAFATAHIHGAIYKQRGLLTSAGKDIKNKEEILALLEAIHLPKRVAIIHCPGHQKGNDPVATGNRRADEAAKQAALSTRVLAETTKPAGKRTADGSEFEKRTADGSEFESPKKKAKVE

SEQ ID NO: 6683 - protein, 2095 aa, synthetic construct
MPAAKRVKLDGGDKKYSIGLDIGTNSVGWAVITDEYKVPSKKFKVLGNTDRHSIKKNLIGALLFDSGETAEATRLKRTARRRYTRRKNRICYLQEIFSNEMAKVDDSFFHRLEESFLVEEDKKHERHPIFGNIVDEVAYHEKYPTIYHLRKKLVDSTDKADLRLIYLALAHMIKFRGHFLIEGDLNPDNSDVDKLFIQLVQTYNQLFEENPINASGVDAKAILSARLSKSRRLENLIAQLPGEKKNGLFGNLIALSLGLTPNFKSNFDLAEDAKLQLSKDTYDDDLDNLLAQIGDQYADLFLAAKNLSDAILLSDILRVNTEITKAPLSASMIKRYDEHHQDLTLLKALVRQQLPEKYKEIFFDQSKNGYAGYIDGGASQEEFYKFIKPILEKMDGTEELLVKLNREDLLRKQRTFDNGSIPHQIHLGELHAILRRQEDFYPFLKDNREKIEKILTFRIPYYVGPLARGNSRFAWMTRKSEETITPWNFEEVVDKGASAQSFIERMTNFDKNLPNEKVLPKHSLLYEYFTVYNELTKVKYVTEGMRKPAFLSGEQKKAIVDLLFKTNRKVTVKQLKEDYFKKIECFDSVEISGVEDRFNASLGTYHDLLKIIKDKDFLDNEENEDILEDIVLTLTLFEDREMIEERLKTYAHLFDDKVMKQLKRRRYTGWGRLSRKLINGIRDKQSGKTILDFLKSDGFANRNFMQLIHDDSLTFKEDIQKAQVSGQGDSLHEHIANLAGSPAIKKGILQTVKVVDELVKVMGRHKPENIVIEMARENQTTQKGQKNSRERMKRIEEGIKELGSQILKEHPVENTQLQNEKLYLYYLQNGRDMYVDQELDINRLSDYDVDHIVPQSFLKDDSIDNKVLTRSDKARGKSDNVPSEEVVKKMKNYWRQLLNAKLITQRKFDNLTKAERGGLSELDKAGFIKRQLVETRQITKHVAQILDSRMNTKYDENDKLIREVKVITLKSKLVSDFRKDFQFYKVREINNYHHAHDAYLNAVVGTALIKKYPKLESEFVYGDYKVYDVRKMIAKSEQEIGKATAKYFFYSNIMNFFKTEITLANGEIRKRPLIETNGETGEIVWDKGRDFATVRKVLSMPQVNIVKKTEVQTGGFSKESILPKRNSDKLIARKKDWDPKKYGGFDSPTVAYSVLVVAKVEKGKSKKLKSVKELLGITIMERSSFEKNPIDFLEAKGYKEVKKDLIIKLPKYSLFELENGRKRMLASAGELQKGNELALPSKYVNFLYLASHYEKLKGSPEDNEQKQLFVEQHKHYLDEIIEQISEFSKRVILADANLDKVLSAYNKHRDKPIREQAENIIHLFTLTNLGAPAAFKYFDTTIDRKRYTSTKEVLDATLIHQSITGLYETRIDLSQLGGDGGGGGEAAAKGGTAPLEEEYRLFLEAPIQNVTLLEQWKREIPKVWAEINPPGLASTQAPIHVQLLSTALPVRVRQYPITLEAKRSLRETIRKFRAAGILRPVHSPWNTPLLPVRKSGTSEYRMVQDLREVNKRVETIHPTVPNPYTLLSLLPPDRIWYSVLDLKDAFFCIPLAPESQLIFAFEWADAEEGESGQLTWTRLPQGFKNSPTLFNEALNRDLQGFRLDHPSVSLLQYVDDLLIAADTQAACLSATRDLLMTLAELGYRVSGKKAQLCQEEVTYLGFKIHKGSRSLSNSRTQAILQIPVPKTKRQVREFLGTIGYCRLWIPGFAELAQPLYAATRPGNDPLVWGEKEEEAFQSLKLALTQPPALALPSLDKPFQLFVEETSGAAKGVLTQALGPWKRPVAYLSKRLDPVAAGWPRCLRAIAAAALLTREASKLTFGQDIEITSSHNLESLLRSPPDKWLTNARITQYQVLLLDPPRVRFKQTAALNPATLLPETDDTLPIHHCLDTLDSLTSTRPDLTDQPLAQAEATLFTDGSSYIRDGKRYAGAAVVTLDSVIWAEPLPIGTSAQKAELIALTKALEWSKDKSVNIYTDSRYAFATLHVHGMIYRERGWLTAGGKAIKNAPEILALLTAVWLPKRVAVMHCKGHQKDDAPTSTGNRRADEVAREVAIRPLSTQATISAGKRTADGSEFEKRTADGSEFESPKKKAKVE

SEQ ID NO: 6684 - protein, 2099 aa, synthetic construct
MPAAKRVKLDGGDKKYSIGLDIGTNSVGWAVITDEYKVPSKKFKVLGNTDRHSIKKNLIGALLFDSGETAEATRLKRTARRRYTRRKNRICYLQEIFSNEMAKVDDSFFHRLEESFLVEEDKKHERHPIFGNIVDEVAYHEKYPTIYHLRKKLVDSTDKADLRLIYLALAHMIKFRGHFLIEGDLNPDNSDVDKLFIQLVQTYNQLFEENPINASGVDAKAILSARLSKSRRLENLIAQLPGEKKNGLFGNLIALSLGLTPNFKSNFDLAEDAKLQLSKDTYDDDLDNLLAQIGDQYADLFLAAKNLSDAILLSDILRVNTEITKAPLSASMIKRYDEHHQDLTLLKALVRQQLPEKYKEIFFDQSKNGYAGYIDGGASQEEFYKFIKPILEKMDGTEELLVKLNREDLLRKQRTFDNGSIPHQIHLGELHAILRRQEDFYPFLKDNREKIEKILTFRIPYYVGPLARGNSRFAWMTRKSEETITPWNFEEVVDKGASAQSFIERMTNFDKNLPNEKVLPKHSLLYEYFTVYNELTKVKYVTEGMRKPAFLSGEQKKAIVDLLFKTNRKVTVKQLKEDYFKKIECFDSVEISGVEDRFNASLGTYHDLLKIIKDKDFLDNEENEDILEDIVLTLTLFEDREMIEERLKTYAHLFDDKVMKQLKRRRYTGWGRLSRKLINGIRDKQSGKTILDFLKSDGFANRNFMQLIHDDSLTFKEDIQKAQVSGQGDSLHEHIANLAGSPAIKKGILQTVKVVDELVKVMGRHKPENIVIEMARENQTTQKGQKNSRERMKRIEEGIKELGSQILKEHPVENTQLQNEKLYLYYLQNGRDMYVDQELDINRLSDYDVDHIVPQSFLKDDSIDNKVLTRSDKARGKSDNVPSEEVVKKMKNYWRQLLNAKLITQRKFDNLTKAERGGLSELDKAGFIKRQLVETRQITKHVAQILDSRMNTKYDENDKLIREVKVITLKSKLVSDFRKDFQFYKVREINNYHHAHDAYLNAVVGTALIKKYPKLESEFVYGDYKVYDVRKMIAKSEQEIGKATAKYFFYSNIMNFFKTEITLANGEIRKRPLIETNGETGEIVWDKGRDFATVRKVLSMPQVNIVKKTEVQTGGFSKESILPKRNSDKLIARKKDWDPKKYGGFDSPTVAYSVLVVAKVEKGKSKKLKSVKELLGITIMERSSFEKNPIDFLEAKGYKEVKKDLIIKLPKYSLFELENGRKRMLASAGELQKGNELALPSKYVNFLYLASHYEKLKGSPEDNEQKQLFVEQHKHYLDEIIEQISEFSKRVILADANLDKVLSAYNKHRDKPIREQAENIIHLFTLTNLGAPAAFKYFDTTIDRKRYTSTKEVLDATLIHQSITGLYETRIDLSQLGGDGGGGGEAAAKGGTVSLQDEHRLFDIPVTTSLPDVWLQDFPQAWAETGGLGRAKCQAPIIIDLKPTAVPVSIKQYPMSLEAHMGIRQHIIKFLELGVLRPCRSPWNTPLLPVKKPGTQDYRPVQDLREINKRTVDIHPTVPNPYNLLSTLKPDYSWYTVLDLKDAFFCLPLAPQSQELFAFEWKDPERGISGQLTWTRLPQGFKNSPTLFDEALHRDLTDFRTQHPEVTLLQYVDDLLLAAPTKKACTQGTRHLLQELGEKGYRASAKKAQICQTKVTYLGYILSEGKRWLTPGRIETVARIPPPRNPREVREFLGTAGFCRLWIPGFAELAAPLYALTKESTPFTWQTEHQLAFEALKKALLSAPALGLPDTSKPFTLFLDERQGIAKGVLTQKLGPWKRPVAYLSKKLDPVAAGWPPCLRIMAATAMLVKDSAKLTLGQPLTVITPHTLEAIVRQPPDRWITNARLTHYQALLLDTDRVQFGPPVTLNPATLLPVPENQPSPHDCRQVLAETHGTREDLKDQELPDADHTWYTDGSSYLDSGTRRAGAAVVDGHNTIWAQSLPPGTSAQKAELIALTKALELSKGKKANIYTDSRYAFATAHTHGSIYERRGLLTSEGKEIKNKAEIIALLKALFLPQEVAIIHCPGHQKGQDPVAVGNRQADRVARQAAMAEVLTLATEPDNTSHITAGKRTADGSEFEKRTADGSEFESPKKKAKVE

SEQ ID NO: 6685 - protein, 2092 aa, synthetic construct
MPAAKRVKLDGGDKKYSIGLDIGTNSVGWAVITDEYKVPSKKFKVLGNTDRHSIKKNLIGALLFDSGETAEATRLKRTARRRYTRRKNRICYLQEIFSNEMAKVDDSFFHRLEESFLVEEDKKHERHPIFGNIVDEVAYHEKYPTIYHLRKKLVDSTDKADLRLIYLALAHMIKFRGHFLIEGDLNPDNSDVDKLFIQLVQTYNQLFEENPINASGVDAKAILSARLSKSRRLENLIAQLPGEKKNGLFGNLIALSLGLTPNFKSNFDLAEDAKLQLSKDTYDDDLDNLLAQIGDQYADLFLAAKNLSDAILLSDILRVNTEITKAPLSASMIKRYDEHHQDLTLLKALVRQQLPEKYKEIFFDQSKNGYAGYIDGGASQEEFYKFIKPILEKMDGTEELLVKLNREDLLRKQRTFDNGSIPHQIHLGELHAILRRQEDFYPFLKDNREKIEKILTFRIPYYVGPLARGNSRFAWMTRKSEETITPWNFEEVVDKGASAQSFIERMTNFDKNLPNEKVLPKHSLLYEYFTVYNELTKVKYVTEGMRKPAFLSGEQKKAIVDLLFKTNRKVTVKQLKEDYFKKIECFDSVEISGVEDRFNASLGTYHDLLKIIKDKDFLDNEENEDILEDIVLTLTLFEDREMIEERLKTYAHLFDDKVMKQLKRRRYTGWGRLSRKLINGIRDKQSGKTILDFLKSDGFANRNFMQLIHDDSLTFKEDIQKAQVSGQGDSLHEHIANLAGSPAIKKGILQTVKVVDELVKVMGRHKPENIVIEMARENQTTQKGQKNSRERMKRIEEGIKELGSQILKEHPVENTQLQNEKLYLYYLQNGRDMYVDQELDINRLSDYDVDHIVPQSFLKDDSIDNKVLTRSDKARGKSDNVPSEEVVKKMKNYWRQLLNAKLITQRKFDNLTKAERGGLSELDKAGFIKRQLVETRQITKHVAQILDSRMNTKYDENDKLIREVKVITLKSKLVSDFRKDFQFYKVREINNYHHAHDAYLNAVVGTALIKKYPKLESEFVYGDYKVYDVRKMIAKSEQEIGKATAKYFFYSNIMNFFKTEITLANGEIRKRPLIETNGETGEIVWDKGRDFATVRKVLSMPQVNIVKKTEVQTGGFSKESILPKRNSDKLIARKKDWDPKKYGGFDSPTVAYSVLVVAKVEKGKSKKLKSVKELLGITIMERSSFEKNPIDFLEAKGYKEVKKDLIIKLPKYSLFELENGRKRMLASAGELQKGNELALPSKYVNFLYLASHYEKLKGSPEDNEQKQLFVEQHKHYLDEIIEQISEFSKRVILADANLDKVLSAYNKHRDKPIREQAENIIHLFTLTNLGAPAAFKYFDTTIDRKRYTSTKEVLDATLIHQSITGLYETRIDLSQLGGDGGGGGEAAAKGGTLQLEEEYRLFEPESTQKQEMDIWLKNFPQAWAETGGMGTAHCQAPVLIQLKATATPISIRQYPMPHEAYQGIKPHIRRMLDQGILKPCQSPWNTPLLPVKKPGTEDYRPVQDLREVNKRVEDIHPTVPNPYNLLSTLPPSHPWYTVLDLKDAFFCLRLHSESQLLFAFEWRDPEIGLSGQLTWTRLPQGFKNSPTLFNEALHSDLADFRVRYPALVLLQYVDDLLLAAATRTECLEGTKALLETLGNKGYRASAKKAQICLQEVTYLGYSLKDGQRWLTKARKEAILSIPVPKNSRQVREFLGTAGYCRLWIPGFAELAAPLYPLTRPGTLFQWGTEQQLAFEDIKKALLSSPALGLPDITKPFELFIDENSGFAKGVLVQKLGPWKRPVAYLSKKLDTVASGWPPCLRMVAAIAILVKDAGKLTLGQPLTILTSHPVEALVRQPPNKWLSNARMTHYQAMLLDAERVHFGPTVSLNPATLLPLPSGGNHHDCLQILAETHGTRPDLTDQPLPDADLTWYTDGSSFIRNGEREAGAAVTTESEVIWAAPLPPGTSAQRAELIALTQALKMAEGKKLTVYTDSRYAFATTHVHGEIYRRRGWLTSEGKEIKNKNEILALLEALFLPKRLSIIHCPGHQKGDSPQAKGNRLADDTAKKAATETHSSLTVLPAGKRTADGSEFEKRTADGSEFESPKKKAKVE

SEQ ID NO: 6686 - protein, 2124 aa, synthetic construct
MPAAKRVKLDGGDKKYSIGLDIGTNSVGWAVITDEYKVPSKKFKVLGNTDRHSIKKNLIGALLFDSGETAEATRLKRTARRRYTRRKNRICYLQEIFSNEMAKVDDSFFHRLEESFLVEEDKKHERHPIFGNIVDEVAYHEKYPTIYHLRKKLVDSTDKADLRLIYLALAHMIKFRGHFLIEGDLNPDNSDVDKLFIQLVQTYNQLFEENPINASGVDAKAILSARLSKSRRLENLIAQLPGEKKNGLFGNLIALSLGLTPNFKSNFDLAEDAKLQLSKDTYDDDLDNLLAQIGDQYADLFLAAKNLSDAILLSDILRVNTEITKAPLSASMIKRYDEHHQDLTLLKALVRQQLPEKYKEIFFDQSKNGYAGYIDGGASQEEFYKFIKPILEKMDGTEELLVKLNREDLLRKQRTFDNGSIPHQIHLGELHAILRRQEDFYPFLKDNREKIEKILTFRIPYYVGPLARGNSRFAWMTRKSEETITPWNFEEVVDKGASAQSFIERMTNFDKNLPNEKVLPKHSLLYEYFTVYNELTKVKYVTEGMRKPAFLSGEQKKAIVDLLFKTNRKVTVKQLKEDYFKKIECFDSVEISGVEDRFNASLGTYHDLLKIIKDKDFLDNEENEDILEDIVLTLTLFEDREMIEERLKTYAHLFDDKVMKQLKRRRYTGWGRLSRKLINGIRDKQSGKTILDFLKSDGFANRNFMQLIHDDSLTFKEDIQKAQVSGQGDSLHEHIANLAGSPAIKKGILQTVKVVDELVKVMGRHKPENIVIEMARENQTTQKGQKNSRERMKRIEEGIKELGSQILKEHPVENTQLQNEKLYLYYLQNGRDMYVDQELDINRLSDYDVDHIVPQSFLKDDSIDNKVLTRSDKARGKSDNVPSEEVVKKMKNYWRQLLNAKLITQRKFDNLTKAERGGLSELDKAGFIKRQLVETRQITKHVAQILDSRMNTKYDENDKLIREVKVITLKSKLVSDFRKDFQFYKVREINNYHHAHDAYLNAVVGTALIKKYPKLESEFVYGDYKVYDVRKMIAKSEQEIGKATAKYFFYSNIMNFFKTEITLANGEIRKRPLIETNGETGEIVWDKGRDFATVRKVLSMPQVNIVKKTEVQTGGFSKESILPKRNSDKLIARKKDWDPKKYGGFDSPTVAYSVLVVAKVEKGKSKKLKSVKELLGITIMERSSFEKNPIDFLEAKGYKEVKKDLIIKLPKYSLFELENGRKRMLASAGELQKGNELALPSKYVNFLYLASHYEKLKGSPEDNEQKQLFVEQHKHYLDEIIEQISEFSKRVILADANLDKVLSAYNKHRDKPIREQAENIIHLFTLTNLGAPAAFKYFDTTIDRKRYTSTKEVLDATLIHQSITGLYETRIDLSQLGGDGGGGGEAAAKGGLLGRDLLTKLKAQIQFSTEGPQVTWEDRPAMCLVLNLEEEYRLHEKPVPPSIDPSWLQLFPMVWAEKAGMGLANQVPPVVVELKSDASPVAVRQYPMSKEAREGIRPHIQRFLDLGILVPCQSPWNTPLLPVKKPGTNDYRPVQDLREVNKRVQDIHPTVPNPYNLLSSLPPSHTWYSVLDLKDAFFCLKLHPNSQPLFAFEWRDPEKGNTGQLTWTRLPQGFKNSPTLFNEALHRDLASFRALNPQVVMLQYVDDLLVAAPTYRDCKEGTRRLLQELSKLGYRVSAKKAQLCREEVTYLGYLLKGGKRWLTPARKATVMKIPTPTTPRQVREFLGKAGFCRLFIPGFASLAAPLYPLTRPKVPFTWTEAHQEAFGRIKEALLSAPALALPDLTKPFALYVDEKEGVARGVLTQTLGPWRRPVAYLSKKLDPVASGWPTCLKAIAAVALLLKDADKLTLGQNVLVIAPHNLESIVRQPPDRWMTNARMTHYQSLLLNERVSFAPPAILNPATLLPVESDDTPIHICSEILAEETGTRPDLRDQPLPGVPAWYTDGSSFIMDGRRQAGAAIVDNKRTVWASNLPEGTSAQKAELIALTQALRLAEGKSINIYTDSRYAFATAHVHGAIYKQRGWLTSAGKDIKNKEEILALLEAIHLPKRVAIIHCPGHQRGTDPVATGNRKADEAAKQAAQSTRILTETTKNAGKRTADGSEFEKRTADGSEFESPKKKAKVE

SEQ ID NO: 6687 - protein, 2215 aa, synthetic construct
MPAAKRVKLDGGDKKYSIGLDIGTNSVGWAVITDEYKVPSKKFKVLGNTDRHSIKKNLIGALLFDSGETAEATRLKRTARRRYTRRKNRICYLQEIFSNEMAKVDDSFFHRLEESFLVEEDKKHERHPIFGNIVDEVAYHEKYPTIYHLRKKLVDSTDKADLRLIYLALAHMIKFRGHFLIEGDLNPDNSDVDKLFIQLVQTYNQLFEENPINASGVDAKAILSARLSKSRRLENLIAQLPGEKKNGLFGNLIALSLGLTPNFKSNFDLAEDAKLQLSKDTYDDDLDNLLAQIGDQYADLFLAAKNLSDAILLSDILRVNTEITKAPLSASMIKRYDEHHQDLTLLKALVRQQLPEKYKEIFFDQSKNGYAGYIDGGASQEEFYKFIKPILEKMDGTEELLVKLNREDLLRKQRTFDNGSIPHQIHLGELHAILRRQEDFYPFLKDNREKIEKILTFRIPYYVGPLARGNSRFAWMTRKSEETITPWNFEEVVDKGASAQSFIERMTNFDKNLPNEKVLPKHSLLYEYFTVYNELTKVKYVTEGMRKPAFLSGEQKKAIVDLLFKTNRKVTVKQLKEDYFKKIECFDSVEISGVEDRFNASLGTYHDLLKIIKDKDFLDNEENEDILEDIVLTLTLFEDREMIEERLKTYAHLFDDKVMKQLKRRRYTGWGRLSRKLINGIRDKQSGKTILDFLKSDGFANRNFMQLIHDDSLTFKEDIQKAQVSGQGDSLHEHIANLAGSPAIKKGILQTVKVVDELVKVMGRHKPENIVIEMARENQTTQKGQKNSRERMKRIEEGIKELGSQILKEHPVENTQLQNEKLYLYYLQNGRDMYVDQELDINRLSDYDVDHIVPQSFLKDDSIDNKVLTRSDKARGKSDNVPSEEVVKKMKNYWRQLLNAKLITQRKFDNLTKAERGGLSELDKAGFIKRQLVETRQITKHVAQILDSRMNTKYDENDKLIREVKVITLKSKLVSDFRKDFQFYKVREINNYHHAHDAYLNAVVGTALIKKYPKLESEFVYGDYKVYDVRKMIAKSEQEIGKATAKYFFYSNIMNFFKTEITLANGEIRKRPLIETNGETGEIVWDKGRDFATVRKVLSMPQVNIVKKTEVQTGGFSKESILPKRNSDKLIARKKDWDPKKYGGFDSPTVAYSVLVVAKVEKGKSKKLKSVKELLGITIMERSSFEKNPIDFLEAKGYKEVKKDLIIKLPKYSLFELENGRKRMLASAGELQKGNELALPSKYVNFLYLASHYEKLKGSPEDNEQKQLFVEQHKHYLDEIIEQISEFSKRVILADANLDKVLSAYNKHRDKPIREQAENIIHLFTLTNLGAPAAFKYFDTTIDRKRYTSTKEVLDATLIHQSITGLYETRIDLSQLGGDGGGGGEAAAKGGTLGDQGSRGSDPLPEPRVTLTVEGIPTEFLVNTGAEHSVLTKPMGKMGSKRTVVAGATGSKVYPWTTKRLLKIGQKQVTHSFLVIPECPAPLLGRDLLTKLKAQIQFSTEGPQVTWEDRPAMCLVLNLEEEYRLHEKPVPPSIDPSWLQLFPMVWAEKAGMGLANQVPPVVVELKSDASPVAVRQYPMSKEAREGIRPHIQRFLDLGILVPCQSPWNTPLLPVKKPGTNDYRPVQDLREVNKRVQDIHPTVPNPYNLLSSLPPSHTWYSVLDLKDAFFCLKLHPNSQPLFAFEWRDPEKGNTGQLTWTRLPQGFKNSPTLFNEALHRDLASFRALNPQVVMLQYVDDLLVAAPTYRDCKEGTRRLLQELSKLGYRVSAKKAQLCREEVTYLGYLLKGGKRWLTPARKATVMKIPTPTTPRQVREFLGTAGFCRLWIPGFASLAAPLYPLTRPKVPFTWTEAHQEAFGRIKEALLSAPALALPDLTKPFALYVDEKEGVARGVLTQTLGPWRRPVAYLSKKLDPVASGWPTCLKAIAAVALLLKDADKLTLGQNVLVIAPHNLESIVRQPPDRWMTNARMTHYQSLLLNERVSFAPPAILNPATLLPVESDDTPIHICSEILAEETGTRPDLRDQPLPGVPAWYTDGSSFIMDGRRQAGAAIVDNKRTVWASNLPEGTSAQKAELIALTQALRLAEGKSINIYTDSRYAFATAHVHGAIYKQRGWLTSAGKDIKNKEEILALLEAIHLPKRVAIIHCPGHQRGTDPVATGNRKADEAAKQAAQSTRILTETTKNAGKRTADGSEFEKRTADGSEFESPKKKAKVE

SEQ ID NO: 6688 - protein, 2215 aa, synthetic construct
MPAAKRVKLDGGDKKYSIGLDIGTNSVGWAVITDEYKVPSKKFKVLGNTDRHSIKKNLIGALLFDSGETAEATRLKRTARRRYTRRKNRICYLQEIFSNEMAKVDDSFFHRLEESFLVEEDKKHERHPIFGNIVDEVAYHEKYPTIYHLRKKLVDSTDKADLRLIYLALAHMIKFRGHFLIEGDLNPDNSDVDKLFIQLVQTYNQLFEENPINASGVDAKAILSARLSKSRRLENLIAQLPGEKKNGLFGNLIALSLGLTPNFKSNFDLAEDAKLQLSKDTYDDDLDNLLAQIGDQYADLFLAAKNLSDAILLSDILRVNTEITKAPLSASMIKRYDEHHQDLTLLKALVRQQLPEKYKEIFFDQSKNGYAGYIDGGASQEEFYKFIKPILEKMDGTEELLVKLNREDLLRKQRTFDNGSIPHQIHLGELHAILRRQEDFYPFLKDNREKIEKILTFRIPYYVGPLARGNSRFAWMTRKSEETITPWNFEEVVDKGASAQSFIERMTNFDKNLPNEKVLPKHSLLYEYFTVYNELTKVKYVTEGMRKPAFLSGEQKKAIVDLLFKTNRKVTVKQLKEDYFKKIECFDSVEISGVEDRFNASLGTYHDLLKIIKDKDFLDNEENEDILEDIVLTLTLFEDREMIEERLKTYAHLFDDKVMKQLKRRRYTGWGRLSRKLINGIRDKQSGKTILDFLKSDGFANRNFMQLIHDDSLTFKEDIQKAQVSGQGDSLHEHIANLAGSPAIKKGILQTVKVVDELVKVMGRHKPENIVIEMARENQTTQKGQKNSRERMKRIEEGIKELGSQILKEHPVENTQLQNEKLYLYYLQNGRDMYVDQELDINRLSDYDVDHIVPQSFLKDDSIDNKVLTRSDKARGKSDNVPSEEVVKKMKNYWRQLLNAKLITQRKFDNLTKAERGGLSELDKAGFIKRQLVETRQITKHVAQILDSRMNTKYDENDKLIREVKVITLKSKLVSDFRKDFQFYKVREINNYHHAHDAYLNAVVGTALIKKYPKLESEFVYGDYKVYDVRKMIAKSEQEIGKATAKYFFYSNIMNFFKTEITLANGEIRKRPLIETNGETGEIVWDKGRDFATVRKVLSMPQVNIVKKTEVQTGGFSKESILPKRNSDKLIARKKDWDPKKYGGFDSPTVAYSVLVVAKVEKGKSKKLKSVKELLGITIMERSSFEKNPIDFLEAKGYKEVKKDLIIKLPKYSLFELENGRKRMLASAGELQKGNELALPSKYVNFLYLASHYEKLKGSPEDNEQKQLFVEQHKHYLDEIIEQISEFSKRVILADANLDKVLSAYNKHRDKPIREQAENIIHLFTLTNLGAPAAFKYFDTTIDRKRYTSTKEVLDATLIHQSITGLYETRIDLSQLGGDGGGGGEAAAKGGTLGDQGSRGSDPLPEPRVTLTVEGIPTEFLVNTGAEHSVLTKPMGKMGSKRTVVAGATGSKVYPWTTKRLLKIGQKQVTHSFLVIPECPAPLLGRDLLTKLKAQIQFSTEGPQVTWEDRPAMCLVLNLEEEYRLHEKPVPPSIDPSWLQLFPMVWAEKAGMGLANQVPPVVVELKSDASPVAVRQYPMSKEAREGIRPHIQRFLDLGILVPCQSPWNTPLLPVKKPGTNDYRPVQDLREVNKRVQDIHPTVPNPYNLLSSLPPSHTWYSVLDLKDAFFCLKLHPNSQPLFAFEWRDPEKGNTGQLTWTRLPQGFKNSPTLFNEALHRDLASFRALNPQVVMLQYVDDLLVAAPTYRDCKEGTRRLLQELSKLGYRVSAKKAQLCREEVTYLGYLLKGGKRWLTPARKATVMKIPTPTTPRQVREFLGKAGFCRLFIPGFASLAAPLYPLTRPKVPFTWTEAHQEAFGRIKEALLSAPALALPDLTKPFALYVDEKEGVARGVLTQTLGPWRRPVAYLSKKLDPVASGWPTCLKAIAAVALLLKDADKLTLGQNVLVIAPHNLESIVRQPPDRWMTNARMTHYQSLLLNERVSFAPPAILNPATLLPVESDDTPIHICSEILAEETGTRPDLRDQPLPGVPAWYTDGSSFIMDGRRQAGAAIVDNKRTVWASNLPEGTSAQKAELIALTQALRLAEGKSINIYTDSRYAFATAHVHGAIYKQRGWLTSAGKDIKNKEEILALLEAIHLPKRVAIIHCPGHQRGTDPVATGNRKADEAAKQAAQSTRILTETTKNAGKRTADGSEFEKRTADGSEFESPKKKAKVE

SEQ ID NO: 6689 - protein, 2093 aa, synthetic construct
MPAAKRVKLDGGDKKYSIGLDIGTNSVGWAVITDEYKVPSKKFKVLGNTDRHSIKKNLIGALLFDSGETAEATRLKRTARRRYTRRKNRICYLQEIFSNEMAKVDDSFFHRLEESFLVEEDKKHERHPIFGNIVDEVAYHEKYPTIYHLRKKLVDSTDKADLRLIYLALAHMIKFRGHFLIEGDLNPDNSDVDKLFIQLVQTYNQLFEENPINASGVDAKAILSARLSKSRRLENLIAQLPGEKKNGLFGNLIALSLGLTPNFKSNFDLAEDAKLQLSKDTYDDDLDNLLAQIGDQYADLFLAAKNLSDAILLSDILRVNTEITKAPLSASMIKRYDEHHQDLTLLKALVRQQLPEKYKEIFFDQSKNGYAGYIDGGASQEEFYKFIKPILEKMDGTEELLVKLNREDLLRKQRTFDNGSIPHQIHLGELHAILRRQEDFYPFLKDNREKIEKILTFRIPYYVGPLARGNSRFAWMTRKSEETITPWNFEEVVDKGASAQSFIERMTNFDKNLPNEKVLPKHSLLYEYFTVYNELTKVKYVTEGMRKPAFLSGEQKKAIVDLLFKTNRKVTVKQLKEDYFKKIECFDSVEISGVEDRFNASLGTYHDLLKIIKDKDFLDNEENEDILEDIVLTLTLFEDREMIEERLKTYAHLFDDKVMKQLKRRRYTGWGRLSRKLINGIRDKQSGKTILDFLKSDGFANRNFMQLIHDDSLTFKEDIQKAQVSGQGDSLHEHIANLAGSPAIKKGILQTVKVVDELVKVMGRHKPENIVIEMARENQTTQKGQKNSRERMKRIEEGIKELGSQILKEHPVENTQLQNEKLYLYYLQNGRDMYVDQELDINRLSDYDVDHIVPQSFLKDDSIDNKVLTRSDKARGKSDNVPSEEVVKKMKNYWRQLLNAKLITQRKFDNLTKAERGGLSELDKAGFIKRQLVETRQITKHVAQILDSRMNTKYDENDKLIREVKVITLKSKLVSDFRKDFQFYKVREINNYHHAHDAYLNAVVGTALIKKYPKLESEFVYGDYKVYDVRKMIAKSEQEIGKATAKYFFYSNIMNFFKTEITLANGEIRKRPLIETNGETGEIVWDKGRDFATVRKVLSMPQVNIVKKTEVQTGGFSKESILPKRNSDKLIARKKDWDPKKYGGFDSPTVAYSVLVVAKVEKGKSKKLKSVKELLGITIMERSSFEKNPIDFLEAKGYKEVKKDLIIKLPKYSLFELENGRKRMLASAGELQKGNELALPSKYVNFLYLASHYEKLKGSPEDNEQKQLFVEQHKHYLDEIIEQISEFSKRVILADANLDKVLSAYNKHRDKPIREQAENIIHLFTLTNLGAPAAFKYFDTTIDRKRYTSTKEVLDATLIHQSITGLYETRIDLSQLGGDGGGGGEAAAKGGTLNLEDEYRLYETSAEPEVSPGSTWLSDFPQAWAETGGMGLAVRQAPLIIPLKATSTPVSIKQYPMSQEAKLGIKPHIQRLLDQGILVPCQSPWNTPLLPVKKPGTNDYRPVQDLREVNKRVEDIHPTVPNPYNLLSGLPPSHRWYTVLDLKDAFFCLRLHPTSQPLFAFEWRDPGMGISGQLTWTRLPQGFKNSPTLFNEALHRDLADFRIQHPDLILLQYVDDILLAATSELDCQQGTRALLLTLGNLGYRASAKKAQLCQKQVKYLGYLLKEGQRWLTEARKETVMGQPTPKTPRQLREFLGTAGFCRLWIPGFAEMAAPLYPLTKPGTLFNWGPDQQKAYQEIKQALLTAPALGLPDLTKPFELFVDEKQGYAKGVLTQKLGPWRRPVAYLSKKLDPVAAGWPPCLRMVAAIAVLRKDAGKLTMGQPLVILAPHAVEALVKQPPDRWLSNARMTHYQAMLLDTDRVQFGPVVALNPATLLPLPEEGAPHDCLEILAETHGTRPDLTDQPIPDADHTWYTDGSSFLQEGQRKAGAAVTTETEVIWARALPAGTSAQRAELIALTQALKMAEGKRLNVYTDSRYAFATAHIHGEIYRRRGWLTSEGREIKNKSEILALLKALFLPKRLSIIHCLGHQKGDSAEARGNRLADQAAREAAIKTPPDTSTLLAGKRTADGSEFEKRTADGSEFESPKKKAKVE

SEQ ID NO: 6690 - protein, 2093 aa, synthetic construct
MPAAKRVKLDGGDKKYSIGLDIGTNSVGWAVITDEYKVPSKKFKVLGNTDRHSIKKNLIGALLFDSGETAEATRLKRTARRRYTRRKNRICYLQEIFSNEMAKVDDSFFHRLEESFLVEEDKKHERHPIFGNIVDEVAYHEKYPTIYHLRKKLVDSTDKADLRLIYLALAHMIKFRGHFLIEGDLNPDNSDVDKLFIQLVQTYNQLFEENPINASGVDAKAILSARLSKSRRLENLIAQLPGEKKNGLFGNLIALSLGLTPNFKSNFDLAEDAKLQLSKDTYDDDLDNLLAQIGDQYADLFLAAKNLSDAILLSDILRVNTEITKAPLSASMIKRYDEHHQDLTLLKALVRQQLPEKYKEIFFDQSKNGYAGYIDGGASQEEFYKFIKPILEKMDGTEELLVKLNREDLLRKQRTFDNGSIPHQIHLGELHAILRRQEDFYPFLKDNREKIEKILTFRIPYYVGPLARGNSRFAWMTRKSEETITPWNFEEVVDKGASAQSFIERMTNFDKNLPNEKVLPKHSLLYEYFTVYNELTKVKYVTEGMRKPAFLSGEQKKAIVDLLFKTNRKVTVKQLKEDYFKKIECFDSVEISGVEDRFNASLGTYHDLLKIIKDKDFLDNEENEDILEDIVLTLTLFEDREMIEERLKTYAHLFDDKVMKQLKRRRYTGWGRLSRKLINGIRDKQSGKTILDFLKSDGFANRNFMQLIHDDSLTFKEDIQKAQVSGQGDSLHEHIANLAGSPAIKKGILQTVKVVDELVKVMGRHKPENIVIEMARENQTTQKGQKNSRERMKRIEEGIKELGSQILKEHPVENTQLQNEKLYLYYLQNGRDMYVDQELDINRLSDYDVDHIVPQSFLKDDSIDNKVLTRSDKARGKSDNVPSEEVVKKMKNYWRQLLNAKLITQRKFDNLTKAERGGLSELDKAGFIKRQLVETRQITKHVAQILDSRMNTKYDENDKLIREVKVITLKSKLVSDFRKDFQFYKVREINNYHHAHDAYLNAVVGTALIKKYPKLESEFVYGDYKVYDVRKMIAKSEQEIGKATAKYFFYSNIMNFFKTEITLANGEIRKRPLIETNGETGEIVWDKGRDFATVRKVLSMPQVNIVKKTEVQTGGFSKESILPKRNSDKLIARKKDWDPKKYGGFDSPTVAYSVLVVAKVEKGKSKKLKSVKELLGITIMERSSFEKNPIDFLEAKGYKEVKKDLIIKLPKYSLFELENGRKRMLASAGELQKGNELALPSKYVNFLYLASHYEKLKGSPEDNEQKQLFVEQHKHYLDEIIEQISEFSKRVILADANLDKVLSAYNKHRDKPIREQAENIIHLFTLTNLGAPAAFKYFDTTIDRKRYTSTKEVLDATLIHQSITGLYETRIDLSQLGGDGGGGGEAAAKGGTLNLEDEYRLYETSAEPEVSPGSTWLSDFPQAWAETGGMGLAVRQAPLIIPLKATSTPVSIKQYPMSQEAKLGIKPHIQRLLDQGILVPCQSPWNTPLLPVKKPGTNDYRPVQDLREVNKRVEDIHPTVPNPYNLLSGLPPSHRWYTVLDLKDAFFCLRLHPTSQPLFAFEWRDPGMGISGQLTWTRLPQGFKNSPTLFNEALHRDLADFRIQHPDLILLQYVDDILLAATSELDCQQGTRALLLTLGNLGYRASAKKAQLCQKQVKYLGYLLKEGQRWLTEARKETVMGQPTPKTPRQLREFLGKAGFCRLFIPGFAEMAAPLYPLTKPGTLFNWGPDQQKAYQEIKQALLTAPALGLPDLTKPFELFVDEKQGYAKGVLTQKLGPWRRPVAYLSKKLDPVAAGWPPCLRMVAAIAVLRKDAGKLTMGQPLVILAPHAVEALVKQPPDRWLSNARMTHYQAMLLDTDRVQFGPVVALNPATLLPLPEEGAPHDCLEILAETHGTRPDLTDQPIPDADHTWYTDGSSFLQEGQRKAGAAVTTETEVIWARALPAGTSAQRAELIALTQALKMAEGKRLNVYTDSRYAFATAHIHGEIYRRRGWLTSEGREIKNKSEILALLKALFLPKRLSIIHCLGHQKGDSAEARGNRLADQAAREAAIKTPPDTSTLLAGKRTADGSEFEKRTADGSEFESPKKKAKVE

SEQ ID NO: 6691 - protein, 2093 aa, synthetic construct
MPAAKRVKLDGGDKKYSIGLDIGTNSVGWAVITDEYKVPSKKFKVLGNTDRHSIKKNLIGALLFDSGETAEATRLKRTARRRYTRRKNRICYLQEIFSNEMAKVDDSFFHRLEESFLVEEDKKHERHPIFGNIVDEVAYHEKYPTIYHLRKKLVDSTDKADLRLIYLALAHMIKFRGHFLIEGDLNPDNSDVDKLFIQLVQTYNQLFEENPINASGVDAKAILSARLSKSRRLENLIAQLPGEKKNGLFGNLIALSLGLTPNFKSNFDLAEDAKLQLSKDTYDDDLDNLLAQIGDQYADLFLAAKNLSDAILLSDILRVNTEITKAPLSASMIKRYDEHHQDLTLLKALVRQQLPEKYKEIFFDQSKNGYAGYIDGGASQEEFYKFIKPILEKMDGTEELLVKLNREDLLRKQRTFDNGSIPHQIHLGELHAILRRQEDFYPFLKDNREKIEKILTFRIPYYVGPLARGNSRFAWMTRKSEETITPWNFEEVVDKGASAQSFIERMTNFDKNLPNEKVLPKHSLLYEYFTVYNELTKVKYVTEGMRKPAFLSGEQKKAIVDLLFKTNRKVTVKQLKEDYFKKIECFDSVEISGVEDRFNASLGTYHDLLKIIKDKDFLDNEENEDILEDIVLTLTLFEDREMIEERLKTYAHLFDDKVMKQLKRRRYTGWGRLSRKLINGIRDKQSGKTILDFLKSDGFANRNFMQLIHDDSLTFKEDIQKAQVSGQGDSLHEHIANLAGSPAIKKGILQTVKVVDELVKVMGRHKPENIVIEMARENQTTQKGQKNSRERMKRIEEGIKELGSQILKEHPVENTQLQNEKLYLYYLQNGRDMYVDQELDINRLSDYDVDHIVPQSFLKDDSIDNKVLTRSDKARGKSDNVPSEEVVKKMKNYWRQLLNAKLITQRKFDNLTKAERGGLSELDKAGFIKRQLVETRQITKHVAQILDSRMNTKYDENDKLIREVKVITLKSKLVSDFRKDFQFYKVREINNYHHAHDAYLNAVVGTALIKKYPKLESEFVYGDYKVYDVRKMIAKSEQEIGKATAKYFFYSNIMNFFKTEITLANGEIRKRPLIETNGETGEIVWDKGRDFATVRKVLSMPQVNIVKKTEVQTGGFSKESILPKRNSDKLIARKKDWDPKKYGGFDSPTVAYSVLVVAKVEKGKSKKLKSVKELLGITIMERSSFEKNPIDFLEAKGYKEVKKDLIIKLPKYSLFELENGRKRMLASAGELQKGNELALPSKYVNFLYLASHYEKLKGSPEDNEQKQLFVEQHKHYLDEIIEQISEFSKRVILADANLDKVLSAYNKHRDKPIREQAENIIHLFTLTNLGAPAAFKYFDTTIDRKRYTSTKEVLDATLIHQSITGLYETRIDLSQLGGDGGGGGEAAAKGGLGIEDEYRLHETSTEPDVSLGSTWLSDFPQAWAETGGMGLAVRQAPLIIPLKATSTPVSIQQYPMSHEARLGIKPHIQRLLDQGILVPCQSPWNTPLLPVKKPGTNDYRPVQDLREVNKRVEDIHPTVPNPYNLLSGLPPSHQWYTVLDLKDAFFCLRLHPTSQPLFAFEWRDPGMGISGQLTWTRLPQGFKNSPTLFNEALHRDLADFRIQHPDLILLQYVDDILLAATSELDCQQGTRALLQTLGDLGYRASAKKAQICQKQVKYLGYLLREGQRWLTEARKETVMGQPVPKTPRQLREFLGKAGFCRLFIPGFAEMAAPLYPLTKPGTLFSWGPDQQKAYQEIKQALLTAPALGLPDLTKPFELFVDEKQGYAKGVLTQKLGPWRRPVAYLSKKLDPVAAGWPPCLRMVAAIAVLTKDAGKLTMGQPLVILAPHAVEALVKQPPDRWLSNARMTHYQAMLLDTDRVQFGPVVALNPATLLPLPEEGAPHDCLEILAETHGTRPDLTDQPIPDADHTWYTDGSSFLQEGQRKAGAAVTTETEVIWAGALPAGTSAQRAELIALTQALKMAEGKRLNVYTDSRYAFATAHIHGEIYRRRGWLTSEGREIKNKSEILALLKALFLPKRLSIIHCLGHQKGDSAEARGNRLADQAAREAAIKTPPDTSTLLIAGKRTADGSEFEKRTADGSEFESPKKKAKVE

SEQ ID NO: 6692 - protein, 2093 aa, synthetic construct
MPAAKRVKLDGGDKKYSIGLDIGTNSVGWAVITDEYKVPSKKFKVLGNTDRHSIKKNLIGALLFDSGETAEATRLKRTARRRYTRRKNRICYLQEIFSNEMAKVDDSFFHRLEESFLVEEDKKHERHPIFGNIVDEVAYHEKYPTIYHLRKKLVDSTDKADLRLIYLALAHMIKFRGHFLIEGDLNPDNSDVDKLFIQLVQTYNQLFEENPINASGVDAKAILSARLSKSRRLENLIAQLPGEKKNGLFGNLIALSLGLTPNFKSNFDLAEDAKLQLSKDTYDDDLDNLLAQIGDQYADLFLAAKNLSDAILLSDILRVNTEITKAPLSASMIKRYDEHHQDLTLLKALVRQQLPEKYKEIFFDQSKNGYAGYIDGGASQEEFYKFIKPILEKMDGTEELLVKLNREDLLRKQRTFDNGSIPHQIHLGELHAILRRQEDFYPFLKDNREKIEKILTFRIPYYVGPLARGNSRFAWMTRKSEETITPWNFEEVVDKGASAQSFIERMTNFDKNLPNEKVLPKHSLLYEYFTVYNELTKVKYVTEGMRKPAFLSGEQKKAIVDLLFKTNRKVTVKQLKEDYFKKIECFDSVEISGVEDRFNASLGTYHDLLKIIKDKDFLDNEENEDILEDIVLTLTLFEDREMIEERLKTYAHLFDDKVMKQLKRRRYTGWGRLSRKLINGIRDKQSGKTILDFLKSDGFANRNFMQLIHDDSLTFKEDIQKAQVSGQGDSLHEHIANLAGSPAIKKGILQTVKVVDELVKVMGRHKPENIVIEMARENQTTQKGQKNSRERMKRIEEGIKELGSQILKEHPVENTQLQNEKLYLYYLQNGRDMYVDQELDINRLSDYDVDHIVPQSFLKDDSIDNKVLTRSDKARGKSDNVPSEEVVKKMKNYWRQLLNAKLITQRKFDNLTKAERGGLSELDKAGFIKRQLVETRQITKHVAQILDSRMNTKYDENDKLIREVKVITLKSKLVSDFRKDFQFYKVREINNYHHAHDAYLNAVVGTALIKKYPKLESEFVYGDYKVYDVRKMIAKSEQEIGKATAKYFFYSNIMNFFKTEITLANGEIRKRPLIETNGETGEIVWDKGRDFATVRKVLSMPQVNIVKKTEVQTGGFSKESILPKRNSDKLIARKKDWDPKKYGGFDSPTVAYSVLVVAKVEKGKSKKLKSVKELLGITIMERSSFEKNPIDFLEAKGYKEVKKDLIIKLPKYSLFELENGRKRMLASAGELQKGNELALPSKYVNFLYLASHYEKLKGSPEDNEQKQLFVEQHKHYLDEIIEQISEFSKRVILADANLDKVLSAYNKHRDKPIREQAENIIHLFTLTNLGAPAAFKYFDTTIDRKRYTSTKEVLDATLIHQSITGLYETRIDLSQLGGDGGGGGEAAAKGGTLNIEDEYRLHETSKGPDVPLGSTWLSDFPQAWAETGGMGLAVRQAPLIIPLKATSTPVSIKQYPMSQEARLGIKPHIQRLLDQGILVPCQSPWNTPLLPVKKPGTNDYRPVQDLREVNKRVEDIHPTVPNPYNLLSGLPPSHQWYTVLDLKDAFFCLRLHPTSQSLFAFEWRDPEMGISGQLTWTRLPQGFKNSPTLFNEALHRDLADFRIQHPDLILLQYVDDLLLAATSELDCQQGTRALLQTLGDLGYRASAKKAQICQKQVKYLGYLLKEGQRWLTEARKETVMGQPTPKTPRQLREFLGTAGFCRLWIPGFAEMAAPLYPLTKPGTLFEWGPDQQKAYQEIKQALLTAPALGLPDLTKPFELFVDEKQGYAKGVLTQKLGPWRRPVAYLSKKLDPVAAGWPPCLRMVAAIAVLTKDAGKLTMGQPLVILAPHAVEALVKQPPDRWLSNARMTHYQALLLDTDRVQFGPIVALNPATLLPLPEEGLQHDCLDILAEAHGTRPDLTDQPLPDADHTWYTDGSSFLQEGQRKAGAAVTTETEVVWAKALPAGTSAQRAELIALTQALKMAEGKKLNVYTDSRYAFATAHIHGEIYRRRGWLTSEGKEIKNKDEILALLKALFLPKRLSIIHCPGHQKGNRAEARGNRMADQAAREVATRETPETSTLLAGKRTADGSEFEKRTADGSEFESPKKKAKVE

SEQ ID NO: 6693 - protein, 2087 aa, synthetic construct
MPAAKRVKLDGGDKKYSIGLDIGTNSVGWAVITDEYKVPSKKFKVLGNTDRHSIKKNLIGALLFDSGETAEATRLKRTARRRYTRRKNRICYLQEIFSNEMAKVDDSFFHRLEESFLVEEDKKHERHPIFGNIVDEVAYHEKYPTIYHLRKKLVDSTDKADLRLIYLALAHMIKFRGHFLIEGDLNPDNSDVDKLFIQLVQTYNQLFEENPINASGVDAKAILSARLSKSRRLENLIAQLPGEKKNGLFGNLIALSLGLTPNFKSNFDLAEDAKLQLSKDTYDDDLDNLLAQIGDQYADLFLAAKNLSDAILLSDILRVNTEITKAPLSASMIKRYDEHHQDLTLLKALVRQQLPEKYKEIFFDQSKNGYAGYIDGGASQEEFYKFIKPILEKMDGTEELLVKLNREDLLRKQRTFDNGSIPHQIHLGELHAILRRQEDFYPFLKDNREKIEKILTFRIPYYVGPLARGNSRFAWMTRKSEETITPWNFEEVVDKGASAQSFIERMTNFDKNLPNEKVLPKHSLLYEYFTVYNELTKVKYVTEGMRKPAFLSGEQKKAIVDLLFKTNRKVTVKQLKEDYFKKIECFDSVEISGVEDRFNASLGTYHDLLKIIKDKDFLDNEENEDILEDIVLTLTLFEDREMIEERLKTYAHLFDDKVMKQLKRRRYTGWGRLSRKLINGIRDKQSGKTILDFLKSDGFANRNFMQLIHDDSLTFKEDIQKAQVSGQGDSLHEHIANLAGSPAIKKGILQTVKVVDELVKVMGRHKPENIVIEMARENQTTQKGQKNSRERMKRIEEGIKELGSQILKEHPVENTQLQNEKLYLYYLQNGRDMYVDQELDINRLSDYDVDHIVPQSFLKDDSIDNKVLTRSDKARGKSDNVPSEEVVKKMKNYWRQLLNAKLITQRKFDNLTKAERGGLSELDKAGFIKRQLVETRQITKHVAQILDSRMNTKYDENDKLIREVKVITLKSKLVSDFRKDFQFYKVREINNYHHAHDAYLNAVVGTALIKKYPKLESEFVYGDYKVYDVRKMIAKSEQEIGKATAKYFFYSNIMNFFKTEITLANGEIRKRPLIETNGETGEIVWDKGRDFATVRKVLSMPQVNIVKKTEVQTGGFSKESILPKRNSDKLIARKKDWDPKKYGGFDSPTVAYSVLVVAKVEKGKSKKLKSVKELLGITIMERSSFEKNPIDFLEAKGYKEVKKDLIIKLPKYSLFELENGRKRMLASAGELQKGNELALPSKYVNFLYLASHYEKLKGSPEDNEQKQLFVEQHKHYLDEIIEQISEFSKRVILADANLDKVLSAYNKHRDKPIREQAENIIHLFTLTNLGAPAAFKYFDTTIDRKRYTSTKEVLDATLIHQSITGLYETRIDLSQLGGDGGGGGEAAAKGGTLQLDDEYRLYSPLVKPDQNIQFWLEQFPQAWAETAGMGLAKQVPPQVIQLKASATPVSVRQYPLSKEAQEGIRPHVQRLIQQGILVPVQSPWNTPLLPVRKPGTNDYRPVQDLREVNKRVQDIHPTVPNPYNLLCALPPQRSWYTVLDLKDAFFCLRLHPTSQPLFAFEWRDPGTGRTGQLTWTRLPQGFKNSPTIFDEALHRDLANFRIQHPQVTLLQYVDDLLLAGATKQDCLEGTKALLLELSDLGYRASAKKAQICRREVTYLGYSLRDGQRWLTEARKKTVVQIPAPTTAKQVREFLGTAGFCRLWIPGFATLAAPLYPLTKEKGEFSWAPEHQKAFDAIKKALLSAPALALPDVTKPFTLYVDERKGVARGVLTQTLGPWRRPVAYLSKKLDPVASGWPVCLKAIAAVAILVKDADKLTLGQNITVIAPHALENIVRQPPDRWMTNARMTHYQSLLLTERVTFAPPAALNPATLLPEETDEPVTHDCHQLLIEETGVRKDLTDIPLTGEVLTWFTDGSSYVVEGKRMAGAAVVDGTRTIWASSLPEGTSAQKAELMALTQALRLAEGKSINIYTDSRYAFATAHVHGAIYKQRGLLTSAGREIKNKEEILSLLEALHLPKRLAIIHCPGHQKAKDPISRGNQMADRVAKQAAQGVNLLAGKRTADGSEFEKRTADGSEFESPKKKAKVE

SEQ ID NO: 6694 - protein, 2173 aa, synthetic construct
MPAAKRVKLDGGDKKYSIGLDIGTNSVGWAVITDEYKVPSKKFKVLGNTDRHSIKKNLIGALLFDSGETAEATRLKRTARRRYTRRKNRICYLQEIFSNEMAKVDDSFFHRLEESFLVEEDKKHERHPIFGNIVDEVAYHEKYPTIYHLRKKLVDSTDKADLRLIYLALAHMIKFRGHFLIEGDLNPDNSDVDKLFIQLVQTYNQLFEENPINASGVDAKAILSARLSKSRRLENLIAQLPGEKKNGLFGNLIALSLGLTPNFKSNFDLAEDAKLQLSKDTYDDDLDNLLAQIGDQYADLFLAAKNLSDAILLSDILRVNTEITKAPLSASMIKRYDEHHQDLTLLKALVRQQLPEKYKEIFFDQSKNGYAGYIDGGASQEEFYKFIKPILEKMDGTEELLVKLNREDLLRKQRTFDNGSIPHQIHLGELHAILRRQEDFYPFLKDNREKIEKILTFRIPYYVGPLARGNSRFAWMTRKSEETITPWNFEEVVDKGASAQSFIERMTNFDKNLPNEKVLPKHSLLYEYFTVYNELTKVKYVTEGMRKPAFLSGEQKKAIVDLLFKTNRKVTVKQLKEDYFKKIECFDSVEISGVEDRFNASLGTYHDLLKIIKDKDFLDNEENEDILEDIVLTLTLFEDREMIEERLKTYAHLFDDKVMKQLKRRRYTGWGRLSRKLINGIRDKQSGKTILDFLKSDGFANRNFMQLIHDDSLTFKEDIQKAQVSGQGDSLHEHIANLAGSPAIKKGILQTVKVVDELVKVMGRHKPENIVIEMARENQTTQKGQKNSRERMKRIEEGIKELGSQILKEHPVENTQLQNEKLYLYYLQNGRDMYVDQELDINRLSDYDVDHIVPQSFLKDDSIDNKVLTRSDKARGKSDNVPSEEVVKKMKNYWRQLLNAKLITQRKFDNLTKAERGGLSELDKAGFIKRQLVETRQITKHVAQILDSRMNTKYDENDKLIREVKVITLKSKLVSDFRKDFQFYKVREINNYHHAHDAYLNAVVGTALIKKYPKLESEFVYGDYKVYDVRKMIAKSEQEIGKATAKYFFYSNIMNFFKTEITLANGEIRKRPLIETNGETGEIVWDKGRDFATVRKVLSMPQVNIVKKTEVQTGGFSKESILPKRNSDKLIARKKDWDPKKYGGFDSPTVAYSVLVVAKVEKGKSKKLKSVKELLGITIMERSSFEKNPIDFLEAKGYKEVKKDLIIKLPKYSLFELENGRKRMLASAGELQKGNELALPSKYVNFLYLASHYEKLKGSPEDNEQKQLFVEQHKHYLDEIIEQISEFSKRVILADANLDKVLSAYNKHRDKPIREQAENIIHLFTLTNLGAPAAFKYFDTTIDRKRYTSTKEVLDATLIHQSITGLYETRIDLSQLGGDGGGGGEAAAKGGMDPLQLLQPLEAEIKGTKLKAHWNSGATITCVPQAFLEEEVPIKNIWIKTIHGEKEQPVYYLTFKIQGRKVEAEVISSPYDYILVSPSDIPWLMKKPLQLTTLVPLQEYEERLLKQTMLTGSYKEKLQSLFLKYDALWQHWENQVGHRRIKPHHIATGTVNPRPQKQYPINPKAKASIQTVINDLLKQGVLIQQNSIMNTPVYPVPKPDGKWRMVLDYREVNKTIPLIAAQNQHSAGILSSIFRGKYKTTLDLSNGFWAHSITPESYWLTAFTWLGQQYCWTRLPQGFLNSPALFNADVVDLLKEVPNVQVYVDDIYISHDDPREHLEQLEKVFSLLLNAGYVVSLKKSEIAQHEVEFLGFNITKEGRGLTETFKQKLLNITPPRDLKQLQSILGKLNFARNFIPNFSELVKPLYNIIATAPGKYITWTTDNSQQLQNIISMLNSAENLEERNPEVRLIMKVNTSPSAGYIRFYNEFAKRPIMYLNYVYTKAEVKFTNTEKLLTTIHKGLIKALDLGMGQEILVYSPIVSMTKIQKTPLPERKALPIRWITWMSYLEDPRIQFHYDKTLPELQQVPTVTDDIIAKIKHPSEFSMVFYTDGSAIKHPNVNKSHNAGMGIAQVQFKPEFTVINTWSIPLGDHTAQLAEVAAVEFACKKALKIDGPVLIVTDSFYVAESVNKELPYWQSNGFFNNKKKPLKHVSKWKSIADCIQLKPDIIIIHEKGHQPTASTFHTEGNNLADKLATQGSYVVNAGKRTADGSEFEKRTADGSEFESPKKKAKVE

SEQ ID NO: 6695 - protein, 2093 aa, synthetic construct
MPAAKRVKLDGGDKKYSIGLDIGTNSVGWAVITDEYKVPSKKFKVLGNTDRHSIKKNLIGALLFDSGETAEATRLKRTARRRYTRRKNRICYLQEIFSNEMAKVDDSFFHRLEESFLVEEDKKHERHPIFGNIVDEVAYHEKYPTIYHLRKKLVDSTDKADLRLIYLALAHMIKFRGHFLIEGDLNPDNSDVDKLFIQLVQTYNQLFEENPINASGVDAKAILSARLSKSRRLENLIAQLPGEKKNGLFGNLIALSLGLTPNFKSNFDLAEDAKLQLSKDTYDDDLDNLLAQIGDQYADLFLAAKNLSDAILLSDILRVNTEITKAPLSASMIKRYDEHHQDLTLLKALVRQQLPEKYKEIFFDQSKNGYAGYIDGGASQEEFYKFIKPILEKMDGTEELLVKLNREDLLRKQRTFDNGSIPHQIHLGELHAILRRQEDFYPFLKDNREKIEKILTFRIPYYVGPLARGNSRFAWMTRKSEETITPWNFEEVVDKGASAQSFIERMTNFDKNLPNEKVLPKHSLLYEYFTVYNELTKVKYVTEGMRKPAFLSGEQKKAIVDLLFKTNRKVTVKQLKEDYFKKIECFDSVEISGVEDRFNASLGTYHDLLKIIKDKDFLDNEENEDILEDIVLTLTLFEDREMIEERLKTYAHLFDDKVMKQLKRRRYTGWGRLSRKLINGIRDKQSGKTILDFLKSDGFANRNFMQLIHDDSLTFKEDIQKAQVSGQGDSLHEHIANLAGSPAIKKGILQTVKVVDELVKVMGRHKPENIVIEMARENQTTQKGQKNSRERMKRIEEGIKELGSQILKEHPVENTQLQNEKLYLYYLQNGRDMYVDQELDINRLSDYDVDHIVPQSFLKDDSIDNKVLTRSDKARGKSDNVPSEEVVKKMKNYWRQLLNAKLITQRKFDNLTKAERGGLSELDKAGFIKRQLVETRQITKHVAQILDSRMNTKYDENDKLIREVKVITLKSKLVSDFRKDFQFYKVREINNYHHAHDAYLNAVVGTALIKKYPKLESEFVYGDYKVYDVRKMIAKSEQEIGKATAKYFFYSNIMNFFKTEITLANGEIRKRPLIETNGETGEIVWDKGRDFATVRKVLSMPQVNIVKKTEVQTGGFSKESILPKRNSDKLIARKKDWDPKKYGGFDSPTVAYSVLVVAKVEKGKSKKLKSVKELLGITIMERSSFEKNPIDFLEAKGYKEVKKDLIIKLPKYSLFELENGRKRMLASAGELQKGNELALPSKYVNFLYLASHYEKLKGSPEDNEQKQLFVEQHKHYLDEIIEQISEFSKRVILADANLDKVLSAYNKHRDKPIREQAENIIHLFTLTNLGAPAAFKYFDTTIDRKRYTSTKEVLDATLIHQSITGLYETRIDLSQLGGDGGGGGEAAAKGGTLNIEDEYRLHETSKEPDVPLGSTWLSDFPQAWAETGGMGLAVRQAPLIIPLKATSTPVSIKQYPMSQEARLGIKPHIQRLLDQGILVPCQSPWNTPLLPVKKPGTNDYRPVQDLREVNKRVEDIHPTVPNPYNLLSGLPPSHQWYTVLDLKDAFFCLRLHPTSQPLFAFEWRDPEMGISGQLTWTRLPQGFKNSPTLFNEALHRDLADFRIQHPDLILLQYVDDLLLAATSEQDCQRGTRALLQTLGNLGYRASAKKAQICQKQVKYLGYLLKEGQRWLTEARKETVMGQPTPKTPRQLREFLGTAGFCRLWIPGFAEMAAPLYPLTKPGTLFNWGPDQQKAYQEIKQALLTAPALGLPDLTKPFELFVDEKQGYAKGVLTQKLGPWRRPVAYLSKKLDPVAAGWPPCLRMVAAIAVLTKDAGKLTMGQPLVILAPHAVEALVKQPPDRWLSNARMTHYQAMLLDTDRVQFGPVVALNPATLLPLPEKEAPHDCLEILAETHGTRPDLTDQPIPDADYTWYTDGSSFLQEGQRRAGAAVTTETEVIWARALPAGTSAQRAELIALTQALKMAEGKKLNVYTDSRYAFATAHVHGEIYRRRGWLTSEGREIKNKNEILALLKALFLPKRLSIIHCPGHQKGNSAEARGNRMADQAAREAAMKAVLETSTLLAGKRTADGSEFEKRTADGSEFESPKKKAKVE

SEQ ID NO: 6696 - protein, 2091 aa, synthetic construct
MPAAKRVKLDGGDKKYSIGLDIGTNSVGWAVITDEYKVPSKKFKVLGNTDRHSIKKNLIGALLFDSGETAEATRLKRTARRRYTRRKNRICYLQEIFSNEMAKVDDSFFHRLEESFLVEEDKKHERHPIFGNIVDEVAYHEKYPTIYHLRKKLVDSTDKADLRLIYLALAHMIKFRGHFLIEGDLNPDNSDVDKLFIQLVQTYNQLFEENPINASGVDAKAILSARLSKSRRLENLIAQLPGEKKNGLFGNLIALSLGLTPNFKSNFDLAEDAKLQLSKDTYDDDLDNLLAQIGDQYADLFLAAKNLSDAILLSDILRVNTEITKAPLSASMIKRYDEHHQDLTLLKALVRQQLPEKYKEIFFDQSKNGYAGYIDGGASQEEFYKFIKPILEKMDGTEELLVKLNREDLLRKQRTFDNGSIPHQIHLGELHAILRRQEDFYPFLKDNREKIEKILTFRIPYYVGPLARGNSRFAWMTRKSEETITPWNFEEVVDKGASAQSFIERMTNFDKNLPNEKVLPKHSLLYEYFTVYNELTKVKYVTEGMRKPAFLSGEQKKAIVDLLFKTNRKVTVKQLKEDYFKKIECFDSVEISGVEDRFNASLGTYHDLLKIIKDKDFLDNEENEDILEDIVLTLTLFEDREMIEERLKTYAHLFDDKVMKQLKRRRYTGWGRLSRKLINGIRDKQSGKTILDFLKSDGFANRNFMQLIHDDSLTFKEDIQKAQVSGQGDSLHEHIANLAGSPAIKKGILQTVKVVDELVKVMGRHKPENIVIEMARENQTTQKGQKNSRERMKRIEEGIKELGSQILKEHPVENTQLQNEKLYLYYLQNGRDMYVDQELDINRLSDYDVDHIVPQSFLKDDSIDNKVLTRSDKARGKSDNVPSEEVVKKMKNYWRQLLNAKLITQRKFDNLTKAERGGLSELDKAGFIKRQLVETRQITKHVAQILDSRMNTKYDENDKLIREVKVITLKSKLVSDFRKDFQFYKVREINNYHHAHDAYLNAVVGTALIKKYPKLESEFVYGDYKVYDVRKMIAKSEQEIGKATAKYFFYSNIMNFFKTEITLANGEIRKRPLIETNGETGEIVWDKGRDFATVRKVLSMPQVNIVKKTEVQTGGFSKESILPKRNSDKLIARKKDWDPKKYGGFDSPTVAYSVLVVAKVEKGKSKKLKSVKELLGITIMERSSFEKNPIDFLEAKGYKEVKKDLIIKLPKYSLFELENGRKRMLASAGELQKGNELALPSKYVNFLYLASHYEKLKGSPEDNEQKQLFVEQHKHYLDEIIEQISEFSKRVILADANLDKVLSAYNKHRDKPIREQAENIIHLFTLTNLGAPAAFKYFDTTIDRKRYTSTKEVLDATLIHQSITGLYETRIDLSQLGGDGGEAAAKGGGGGVLNLEEEYRLHEKPVPSSIDPSWLQLFPTVWAERAGMGLANQVPPVVVELRSGASPVAVRQYPMSKEAREGIRPHIQKFLDLGVLVPCRSPWNTPLLPVKKPGTNDYRPVQDLREINKRVQDIHPTVPNPYNLLSSLPPSYTWYSVLDLKDAFFCLRLHPNSQPLFAFEWKDPEKGNTGQLTWTRLPQGFKNSPTLFNEALHRDLAPFRALNPQVVLLQYVDDLLVAAPTYEDCKKGTQKLLQELSKLGYRVSAKKAQLCQREVTYLGYLLKEGKRWLTPARKATVMKIPVPTTPRQVREFLGTAGFCRLWIPGFASLAAPLYPLTKPSIPFIWTEEHQQAFDHIKKALLSAPALALPDLTKPFTLYIDERAGVARGVLTQTLGPWRRPVAYLSKKLDPVASGWPTCLKAVAAVALLLKDADKLTLGQNVTVIASHSLESIVRQPPDRWMTNARMTHYQSLLLNERVSFAPPAVLNPATLLPVESEATPVHRCSEILAEETGTRRDLEDQPLPGVPTWYTDGSSFITEGKRRAGAPIVDGKRTVWASSLPEGTSAQKAELVALTQALRLAEGKNINIYTDSRYAFATAHIHGAIYKQRGWLTSAGKDIKNKEEILALLEAIHLPRRVAIIHCPGHQRGSNPVATGNRRADEAAKQAALSTRVLAGTTKPAGKRTADGSEFEKRTADGSEFESPKKKAKVE

SEQ ID NO: 6697 - protein, 2091 aa, synthetic construct
MPAAKRVKLDGGDKKYSIGLDIGTNSVGWAVITDEYKVPSKKFKVLGNTDRHSIKKNLIGALLFDSGETAEATRLKRTARRRYTRRKNRICYLQEIFSNEMAKVDDSFFHRLEESFLVEEDKKHERHPIFGNIVDEVAYHEKYPTIYHLRKKLVDSTDKADLRLIYLALAHMIKFRGHFLIEGDLNPDNSDVDKLFIQLVQTYNQLFEENPINASGVDAKAILSARLSKSRRLENLIAQLPGEKKNGLFGNLIALSLGLTPNFKSNFDLAEDAKLQLSKDTYDDDLDNLLAQIGDQYADLFLAAKNLSDAILLSDILRVNTEITKAPLSASMIKRYDEHHQDLTLLKALVRQQLPEKYKEIFFDQSKNGYAGYIDGGASQEEFYKFIKPILEKMDGTEELLVKLNREDLLRKQRTFDNGSIPHQIHLGELHAILRRQEDFYPFLKDNREKIEKILTFRIPYYVGPLARGNSRFAWMTRKSEETITPWNFEEVVDKGASAQSFIERMTNFDKNLPNEKVLPKHSLLYEYFTVYNELTKVKYVTEGMRKPAFLSGEQKKAIVDLLFKTNRKVTVKQLKEDYFKKIECFDSVEISGVEDRFNASLGTYHDLLKIIKDKDFLDNEENEDILEDIVLTLTLFEDREMIEERLKTYAHLFDDKVMKQLKRRRYTGWGRLSRKLINGIRDKQSGKTILDFLKSDGFANRNFMQLIHDDSLTFKEDIQKAQVSGQGDSLHEHIANLAGSPAIKKGILQTVKVVDELVKVMGRHKPENIVIEMARENQTTQKGQKNSRERMKRIEEGIKELGSQILKEHPVENTQLQNEKLYLYYLQNGRDMYVDQELDINRLSDYDVDHIVPQSFLKDDSIDNKVLTRSDKARGKSDNVPSEEVVKKMKNYWRQLLNAKLITQRKFDNLTKAERGGLSELDKAGFIKRQLVETRQITKHVAQILDSRMNTKYDENDKLIREVKVITLKSKLVSDFRKDFQFYKVREINNYHHAHDAYLNAVVGTALIKKYPKLESEFVYGDYKVYDVRKMIAKSEQEIGKATAKYFFYSNIMNFFKTEITLANGEIRKRPLIETNGETGEIVWDKGRDFATVRKVLSMPQVNIVKKTEVQTGGFSKESILPKRNSDKLIARKKDWDPKKYGGFDSPTVAYSVLVVAKVEKGKSKKLKSVKELLGITIMERSSFEKNPIDFLEAKGYKEVKKDLIIKLPKYSLFELENGRKRMLASAGELQKGNELALPSKYVNFLYLASHYEKLKGSPEDNEQKQLFVEQHKHYLDEIIEQISEFSKRVILADANLDKVLSAYNKHRDKPIREQAENIIHLFTLTNLGAPAAFKYFDTTIDRKRYTSTKEVLDATLIHQSITGLYETRIDLSQLGGDGGEAAAKGGGGGVLNLEEEYRLHEKPVPSSIDPSWLQLFPTVWAERAGMGLANQVPPVVVELRSGASPVAVRQYPMSKEAREGIRPHIQKFLDLGVLVPCRSPWNTPLLPVKKPGTNDYRPVQDLREINKRVQDIHPTVPNPYNLLSSLPPSYTWYSVLDLKDAFFCLRLHPNSQPLFAFEWKDPEKGNTGQLTWTRLPQGFKNSPTLFNEALHRDLAPFRALNPQVVLLQYVDDLLVAAPTYEDCKKGTQKLLQELSKLGYRVSAKKAQLCQREVTYLGYLLKEGKRWLTPARKATVMKIPVPTTPRQVREFLGKAGFCRLFIPGFASLAAPLYPLTKPSIPFIWTEEHQQAFDHIKKALLSAPALALPDLTKPFTLYIDERAGVARGVLTQTLGPWRRPVAYLSKKLDPVASGWPTCLKAVAAVALLLKDADKLTLGQNVTVIASHSLESIVRQPPDRWMTNARMTHYQSLLLNERVSFAPPAVLNPATLLPVESEATPVHRCSEILAEETGTRRDLEDQPLPGVPTWYTDGSSFITEGKRRAGAPIVDGKRTVWASSLPEGTSAQKAELVALTQALRLAEGKNINIYTDSRYAFATAHIHGAIYKQRGWLTSAGKDIKNKEEILALLEAIHLPRRVAIIHCPGHQRGSNPVATGNRRADEAAKQAALSTRVLAGTTKPAGKRTADGSEFEKRTADGSEFESPKKKAKVE

SEQ ID NO: 6698 - protein, 2124 aa, synthetic construct
MPAAKRVKLDGGDKKYSIGLDIGTNSVGWAVITDEYKVPSKKFKVLGNTDRHSIKKNLIGALLFDSGETAEATRLKRTARRRYTRRKNRICYLQEIFSNEMAKVDDSFFHRLEESFLVEEDKKHERHPIFGNIVDEVAYHEKYPTIYHLRKKLVDSTDKADLRLIYLALAHMIKFRGHFLIEGDLNPDNSDVDKLFIQLVQTYNQLFEENPINASGVDAKAILSARLSKSRRLENLIAQLPGEKKNGLFGNLIALSLGLTPNFKSNFDLAEDAKLQLSKDTYDDDLDNLLAQIGDQYADLFLAAKNLSDAILLSDILRVNTEITKAPLSASMIKRYDEHHQDLTLLKALVRQQLPEKYKEIFFDQSKNGYAGYIDGGASQEEFYKFIKPILEKMDGTEELLVKLNREDLLRKQRTFDNGSIPHQIHLGELHAILRRQEDFYPFLKDNREKIEKILTFRIPYYVGPLARGNSRFAWMTRKSEETITPWNFEEVVDKGASAQSFIERMTNFDKNLPNEKVLPKHSLLYEYFTVYNELTKVKYVTEGMRKPAFLSGEQKKAIVDLLFKTNRKVTVKQLKEDYFKKIECFDSVEISGVEDRFNASLGTYHDLLKIIKDKDFLDNEENEDILEDIVLTLTLFEDREMIEERLKTYAHLFDDKVMKQLKRRRYTGWGRLSRKLINGIRDKQSGKTILDFLKSDGFANRNFMQLIHDDSLTFKEDIQKAQVSGQGDSLHEHIANLAGSPAIKKGILQTVKVVDELVKVMGRHKPENIVIEMARENQTTQKGQKNSRERMKRIEEGIKELGSQILKEHPVENTQLQNEKLYLYYLQNGRDMYVDQELDINRLSDYDVDHIVPQSFLKDDSIDNKVLTRSDKARGKSDNVPSEEVVKKMKNYWRQLLNAKLITQRKFDNLTKAERGGLSELDKAGFIKRQLVETRQITKHVAQILDSRMNTKYDENDKLIREVKVITLKSKLVSDFRKDFQFYKVREINNYHHAHDAYLNAVVGTALIKKYPKLESEFVYGDYKVYDVRKMIAKSEQEIGKATAKYFFYSNIMNFFKTEITLANGEIRKRPLIETNGETGEIVWDKGRDFATVRKVLSMPQVNIVKKTEVQTGGFSKESILPKRNSDKLIARKKDWDPKKYGGFDSPTVAYSVLVVAKVEKGKSKKLKSVKELLGITIMERSSFEKNPIDFLEAKGYKEVKKDLIIKLPKYSLFELENGRKRMLASAGELQKGNELALPSKYVNFLYLASHYEKLKGSPEDNEQKQLFVEQHKHYLDEIIEQISEFSKRVILADANLDKVLSAYNKHRDKPIREQAENIIHLFTLTNLGAPAAFKYFDTTIDRKRYTSTKEVLDATLIHQSITGLYETRIDLSQLGGDGGEAAAKGGGGGLLGRDLLTKLKAQIQFSTEGPQVTWEDRPAMCLVLNLEEEYRLHEKPVPPSIDPSWLQLFPMVWAEKAGMGLANQVPPVVVELKSDASPVAVRQYPMSKEAREGIRPHIQRFLDLGILVPCQSPWNTPLLPVKKPGTNDYRPVQDLREVNKRVQDIHPTVPNPYNLLSSLPPSHTWYSVLDLKDAFFCLKLHPNSQPLFAFEWRDPEKGNTGQLTWTRLPQGFKNSPTLFNEALHRDLASFRALNPQVVMLQYVDDLLVAAPTYRDCKEGTRRLLQELSKLGYRVSAKKAQLCREEVTYLGYLLKGGKRWLTPARKATVMKIPTPTTPRQVREFLGTAGFCRLWIPGFASLAAPLYPLTRPKVPFTWTEAHQEAFGRIKEALLSAPALALPDLTKPFALYVDEKEGVARGVLTQTLGPWRRPVAYLSKKLDPVASGWPTCLKAIAAVALLLKDADKLTLGQNVLVIAPHNLESIVRQPPDRWMTNARMTHYQSLLLNERVSFAPPAILNPATLLPVESDDTPIHICSEILAEETGTRPDLRDQPLPGVPAWYTDGSSFIMDGRRQAGAAIVDNKRTVWASNLPEGTSAQKAELIALTQALRLAEGKSINIYTDSRYAFATAHVHGAIYKQRGWLTSAGKDIKNKEEILALLEAIHLPKRVAIIHCPGHQRGTDPVATGNRKADEAAKQAAQSTRILTETTKNAGKRTADGSEFEKRTADGSEFESPKKKAKVE

SEQ ID NO: 6699 - protein, 2093 aa, synthetic construct
MPAAKRVKLDGGDKKYSIGLDIGTNSVGWAVITDEYKVPSKKFKVLGNTDRHSIKKNLIGALLFDSGETAEATRLKRTARRRYTRRKNRICYLQEIFSNEMAKVDDSFFHRLEESFLVEEDKKHERHPIFGNIVDEVAYHEKYPTIYHLRKKLVDSTDKADLRLIYLALAHMIKFRGHFLIEGDLNPDNSDVDKLFIQLVQTYNQLFEENPINASGVDAKAILSARLSKSRRLENLIAQLPGEKKNGLFGNLIALSLGLTPNFKSNFDLAEDAKLQLSKDTYDDDLDNLLAQIGDQYADLFLAAKNLSDAILLSDILRVNTEITKAPLSASMIKRYDEHHQDLTLLKALVRQQLPEKYKEIFFDQSKNGYAGYIDGGASQEEFYKFIKPILEKMDGTEELLVKLNREDLLRKQRTFDNGSIPHQIHLGELHAILRRQEDFYPFLKDNREKIEKILTFRIPYYVGPLARGNSRFAWMTRKSEETITPWNFEEVVDKGASAQSFIERMTNFDKNLPNEKVLPKHSLLYEYFTVYNELTKVKYVTEGMRKPAFLSGEQKKAIVDLLFKTNRKVTVKQLKEDYFKKIECFDSVEISGVEDRFNASLGTYHDLLKIIKDKDFLDNEENEDILEDIVLTLTLFEDREMIEERLKTYAHLFDDKVMKQLKRRRYTGWGRLSRKLINGIRDKQSGKTILDFLKSDGFANRNFMQLIHDDSLTFKEDIQKAQVSGQGDSLHEHIANLAGSPAIKKGILQTVKVVDELVKVMGRHKPENIVIEMARENQTTQKGQKNSRERMKRIEEGIKELGSQILKEHPVENTQLQNEKLYLYYLQNGRDMYVDQELDINRLSDYDVDHIVPQSFLKDDSIDNKVLTRSDKARGKSDNVPSEEVVKKMKNYWRQLLNAKLITQRKFDNLTKAERGGLSELDKAGFIKRQLVETRQITKHVAQILDSRMNTKYDENDKLIREVKVITLKSKLVSDFRKDFQFYKVREINNYHHAHDAYLNAVVGTALIKKYPKLESEFVYGDYKVYDVRKMIAKSEQEIGKATAKYFFYSNIMNFFKTEITLANGEIRKRPLIETNGETGEIVWDKGRDFATVRKVLSMPQVNIVKKTEVQTGGFSKESILPKRNSDKLIARKKDWDPKKYGGFDSPTVAYSVLVVAKVEKGKSKKLKSVKELLGITIMERSSFEKNPIDFLEAKGYKEVKKDLIIKLPKYSLFELENGRKRMLASAGELQKGNELALPSKYVNFLYLASHYEKLKGSPEDNEQKQLFVEQHKHYLDEIIEQISEFSKRVILADANLDKVLSAYNKHRDKPIREQAENIIHLFTLTNLGAPAAFKYFDTTIDRKRYTSTKEVLDATLIHQSITGLYETRIDLSQLGGDGGEAAAKGGGGGTLNIEDEHRLHETSKEPDVSLGSTWLSDFPQAWAETGGMGLAVRQAPLIIPLKATSTPVSIKQYPMSQEARLGIKPHIQRLLDQGILVPCQSPWNTPLLPVKKPGTNDYRPVQDLREVNKRVEDIHPTVPNPYNLLSGLPPSHQWYTVLDLKDAFFCLRLHPTSQPLFAFEWRDPEMGISGQLTWTRLPQGFKNSPTLFDEALHRDLADFRIQHPDLILLQYVDDLLLAATSELDCQQGTRALLQTLGNLGYRASAKKAQICQKQVKYLGYLLKEGQRWLTEARKETVMGQPTPKTPRQLREFLGTAGFCRLWIPGFAEMAAPLYPLTKTGTLFNWGPDQQKAYQEIKQALLTAPALGLPDLTKPFELFVDEKQGYAKGVLTQKLGPWRRPVAYLSKKLDPVAAGWPPCLRMVAAIAVLTKDAGKLTMGQPLVILAPHAVEALVKQPPDRWLSNARMTHYQALLLDTDRVQFGPVVALNPATLLPLPEEGLQHNCLDILAEAHGTRPDLTDQPLPDADHTWYTDGSSLLQEGQRKAGAAVTTETEVIWAKALPAGTSAQRAELIALTQALKMAEGKKLNVYTDSRYAFATAHIHGEIYRRRGLLTSEGKEIKNKDEILALLKALFLPKRLSIIHCPGHQKGHSAEARGNRMADQAARKAAITETPDTSTLLAGKRTADGSEFEKRTADGSEFESPKKKAKVE

SEQ ID NO: 6700 - protein, 2084 aa, synthetic construct
MPAAKRVKLDGGDKKYSIGLDIGTNSVGWAVITDEYKVPSKKFKVLGNTDRHSIKKNLIGALLFDSGETAEATRLKRTARRRYTRRKNRICYLQEIFSNEMAKVDDSFFHRLEESFLVEEDKKHERHPIFGNIVDEVAYHEKYPTIYHLRKKLVDSTDKADLRLIYLALAHMIKFRGHFLIEGDLNPDNSDVDKLFIQLVQTYNQLFEENPINASGVDAKAILSARLSKSRRLENLIAQLPGEKKNGLFGNLIALSLGLTPNFKSNFDLAEDAKLQLSKDTYDDDLDNLLAQIGDQYADLFLAAKNLSDAILLSDILRVNTEITKAPLSASMIKRYDEHHQDLTLLKALVRQQLPEKYKEIFFDQSKNGYAGYIDGGASQEEFYKFIKPILEKMDGTEELLVKLNREDLLRKQRTFDNGSIPHQIHLGELHAILRRQEDFYPFLKDNREKIEKILTFRIPYYVGPLARGNSRFAWMTRKSEETITPWNFEEVVDKGASAQSFIERMTNFDKNLPNEKVLPKHSLLYEYFTVYNELTKVKYVTEGMRKPAFLSGEQKKAIVDLLFKTNRKVTVKQLKEDYFKKIECFDSVEISGVEDRFNASLGTYHDLLKIIKDKDFLDNEENEDILEDIVLTLTLFEDREMIEERLKTYAHLFDDKVMKQLKRRRYTGWGRLSRKLINGIRDKQSGKTILDFLKSDGFANRNFMQLIHDDSLTFKEDIQKAQVSGQGDSLHEHIANLAGSPAIKKGILQTVKVVDELVKVMGRHKPENIVIEMARENQTTQKGQKNSRERMKRIEEGIKELGSQILKEHPVENTQLQNEKLYLYYLQNGRDMYVDQELDINRLSDYDVDHIVPQSFLKDDSIDNKVLTRSDKARGKSDNVPSEEVVKKMKNYWRQLLNAKLITQRKFDNLTKAERGGLSELDKAGFIKRQLVETRQITKHVAQILDSRMNTKYDENDKLIREVKVITLKSKLVSDFRKDFQFYKVREINNYHHAHDAYLNAVVGTALIKKYPKLESEFVYGDYKVYDVRKMIAKSEQEIGKATAKYFFYSNIMNFFKTEITLANGEIRKRPLIETNGETGEIVWDKGRDFATVRKVLSMPQVNIVKKTEVQTGGFSKESILPKRNSDKLIARKKDWDPKKYGGFDSPTVAYSVLVVAKVEKGKSKKLKSVKELLGITIMERSSFEKNPIDFLEAKGYKEVKKDLIIKLPKYSLFELENGRKRMLASAGELQKGNELALPSKYVNFLYLASHYEKLKGSPEDNEQKQLFVEQHKHYLDEIIEQISEFSKRVILADANLDKVLSAYNKHRDKPIREQAENIIHLFTLTNLGAPAAFKYFDTTIDRKRYTSTKEVLDATLIHQSITGLYETRIDLSQLGGDGGEAAAKGGGGGVPWLMKKPLQLTVLVPLHEYQERLLQQTALPKEQKELLQKLFLKYDALWQHWENQVGHRRIKPHNIATGTLAPRPQKQYPINPKAKPSIQIVIDDLLKQGVLIQQNSTMNTPVYPVPKPDGKWRMVLDYREVNKTIPLIAAQNQHSAGILSSIYRGKYKTTLDLTNGFWAHPITPESYWLTAFTWQGKQYCWTRLPQGFLNSPALFTADVVDLLKEIPNVQAYVDDIYISHDDPQEHLEQLEKIFSILLNAGYVVSLKKSEIAQREVEFLGFNITKEGRGLTDTFKQKLLNITPPKDLKQLQSILGLLNFARNFIPNYSELVKPLYTIVANANGKFISWTEDNSNQLQHIISVLNQADNLEERNPETRLIIKVNSSPSAGYIRYYNEGSKRPIMYVNYIFSKAEAKFTQTEKLLTTMHKGLIKAMDLAMGQEILVYSPIVSMTKIQRTPLPERKALPVRWITWMTYLEDPRIQFHYDKSLPELQQIPNVTEDVIAKTKHPSEFAMVFYTDGSAIKHPDVNKSHSAGMGIAQVQFIPEYKIVHQWSIPLGDHTAQLAEIAAVEFACKKALKISGPVLIVTDSFYVAESANKELPYWKSNGFLNNKKKPLRHVSKWKSIAECLQLKPDIIIMHEKGHQQPMTTLHTEGNNLADKLATQGSYVVHAGKRTADGSEFEKRTADGSEFESPKKKAKVE

SEQ ID NO: 6701 - protein, 2173 aa, synthetic construct
MPAAKRVKLDGGDKKYSIGLDIGTNSVGWAVITDEYKVPSKKFKVLGNTDRHSIKKNLIGALLFDSGETAEATRLKRTARRRYTRRKNRICYLQEIFSNEMAKVDDSFFHRLEESFLVEEDKKHERHPIFGNIVDEVAYHEKYPTIYHLRKKLVDSTDKADLRLIYLALAHMIKFRGHFLIEGDLNPDNSDVDKLFIQLVQTYNQLFEENPINASGVDAKAILSARLSKSRRLENLIAQLPGEKKNGLFGNLIALSLGLTPNFKSNFDLAEDAKLQLSKDTYDDDLDNLLAQIGDQYADLFLAAKNLSDAILLSDILRVNTEITKAPLSASMIKRYDEHHQDLTLLKALVRQQLPEKYKEIFFDQSKNGYAGYIDGGASQEEFYKFIKPILEKMDGTEELLVKLNREDLLRKQRTFDNGSIPHQIHLGELHAILRRQEDFYPFLKDNREKIEKILTFRIPYYVGPLARGNSRFAWMTRKSEETITPWNFEEVVDKGASAQSFIERMTNFDKNLPNEKVLPKHSLLYEYFTVYNELTKVKYVTEGMRKPAFLSGEQKKAIVDLLFKTNRKVTVKQLKEDYFKKIECFDSVEISGVEDRFNASLGTYHDLLKIIKDKDFLDNEENEDILEDIVLTLTLFEDREMIEERLKTYAHLFDDKVMKQLKRRRYTGWGRLSRKLINGIRDKQSGKTILDFLKSDGFANRNFMQLIHDDSLTFKEDIQKAQVSGQGDSLHEHIANLAGSPAIKKGILQTVKVVDELVKVMGRHKPENIVIEMARENQTTQKGQKNSRERMKRIEEGIKELGSQILKEHPVENTQLQNEKLYLYYLQNGRDMYVDQELDINRLSDYDVDHIVPQSFLKDDSIDNKVLTRSDKARGKSDNVPSEEVVKKMKNYWRQLLNAKLITQRKFDNLTKAERGGLSELDKAGFIKRQLVETRQITKHVAQILDSRMNTKYDENDKLIREVKVITLKSKLVSDFRKDFQFYKVREINNYHHAHDAYLNAVVGTALIKKYPKLESEFVYGDYKVYDVRKMIAKSEQEIGKATAKYFFYSNIMNFFKTEITLANGEIRKRPLIETNGETGEIVWDKGRDFATVRKVLSMPQVNIVKKTEVQTGGFSKESILPKRNSDKLIARKKDWDPKKYGGFDSPTVAYSVLVVAKVEKGKSKKLKSVKELLGITIMERSSFEKNPIDFLEAKGYKEVKKDLIIKLPKYSLFELENGRKRMLASAGELQKGNELALPSKYVNFLYLASHYEKLKGSPEDNEQKQLFVEQHKHYLDEIIEQISEFSKRVILADANLDKVLSAYNKHRDKPIREQAENIIHLFTLTNLGAPAAFKYFDTTIDRKRYTSTKEVLDATLIHQSITGLYETRIDLSQLGGDGGEAAAKGGGGGMDPLQLLQPLEAEIKGTKLKAHWNSGATITCVPQAFLEEEVPIKNIWIKTIHGEKEQPVYYLTFKIQGRKVEAEVISSPYDYILVSPSDIPWLMKKPLQLTTLVPLQEYEERLLKQTMLTGSYKEKLQSLFLKYDALWQHWENQVGHRRIKPHHIATGTVNPRPQKQYPINPKAKASIQTVINDLLKQGVLIQQNSIMNTPVYPVPKPDGKWRMVLDYREVNKTIPLIAAQNQHSAGILSSIFRGKYKTTLDLSNGFWAHSITPESYWLTAFTWLGQQYCWTRLPQGFLNSPALFNADVVDLLKEVPNVQVYVDDIYISHDDPREHLEQLEKVFSLLLNAGYVVSLKKSEIAQHEVEFLGFNITKEGRGLTETFKQKLLNITPPRDLKQLQSILGKLNFARNFIPNFSELVKPLYNIIATAPGKYITWTTDNSQQLQNIISMLNSAENLEERNPEVRLIMKVNTSPSAGYIRFYNEFAKRPIMYLNYVYTKAEVKFTNTEKLLTTIHKGLIKALDLGMGQEILVYSPIVSMTKIQKTPLPERKALPIRWITWMSYLEDPRIQFHYDKTLPELQQVPTVTDDIIAKIKHPSEFSMVFYTDGSAIKHPNVNKSHNAGMGIAQVQFKPEFTVINTWSIPLGDHTAQLAEVAAVEFACKKALKIDGPVLIVTDSFYVAESVNKELPYWQSNGFFNNKKKPLKHVSKWKSIADCIQLKPDIIIIHEKGHQPTASTFHTEGNNLADKLATQGSYVVNAGKRTADGSEFEKRTADGSEFESPKKKAKVE

SEQ ID NO: 6702 - protein, 2091 aa, synthetic construct
MPAAKRVKLDGGDKKYSIGLDIGTNSVGWAVITDEYKVPSKKFKVLGNTDRHSIKKNLIGALLFDSGETAEATRLKRTARRRYTRRKNRICYLQEIFSNEMAKVDDSFFHRLEESFLVEEDKKHERHPIFGNIVDEVAYHEKYPTIYHLRKKLVDSTDKADLRLIYLALAHMIKFRGHFLIEGDLNPDNSDVDKLFIQLVQTYNQLFEENPINASGVDAKAILSARLSKSRRLENLIAQLPGEKKNGLFGNLIALSLGLTPNFKSNFDLAEDAKLQLSKDTYDDDLDNLLAQIGDQYADLFLAAKNLSDAILLSDILRVNTEITKAPLSASMIKRYDEHHQDLTLLKALVRQQLPEKYKEIFFDQSKNGYAGYIDGGASQEEFYKFIKPILEKMDGTEELLVKLNREDLLRKQRTFDNGSIPHQIHLGELHAILRRQEDFYPFLKDNREKIEKILTFRIPYYVGPLARGNSRFAWMTRKSEETITPWNFEEVVDKGASAQSFIERMTNFDKNLPNEKVLPKHSLLYEYFTVYNELTKVKYVTEGMRKPAFLSGEQKKAIVDLLFKTNRKVTVKQLKEDYFKKIECFDSVEISGVEDRFNASLGTYHDLLKIIKDKDFLDNEENEDILEDIVLTLTLFEDREMIEERLKTYAHLFDDKVMKQLKRRRYTGWGRLSRKLINGIRDKQSGKTILDFLKSDGFANRNFMQLIHDDSLTFKEDIQKAQVSGQGDSLHEHIANLAGSPAIKKGILQTVKVVDELVKVMGRHKPENIVIEMARENQTTQKGQKNSRERMKRIEEGIKELGSQILKEHPVENTQLQNEKLYLYYLQNGRDMYVDQELDINRLSDYDVDHIVPQSFLKDDSIDNKVLTRSDKARGKSDNVPSEEVVKKMKNYWRQLLNAKLITQRKFDNLTKAERGGLSELDKAGFIKRQLVETRQITKHVAQILDSRMNTKYDENDKLIREVKVITLKSKLVSDFRKDFQFYKVREINNYHHAHDAYLNAVVGTALIKKYPKLESEFVYGDYKVYDVRKMIAKSEQEIGKATAKYFFYSNIMNFFKTEITLANGEIRKRPLIETNGETGEIVWDKGRDFATVRKVLSMPQVNIVKKTEVQTGGFSKESILPKRNSDKLIARKKDWDPKKYGGFDSPTVAYSVLVVAKVEKGKSKKLKSVKELLGITIMERSSFEKNPIDFLEAKGYKEVKKDLIIKLPKYSLFELENGRKRMLASAGELQKGNELALPSKYVNFLYLASHYEKLKGSPEDNEQKQLFVEQHKHYLDEIIEQISEFSKRVILADANLDKVLSAYNKHRDKPIREQAENIIHLFTLTNLGAPAAFKYFDTTIDRKRYTSTKEVLDATLIHQSITGLYETRIDLSQLGGDGGEAAAKGGGGGVLNLEEEYRLHEKPVPSSIDPSWLQLFPTVWAERAGMGLANQVPPVVVELRSGASPVAVRQYPMSKEAREGIRPHIQRFLDLGVLVPCQSPWNTPLLPVKKPGTNDYRPVQDLREINKRVQDIHPTVPNPYNLLSSLPPSHTWYSVLDLKDAFFCLKLHPNSQPLFAFEWRDPEKGNTGQLTWTRLPQGFKNSPTLFDEALHRDLAPFRALNPQVVLLQYVDDLLVAAPTYRDCKEGTQKLLQELSKLGYRVSAKKAQLCQKEVTYLGYLLKEGKRWLTPARKATVMKIPPPTTPRQVREFLGTAGFCRLWIPGFASLAAPLYPLTKESIPFIWTEEHQKAFDRIKEALLSAPALALPDLTKPFTLYVDERAGVARGVLTQTLGPWRRPVAYLSKKLDPVASGWPTCLKAVAAVALLLKDADKLTLGQNVTVIASHSLESIVRQPPDRWMTNARMTHYQSLLLNERVSFAPPAVLNPATLLPVESEATPVHRCSEILAEETGTRRDLKDQPLPGVPAWYTDGSSFIAEGKRRAGAAIVDGKRTVWASSLPEGTSAQKAELVALTQALRLAEGKDINIYTDSRYAFATAHIHGAIYKQRGLLTSAGKDIKNKEEILALLEAIHLPKRVAIIHCPGHQKGNDPVATGNRRADEAAKQAALSTRVLAETTKPAGKRTADGSEFEKRTADGSEFESPKKKAKVE

SEQ ID NO: 6703 - protein, 2093 aa, synthetic construct
MPAAKRVKLDGGDKKYSIGLDIGTNSVGWAVITDEYKVPSKKFKVLGNTDRHSIKKNLIGALLFDSGETAEATRLKRTARRRYTRRKNRICYLQEIFSNEMAKVDDSFFHRLEESFLVEEDKKHERHPIFGNIVDEVAYHEKYPTIYHLRKKLVDSTDKADLRLIYLALAHMIKFRGHFLIEGDLNPDNSDVDKLFIQLVQTYNQLFEENPINASGVDAKAILSARLSKSRRLENLIAQLPGEKKNGLFGNLIALSLGLTPNFKSNFDLAEDAKLQLSKDTYDDDLDNLLAQIGDQYADLFLAAKNLSDAILLSDILRVNTEITKAPLSASMIKRYDEHHQDLTLLKALVRQQLPEKYKEIFFDQSKNGYAGYIDGGASQEEFYKFIKPILEKMDGTEELLVKLNREDLLRKQRTFDNGSIPHQIHLGELHAILRRQEDFYPFLKDNREKIEKILTFRIPYYVGPLARGNSRFAWMTRKSEETITPWNFEEVVDKGASAQSFIERMTNFDKNLPNEKVLPKHSLLYEYFTVYNELTKVKYVTEGMRKPAFLSGEQKKAIVDLLFKTNRKVTVKQLKEDYFKKIECFDSVEISGVEDRFNASLGTYHDLLKIIKDKDFLDNEENEDILEDIVLTLTLFEDREMIEERLKTYAHLFDDKVMKQLKRRRYTGWGRLSRKLINGIRDKQSGKTILDFLKSDGFANRNFMQLIHDDSLTFKEDIQKAQVSGQGDSLHEHIANLAGSPAIKKGILQTVKVVDELVKVMGRHKPENIVIEMARENQTTQKGQKNSRERMKRIEEGIKELGSQILKEHPVENTQLQNEKLYLYYLQNGRDMYVDQELDINRLSDYDVDHIVPQSFLKDDSIDNKVLTRSDKARGKSDNVPSEEVVKKMKNYWRQLLNAKLITQRKFDNLTKAERGGLSELDKAGFIKRQLVETRQITKHVAQILDSRMNTKYDENDKLIREVKVITLKSKLVSDFRKDFQFYKVREINNYHHAHDAYLNAVVGTALIKKYPKLESEFVYGDYKVYDVRKMIAKSEQEIGKATAKYFFYSNIMNFFKTEITLANGEIRKRPLIETNGETGEIVWDKGRDFATVRKVLSMPQVNIVKKTEVQTGGFSKESILPKRNSDKLIARKKDWDPKKYGGFDSPTVAYSVLVVAKVEKGKSKKLKSVKELLGITIMERSSFEKNPIDFLEAKGYKEVKKDLIIKLPKYSLFELENGRKRMLASAGELQKGNELALPSKYVNFLYLASHYEKLKGSPEDNEQKQLFVEQHKHYLDEIIEQISEFSKRVILADANLDKVLSAYNKHRDKPIREQAENIIHLFTLTNLGAPAAFKYFDTTIDRKRYTSTKEVLDATLIHQSITGLYETRIDLSQLGGDGGGGGPAPGGTAPLEEEYRLFLEAPIQNVTLLEQWKREIPKVWAEINPPGLASTQAPIHVQLLSTALPVRVRQYPITLEAKRSLRETIRKFRAAGILRPVHSPWNTPLLPVRKSGTSEYRMVQDLREVNKRVETIHPTVPNPYTLLSLLPPDRIWYSVLDLKDAFFCIPLAPESQLIFAFEWADAEEGESGQLTWTRLPQGFKNSPTLFNEALNRDLQGFRLDHPSVSLLQYVDDLLIAADTQAACLSATRDLLMTLAELGYRVSGKKAQLCQEEVTYLGFKIHKGSRSLSNSRTQAILQIPVPKTKRQVREFLGTIGYCRLWIPGFAELAQPLYAATRPGNDPLVWGEKEEEAFQSLKLALTQPPALALPSLDKPFQLFVEETSGAAKGVLTQALGPWKRPVAYLSKRLDPVAAGWPRCLRAIAAAALLTREASKLTFGQDIEITSSHNLESLLRSPPDKWLTNARITQYQVLLLDPPRVRFKQTAALNPATLLPETDDTLPIHHCLDTLDSLTSTRPDLTDQPLAQAEATLFTDGSSYIRDGKRYAGAAVVTLDSVIWAEPLPIGTSAQKAELIALTKALEWSKDKSVNIYTDSRYAFATLHVHGMIYRERGWLTAGGKAIKNAPEILALLTAVWLPKRVAVMHCKGHQKDDAPTSTGNRRADEVAREVAIRPLSTQATISAGKRTADGSEFEKRTADGSEFESPKKKAKVE

SEQ ID NO: 6704 - protein, 2082 aa, synthetic construct
MPAAKRVKLDGGDKKYSIGLDIGTNSVGWAVITDEYKVPSKKFKVLGNTDRHSIKKNLIGALLFDSGETAEATRLKRTARRRYTRRKNRICYLQEIFSNEMAKVDDSFFHRLEESFLVEEDKKHERHPIFGNIVDEVAYHEKYPTIYHLRKKLVDSTDKADLRLIYLALAHMIKFRGHFLIEGDLNPDNSDVDKLFIQLVQTYNQLFEENPINASGVDAKAILSARLSKSRRLENLIAQLPGEKKNGLFGNLIALSLGLTPNFKSNFDLAEDAKLQLSKDTYDDDLDNLLAQIGDQYADLFLAAKNLSDAILLSDILRVNTEITKAPLSASMIKRYDEHHQDLTLLKALVRQQLPEKYKEIFFDQSKNGYAGYIDGGASQEEFYKFIKPILEKMDGTEELLVKLNREDLLRKQRTFDNGSIPHQIHLGELHAILRRQEDFYPFLKDNREKIEKILTFRIPYYVGPLARGNSRFAWMTRKSEETITPWNFEEVVDKGASAQSFIERMTNFDKNLPNEKVLPKHSLLYEYFTVYNELTKVKYVTEGMRKPAFLSGEQKKAIVDLLFKTNRKVTVKQLKEDYFKKIECFDSVEISGVEDRFNASLGTYHDLLKIIKDKDFLDNEENEDILEDIVLTLTLFEDREMIEERLKTYAHLFDDKVMKQLKRRRYTGWGRLSRKLINGIRDKQSGKTILDFLKSDGFANRNFMQLIHDDSLTFKEDIQKAQVSGQGDSLHEHIANLAGSPAIKKGILQTVKVVDELVKVMGRHKPENIVIEMARENQTTQKGQKNSRERMKRIEEGIKELGSQILKEHPVENTQLQNEKLYLYYLQNGRDMYVDQELDINRLSDYDVDHIVPQSFLKDDSIDNKVLTRSDKARGKSDNVPSEEVVKKMKNYWRQLLNAKLITQRKFDNLTKAERGGLSELDKAGFIKRQLVETRQITKHVAQILDSRMNTKYDENDKLIREVKVITLKSKLVSDFRKDFQFYKVREINNYHHAHDAYLNAVVGTALIKKYPKLESEFVYGDYKVYDVRKMIAKSEQEIGKATAKYFFYSNIMNFFKTEITLANGEIRKRPLIETNGETGEIVWDKGRDFATVRKVLSMPQVNIVKKTEVQTGGFSKESILPKRNSDKLIARKKDWDPKKYGGFDSPTVAYSVLVVAKVEKGKSKKLKSVKELLGITIMERSSFEKNPIDFLEAKGYKEVKKDLIIKLPKYSLFELENGRKRMLASAGELQKGNELALPSKYVNFLYLASHYEKLKGSPEDNEQKQLFVEQHKHYLDEIIEQISEFSKRVILADANLDKVLSAYNKHRDKPIREQAENIIHLFTLTNLGAPAAFKYFDTTIDRKRYTSTKEVLDATLIHQSITGLYETRIDLSQLGGDGGGGGPAPGGVPWILKKPLELTIKLDLEEQQGTLLNNSILSKKGKEELKQLFEKYSALWQSWENQVGHRRIRPHKIATGTVKPTPQKQYHINPKAKPDIQIVINDLLKQGVLIQKESTMNTPVYPVPKPNGRWRMVLDYRAVNKVTPLIAVQNQHSYGILGSLFKGRYKTTIDLSNGFWAHPIVPEDYWITAFTWQGKQYCWTVLPQGFLNSPGLFTGDVVDLLQGIPNVEVYVDDVYISHDSEKEHLEYLDILFNRLKEAGYIISLKKSNIANSIVDFLGFQITNEGRGLTDTFKEKLENITAPTTLKQLQSILGLLNFARNFIPDFTELIAPLYALIPKSTKNYVPWQIEHSTTLETLITKLNGAEYLQGRKGDKTLIMKVNASYTTGYIRYYNEGEKKPISYVSIVFSKTELKFTELEKLLTTVHKGLLKALDLSMGQNIHVYSPIVSMQNIQKTPQTAKKALASRWLSWLSYLEDPRIRFFYDPQMPALKDLPAVDTGKDNKKHPSNFQHIFYTDGSAITSPTKEGHLNAGMGIVYFINKDGNLQKQQEWSISLGNHTAQFAEIAAFEFALKKCLPLGGNILVVTDSNYVAKAYNEELDVWASNGFVNNRKKPLKHISKWKSVADLKRLRPDVVVTHEPGHQKLDSSPHAYGNNLADQLATQASFKVHAGKRTADGSEFEKRTADGSEFESPKKKAKVE

SEQ ID NO: 6705 - protein, 2213 aa, synthetic construct
MPAAKRVKLDGGDKKYSIGLDIGTNSVGWAVITDEYKVPSKKFKVLGNTDRHSIKKNLIGALLFDSGETAEATRLKRTARRRYTRRKNRICYLQEIFSNEMAKVDDSFFHRLEESFLVEEDKKHERHPIFGNIVDEVAYHEKYPTIYHLRKKLVDSTDKADLRLIYLALAHMIKFRGHFLIEGDLNPDNSDVDKLFIQLVQTYNQLFEENPINASGVDAKAILSARLSKSRRLENLIAQLPGEKKNGLFGNLIALSLGLTPNFKSNFDLAEDAKLQLSKDTYDDDLDNLLAQIGDQYADLFLAAKNLSDAILLSDILRVNTEITKAPLSASMIKRYDEHHQDLTLLKALVRQQLPEKYKEIFFDQSKNGYAGYIDGGASQEEFYKFIKPILEKMDGTEELLVKLNREDLLRKQRTFDNGSIPHQIHLGELHAILRRQEDFYPFLKDNREKIEKILTFRIPYYVGPLARGNSRFAWMTRKSEETITPWNFEEVVDKGASAQSFIERMTNFDKNLPNEKVLPKHSLLYEYFTVYNELTKVKYVTEGMRKPAFLSGEQKKAIVDLLFKTNRKVTVKQLKEDYFKKIECFDSVEISGVEDRFNASLGTYHDLLKIIKDKDFLDNEENEDILEDIVLTLTLFEDREMIEERLKTYAHLFDDKVMKQLKRRRYTGWGRLSRKLINGIRDKQSGKTILDFLKSDGFANRNFMQLIHDDSLTFKEDIQKAQVSGQGDSLHEHIANLAGSPAIKKGILQTVKVVDELVKVMGRHKPENIVIEMARENQTTQKGQKNSRERMKRIEEGIKELGSQILKEHPVENTQLQNEKLYLYYLQNGRDMYVDQELDINRLSDYDVDHIVPQSFLKDDSIDNKVLTRSDKARGKSDNVPSEEVVKKMKNYWRQLLNAKLITQRKFDNLTKAERGGLSELDKAGFIKRQLVETRQITKHVAQILDSRMNTKYDENDKLIREVKVITLKSKLVSDFRKDFQFYKVREINNYHHAHDAYLNAVVGTALIKKYPKLESEFVYGDYKVYDVRKMIAKSEQEIGKATAKYFFYSNIMNFFKTEITLANGEIRKRPLIETNGETGEIVWDKGRDFATVRKVLSMPQVNIVKKTEVQTGGFSKESILPKRNSDKLIARKKDWDPKKYGGFDSPTVAYSVLVVAKVEKGKSKKLKSVKELLGITIMERSSFEKNPIDFLEAKGYKEVKKDLIIKLPKYSLFELENGRKRMLASAGELQKGNELALPSKYVNFLYLASHYEKLKGSPEDNEQKQLFVEQHKHYLDEIIEQISEFSKRVILADANLDKVLSAYNKHRDKPIREQAENIIHLFTLTNLGAPAAFKYFDTTIDRKRYTSTKEVLDATLIHQSITGLYETRIDLSQLGGDGGGGGPAPGGTLGDQGSRGSDPLPEPRVTLTVEGIPTEFLVNTGAEHSVLTKPMGKMGSKRTVVAGATGSKVYPWTTKRLLKIGQKQVTHSFLVIPECPAPLLGRDLLTKLKAQIQFSTEGPQVTWEDRPAMCLVLNLEEEYRLHEKPVPPSIDPSWLQLFPMVWAEKAGMGLANQVPPVVVELKSDASPVAVRQYPMSKEAREGIRPHIQRFLDLGILVPCQSPWNTPLLPVKKPGTNDYRPVQDLREVNKRVQDIHPTVPNPYNLLSSLPPSHTWYSVLDLKDAFFCLKLHPNSQPLFAFEWRDPEKGNTGQLTWTRLPQGFKNSPTLFNEALHRDLASFRALNPQVVMLQYVDDLLVAAPTYRDCKEGTRRLLQELSKLGYRVSAKKAQLCREEVTYLGYLLKGGKRWLTPARKATVMKIPTPTTPRQVREFLGTAGFCRLWIPGFASLAAPLYPLTRPKVPFTWTEAHQEAFGRIKEALLSAPALALPDLTKPFALYVDEKEGVARGVLTQTLGPWRRPVAYLSKKLDPVASGWPTCLKAIAAVALLLKDADKLTLGQNVLVIAPHNLESIVRQPPDRWMTNARMTHYQSLLLNERVSFAPPAILNPATLLPVESDDTPIHICSEILAEETGTRPDLRDQPLPGVPAWYTDGSSFIMDGRRQAGAAIVDNKRTVWASNLPEGTSAQKAELIALTQALRLAEGKSINIYTDSRYAFATAHVHGAIYKQRGWLTSAGKDIKNKEEILALLEAIHLPKRVAIIHCPGHQRGTDPVATGNRKADEAAKQAAQSTRILTETTKNAGKRTADGSEFEKRTADGSEFESPKKKAKVE

SEQ ID NO: 6706 - protein, 2091 aa, synthetic construct
MPAAKRVKLDGGDKKYSIGLDIGTNSVGWAVITDEYKVPSKKFKVLGNTDRHSIKKNLIGALLFDSGETAEATRLKRTARRRYTRRKNRICYLQEIFSNEMAKVDDSFFHRLEESFLVEEDKKHERHPIFGNIVDEVAYHEKYPTIYHLRKKLVDSTDKADLRLIYLALAHMIKFRGHFLIEGDLNPDNSDVDKLFIQLVQTYNQLFEENPINASGVDAKAILSARLSKSRRLENLIAQLPGEKKNGLFGNLIALSLGLTPNFKSNFDLAEDAKLQLSKDTYDDDLDNLLAQIGDQYADLFLAAKNLSDAILLSDILRVNTEITKAPLSASMIKRYDEHHQDLTLLKALVRQQLPEKYKEIFFDQSKNGYAGYIDGGASQEEFYKFIKPILEKMDGTEELLVKLNREDLLRKQRTFDNGSIPHQIHLGELHAILRRQEDFYPFLKDNREKIEKILTFRIPYYVGPLARGNSRFAWMTRKSEETITPWNFEEVVDKGASAQSFIERMTNFDKNLPNEKVLPKHSLLYEYFTVYNELTKVKYVTEGMRKPAFLSGEQKKAIVDLLFKTNRKVTVKQLKEDYFKKIECFDSVEISGVEDRFNASLGTYHDLLKIIKDKDFLDNEENEDILEDIVLTLTLFEDREMIEERLKTYAHLFDDKVMKQLKRRRYTGWGRLSRKLINGIRDKQSGKTILDFLKSDGFANRNFMQLIHDDSLTFKEDIQKAQVSGQGDSLHEHIANLAGSPAIKKGILQTVKVVDELVKVMGRHKPENIVIEMARENQTTQKGQKNSRERMKRIEEGIKELGSQILKEHPVENTQLQNEKLYLYYLQNGRDMYVDQELDINRLSDYDVDHIVPQSFLKDDSIDNKVLTRSDKARGKSDNVPSEEVVKKMKNYWRQLLNAKLITQRKFDNLTKAERGGLSELDKAGFIKRQLVETRQITKHVAQILDSRMNTKYDENDKLIREVKVITLKSKLVSDFRKDFQFYKVREINNYHHAHDAYLNAVVGTALIKKYPKLESEFVYGDYKVYDVRKMIAKSEQEIGKATAKYFFYSNIMNFFKTEITLANGEIRKRPLIETNGETGEIVWDKGRDFATVRKVLSMPQVNIVKKTEVQTGGFSKESILPKRNSDKLIARKKDWDPKKYGGFDSPTVAYSVLVVAKVEKGKSKKLKSVKELLGITIMERSSFEKNPIDFLEAKGYKEVKKDLIIKLPKYSLFELENGRKRMLASAGELQKGNELALPSKYVNFLYLASHYEKLKGSPEDNEQKQLFVEQHKHYLDEIIEQISEFSKRVILADANLDKVLSAYNKHRDKPIREQAENIIHLFTLTNLGAPAAFKYFDTTIDRKRYTSTKEVLDATLIHQSITGLYETRIDLSQLGGDGGGGGPAPGGTLNLEDEYRLYETSAEPEVSPGSTWLSDFPQAWAETGGMGLAVRQAPLIIPLKATSTPVSIKQYPMSQEAKLGIKPHIQRLLDQGILVPCQSPWNTPLLPVKKPGTNDYRPVQDLREVNKRVEDIHPTVPNPYNLLSGLPPSHRWYTVLDLKDAFFCLRLHPTSQPLFAFEWRDPGMGISGQLTWTRLPQGFKNSPTLFNEALHRDLADFRIQHPDLILLQYVDDILLAATSELDCQQGTRALLLTLGNLGYRASAKKAQLCQKQVKYLGYLLKEGQRWLTEARKETVMGQPTPKTPRQLREFLGKAGFCRLFIPGFAEMAAPLYPLTKPGTLFNWGPDQQKAYQEIKQALLTAPALGLPDLTKPFELFVDEKQGYAKGVLTQKLGPWRRPVAYLSKKLDPVAAGWPPCLRMVAAIAVLRKDAGKLTMGQPLVILAPHAVEALVKQPPDRWLSNARMTHYQAMLLDTDRVQFGPVVALNPATLLPLPEEGAPHDCLEILAETHGTRPDLTDQPIPDADHTWYTDGSSFLQEGQRKAGAAVTTETEVIWARALPAGTSAQRAELIALTQALKMAEGKRLNVYTDSRYAFATAHIHGEIYRRRGWLTSEGREIKNKSEILALLKALFLPKRLSIIHCLGHQKGDSAEARGNRLADQAAREAAIKTPPDTSTLLAGKRTADGSEFEKRTADGSEFESPKKKAKVE

SEQ ID NO: 6707 - protein, 2091 aa, synthetic construct
MPAAKRVKLDGGDKKYSIGLDIGTNSVGWAVITDEYKVPSKKFKVLGNTDRHSIKKNLIGALLFDSGETAEATRLKRTARRRYTRRKNRICYLQEIFSNEMAKVDDSFFHRLEESFLVEEDKKHERHPIFGNIVDEVAYHEKYPTIYHLRKKLVDSTDKADLRLIYLALAHMIKFRGHFLIEGDLNPDNSDVDKLFIQLVQTYNQLFEENPINASGVDAKAILSARLSKSRRLENLIAQLPGEKKNGLFGNLIALSLGLTPNFKSNFDLAEDAKLQLSKDTYDDDLDNLLAQIGDQYADLFLAAKNLSDAILLSDILRVNTEITKAPLSASMIKRYDEHHQDLTLLKALVRQQLPEKYKEIFFDQSKNGYAGYIDGGASQEEFYKFIKPILEKMDGTEELLVKLNREDLLRKQRTFDNGSIPHQIHLGELHAILRRQEDFYPFLKDNREKIEKILTFRIPYYVGPLARGNSRFAWMTRKSEETITPWNFEEVVDKGASAQSFIERMTNFDKNLPNEKVLPKHSLLYEYFTVYNELTKVKYVTEGMRKPAFLSGEQKKAIVDLLFKTNRKVTVKQLKEDYFKKIECFDSVEISGVEDRFNASLGTYHDLLKIIKDKDFLDNEENEDILEDIVLTLTLFEDREMIEERLKTYAHLFDDKVMKQLKRRRYTGWGRLSRKLINGIRDKQSGKTILDFLKSDGFANRNFMQLIHDDSLTFKEDIQKAQVSGQGDSLHEHIANLAGSPAIKKGILQTVKVVDELVKVMGRHKPENIVIEMARENQTTQKGQKNSRERMKRIEEGIKELGSQILKEHPVENTQLQNEKLYLYYLQNGRDMYVDQELDINRLSDYDVDHIVPQSFLKDDSIDNKVLTRSDKARGKSDNVPSEEVVKKMKNYWRQLLNAKLITQRKFDNLTKAERGGLSELDKAGFIKRQLVETRQITKHVAQILDSRMNTKYDENDKLIREVKVITLKSKLVSDFRKDFQFYKVREINNYHHAHDAYLNAVVGTALIKKYPKLESEFVYGDYKVYDVRKMIAKSEQEIGKATAKYFFYSNIMNFFKTEITLANGEIRKRPLIETNGETGEIVWDKGRDFATVRKVLSMPQVNIVKKTEVQTGGFSKESILPKRNSDKLIARKKDWDPKKYGGFDSPTVAYSVLVVAKVEKGKSKKLKSVKELLGITIMERSSFEKNPIDFLEAKGYKEVKKDLIIKLPKYSLFELENGRKRMLASAGELQKGNELALPSKYVNFLYLASHYEKLKGSPEDNEQKQLFVEQHKHYLDEIIEQISEFSKRVILADANLDKVLSAYNKHRDKPIREQAENIIHLFTLTNLGAPAAFKYFDTTIDRKRYTSTKEVLDATLIHQSITGLYETRIDLSQLGGDGGGGGPAPGGTLGIEDEYRLHETSTEPDVSLGSTWLSDFPQAWAETGGMGLAVRQAPLIIPLKATSTPVSIQQYPMSHEARLGIKPHIQRLLDQGILVPCQSPWNTPLLPVKKPGTNDYRPVQDLREVNKRVEDIHPTVPNPYNLLSGLPPSHQWYTVLDLKDAFFCLRLHPTSQPLFAFEWRDPGMGISGQLTWTRLPQGFKNSPTLFNEALHRDLADFRIQHPDLILLQYVDDILLAATSELDCQQGTRALLQTLGDLGYRASAKKAQICQKQVKYLGYLLREGQRWLTEARKETVMGQPVPKTPRQLREFLGTAGFCRLWIPGFAEMAAPLYPLTKPGTLFSWGPDQQKAYQEIKQALLTAPALGLPDLTKPFELFVDEKQGYAKGVLTQKLGPWRRPVAYLSKKLDPVAAGWPPCLRMVAAIAVLTKDAGKLTMGQPLVILAPHAVEALVKQPPDRWLSNARMTHYQAMLLDTDRVQFGPVVALNPATLLPLPEEGAPHDCLEILAETHGTRPDLTDQPIPDADHTWYTDGSSFLQEGQRKAGAAVTTETEVIWAGALPAGTSAQRAELIALTQALKMAEGKRLNVYTDSRYAFATAHIHGEIYRRRGWLTSEGREIKNKSEILALLKALFLPKRLSIIHCLGHQKGDSAEARGNRLADQAAREAAIKTPPDTSTLLAGKRTADGSEFEKRTADGSEFESPKKKAKVE

SEQ ID NO: 6708 - protein, 2091 aa, synthetic construct
MPAAKRVKLDGGDKKYSIGLDIGTNSVGWAVITDEYKVPSKKFKVLGNTDRHSIKKNLIGALLFDSGETAEATRLKRTARRRYTRRKNRICYLQEIFSNEMAKVDDSFFHRLEESFLVEEDKKHERHPIFGNIVDEVAYHEKYPTIYHLRKKLVDSTDKADLRLIYLALAHMIKFRGHFLIEGDLNPDNSDVDKLFIQLVQTYNQLFEENPINASGVDAKAILSARLSKSRRLENLIAQLPGEKKNGLFGNLIALSLGLTPNFKSNFDLAEDAKLQLSKDTYDDDLDNLLAQIGDQYADLFLAAKNLSDAILLSDILRVNTEITKAPLSASMIKRYDEHHQDLTLLKALVRQQLPEKYKEIFFDQSKNGYAGYIDGGASQEEFYKFIKPILEKMDGTEELLVKLNREDLLRKQRTFDNGSIPHQIHLGELHAILRRQEDFYPFLKDNREKIEKILTFRIPYYVGPLARGNSRFAWMTRKSEETITPWNFEEVVDKGASAQSFIERMTNFDKNLPNEKVLPKHSLLYEYFTVYNELTKVKYVTEGMRKPAFLSGEQKKAIVDLLFKTNRKVTVKQLKEDYFKKIECFDSVEISGVEDRFNASLGTYHDLLKIIKDKDFLDNEENEDILEDIVLTLTLFEDREMIEERLKTYAHLFDDKVMKQLKRRRYTGWGRLSRKLINGIRDKQSGKTILDFLKSDGFANRNFMQLIHDDSLTFKEDIQKAQVSGQGDSLHEHIANLAGSPAIKKGILQTVKVVDELVKVMGRHKPENIVIEMARENQTTQKGQKNSRERMKRIEEGIKELGSQILKEHPVENTQLQNEKLYLYYLQNGRDMYVDQELDINRLSDYDVDHIVPQSFLKDDSIDNKVLTRSDKARGKSDNVPSEEVVKKMKNYWRQLLNAKLITQRKFDNLTKAERGGLSELDKAGFIKRQLVETRQITKHVAQILDSRMNTKYDENDKLIREVKVITLKSKLVSDFRKDFQFYKVREINNYHHAHDAYLNAVVGTALIKKYPKLESEFVYGDYKVYDVRKMIAKSEQEIGKATAKYFFYSNIMNFFKTEITLANGEIRKRPLIETNGETGEIVWDKGRDFATVRKVLSMPQVNIVKKTEVQTGGFSKESILPKRNSDKLIARKKDWDPKKYGGFDSPTVAYSVLVVAKVEKGKSKKLKSVKELLGITIMERSSFEKNPIDFLEAKGYKEVKKDLIIKLPKYSLFELENGRKRMLASAGELQKGNELALPSKYVNFLYLASHYEKLKGSPEDNEQKQLFVEQHKHYLDEIIEQISEFSKRVILADANLDKVLSAYNKHRDKPIREQAENIIHLFTLTNLGAPAAFKYFDTTIDRKRYTSTKEVLDATLIHQSITGLYETRIDLSQLGGDGGGGGPAPGGTLNIEDEHRLHETSKEPDVSLGSTWLSDFPQAWAETGGMGLAVRQAPLIIPLKATSTPVSIKQYPMSQEARLGIKPHIQRLLDQGILVPCQSPWNTPLLPVKKPGTNDYRPVQDLREVNKRVEDIHPTVPNPYNLLSGLPPSHQWYTVLDLKDAFFCLRLHPTSQPLFAFEWRDPEMGISGQLTWTRLPQGFKNSPTLFNEALHRDLADFRIQHPDLILLQYVDDLLLAATSELDCQQGTRALLQTLGNLGYRASAKKAQICQKQVKYLGYLLKEGQRWLTEARKETVMGQPTPKTPRQLREFLGTAGFCRLWIPGFAEMAAPLYPLTKPGTLFNWGPDQQKAYQEIKQALLTAPALGLPDLTKPFELFVDEKQGYAKGVLTQKLGPWRRPVAYLSKKLDPVAAGWPPCLRMVAAIAVLTKDAGKLTMGQPLVILAPHAVEALVKQPPDRWLSNARMTHYQALLLDTDRVQFGPVVALNPATLLPLPEEGLQHNCLDILAEAHGTRPDLTDQPLPDADHTWYTDGSSLLQEGQRKAGAAVTTETEVIWAKALPAGTSAQRAELIALTQALKMAEGKKLNVYTDSRYAFATAHIHGEIYRRRGWLTSEGKEIKNKDEILALLKALFLPKRLSIIHCPGHQKGHSAEARGNRMADQAARKAAITETPDTSTLLAGKRTADGSEFEKRTADGSEFESPKKKAKVE

SEQ ID NO: 6709 - protein, 2091 aa, synthetic construct; identical to SEQ ID NO: 6708

SEQ ID NO: 6710 - protein, 2085 aa, synthetic construct
MPAAKRVKLDGGDKKYSIGLDIGTNSVGWAVITDEYKVPSKKFKVLGNTDRHSIKKNLIGALLFDSGETAEATRLKRTARRRYTRRKNRICYLQEIFSNEMAKVDDSFFHRLEESFLVEEDKKHERHPIFGNIVDEVAYHEKYPTIYHLRKKLVDSTDKADLRLIYLALAHMIKFRGHFLIEGDLNPDNSDVDKLFIQLVQTYNQLFEENPINASGVDAKAILSARLSKSRRLENLIAQLPGEKKNGLFGNLIALSLGLTPNFKSNFDLAEDAKLQLSKDTYDDDLDNLLAQIGDQYADLFLAAKNLSDAILLSDILRVNTEITKAPLSASMIKRYDEHHQDLTLLKALVRQQLPEKYKEIFFDQSKNGYAGYIDGGASQEEFYKFIKPILEKMDGTEELLVKLNREDLLRKQRTFDNGSIPHQIHLGELHAILRRQEDFYPFLKDNREKIEKILTFRIPYYVGPLARGNSRFAWMTRKSEETITPWNFEEVVDKGASAQSFIERMTNFDKNLPNEKVLPKHSLLYEYFTVYNELTKVKYVTEGMRKPAFLSGEQKKAIVDLLFKTNRKVTVKQLKEDYFKKIECFDSVEISGVEDRFNASLGTYHDLLKIIKDKDFLDNEENEDILEDIVLTLTLFEDREMIEERLKTYAHLFDDKVMKQLKRRRYTGWGRLSRKLINGIRDKQSGKTILDFLKSDGFANRNFMQLIHDDSLTFKEDIQKAQVSGQGDSLHEHIANLAGSPAIKKGILQTVKVVDELVKVMGRHKPENIVIEMARENQTTQKGQKNSRERMKRIEEGIKELGSQILKEHPVENTQLQNEKLYLYYLQNGRDMYVDQELDINRLSDYDVDHIVPQSFLKDDSIDNKVLTRSDKARGKSDNVPSEEVVKKMKNYWRQLLNAKLITQRKFDNLTKAERGGLSELDKAGFIKRQLVETRQITKHVAQILDSRMNTKYDENDKLIREVKVITLKSKLVSDFRKDFQFYKVREINNYHHAHDAYLNAVVGTALIKKYPKLESEFVYGDYKVYDVRKMIAKSEQEIGKATAKYFFYSNIMNFFKTEITLANGEIRKRPLIETNGETGEIVWDKGRDFATVRKVLSMPQVNIVKKTEVQTGGFSKESILPKRNSDKLIARKKDWDPKKYGGFDSPTVAYSVLVVAKVEKGKSKKLKSVKELLGITIMERSSFEKNPIDFLEAKGYKEVKKDLIIKLPKYSLFELENGRKRMLASAGELQKGNELALPSKYVNFLYLASHYEKLKGSPEDNEQKQLFVEQHKHYLDEIIEQISEFSKRVILADANLDKVLSAYNKHRDKPIREQAENIIHLFTLTNLGAPAAFKYFDTTIDRKRYTSTKEVLDATLIHQSITGLYETRIDLSQLGGDGGGGGPAPGGTLQLDDEYRLYSPLVKPDQNIQFWLEQFPQAWAETAGMGLAKQVPPQVIQLKASATPVSVRQYPLSKEAQEGIRPHVQRLIQQGILVPVQSPWNTPLLPVRKPGTNDYRPVQDLREVNKRVQDIHPTVPNPYNLLCALPPQRSWYTVLDLKDAFFCLRLHPTSQPLFAFEWRDPGTGRTGQLTWTRLPQGFKNSPTIFDEALHRDLANFRIQHPQVTLLQYVDDLLLAGATKQDCLEGTKALLLELSDLGYRASAKKAQICRREVTYLGYSLRDGQRWLTEARKKTVVQIPAPTTAKQVREFLGTAGFCRLWIPGFATLAAPLYPLTKEKGEFSWAPEHQKAFDAIKKALLSAPALALPDVTKPFTLYVDERKGVARGVLTQTLGPWRRPVAYLSKKLDPVASGWPVCLKAIAAVAILVKDADKLTLGQNITVIAPHALENIVRQPPDRWMTNARMTHYQSLLLTERVTFAPPAALNPATLLPEETDEPVTHDCHQLLIEETGVRKDLTDIPLTGEVLTWFTDGSSYVVEGKRMAGAAVVDGTRTIWASSLPEGTSAQKAELMALTQALRLAEGKSINIYTDSRYAFATAHVHGAIYKQRGLLTSAGREIKNKEEILSLLEALHLPKRLAIIHCPGHQKAKDPISRGNQMADRVAKQAAQGVNLLAGKRTADGSEFEKRTADGSEFESPKKKAKVE

SEQ ID NO: 6711 - protein, 2085 aa, synthetic construct; identical to SEQ ID NO: 6710

SEQ ID NO: 6712 - protein, 2171 aa, synthetic construct
MPAAKRVKLDGGDKKYSIGLDIGTNSVGWAVITDEYKVPSKKFKVLGNTDRHSIKKNLIGALLFDSGETAEATRLKRTARRRYTRRKNRICYLQEIFSNEMAKVDDSFFHRLEESFLVEEDKKHERHPIFGNIVDEVAYHEKYPTIYHLRKKLVDSTDKADLRLIYLALAHMIKFRGHFLIEGDLNPDNSDVDKLFIQLVQTYNQLFEENPINASGVDAKAILSARLSKSRRLENLIAQLPGEKKNGLFGNLIALSLGLTPNFKSNFDLAEDAKLQLSKDTYDDDLDNLLAQIGDQYADLFLAAKNLSDAILLSDILRVNTEITKAPLSASMIKRYDEHHQDLTLLKALVRQQLPEKYKEIFFDQSKNGYAGYIDGGASQEEFYKFIKPILEKMDGTEELLVKLNREDLLRKQRTFDNGSIPHQIHLGELHAILRRQEDFYPFLKDNREKIEKILTFRIPYYVGPLARGNSRFAWMTRKSEETITPWNFEEVVDKGASAQSFIERMTNFDKNLPNEKVLPKHSLLYEYFTVYNELTKVKYVTEGMRKPAFLSGEQKKAIVDLLFKTNRKVTVKQLKEDYFKKIECFDSVEISGVEDRFNASLGTYHDLLKIIKDKDFLDNEENEDILEDIVLTLTLFEDREMIEERLKTYAHLFDDKVMKQLKRRRYTGWGRLSRKLINGIRDKQSGKTILDFLKSDGFANRNFMQLIHDDSLTFKEDIQKAQVSGQGDSLHEHIANLAGSPAIKKGILQTVKVVDELVKVMGRHKPENIVIEMARENQTTQKGQKNSRERMKRIEEGIKELGSQILKEHPVENTQLQNEKLYLYYLQNGRDMYVDQELDINRLSDYDVDHIVPQSFLKDDSIDNKVLTRSDKARGKSDNVPSEEVVKKMKNYWRQLLNAKLITQRKFDNLTKAERGGLSELDKAGFIKRQLVETRQITKHVAQILDSRMNTKYDENDKLIREVKVITLKSKLVSDFRKDFQFYKVREINNYHHAHDAYLNAVVGTALIKKYPKLESEFVYGDYKVYDVRKMIAKSEQEIGKATAKYFFYSNIMNFFKTEITLANGEIRKRPLIETNGETGEIVWDKGRDFATVRKVLSMPQVNIVKKTEVQTGGFSKESILPKRNSDKLIARKKDWDPKKYGGFDSPTVAYSVLVVAKVEKGKSKKLKSVKELLGITIMERSSFEKNPIDFLEAKGYKEVKKDLIIKLPKYSLFELENGRKRMLASAGELQKGNELALPSKYVNFLYLASHYEKLKGSPEDNEQKQLFVEQHKHYLDEIIEQISEFSKRVILADANLDKVLSAYNKHRDKPIREQAENIIHLFTLTNLGAPAAFKYFDTTIDRKRYTSTKEVLDATLIHQSITGLYETRIDLSQLGGDGGGGGPAPGGMDPLQLLQPLEAEIKGTKLKAHWNSGATITCVPEAFLEDERPIQTMLIKTIHGEKQQDVYYLTFKVQGRKVEAEVLASPYDYILLNPSDVPWLMKKPLQLTVLVPLHEYQERLLQQTALPKEQKELLQKLFLKYDALWQHWENQVGHRRIKPHNIATGTLAPRPQKQYPINPKAKPSIQIVIDDLLKQGVLIQQNSTMNTPVYPVPKPDGKWRMVLDYREVNKTIPLIAAQNQHSAGILSSIYRGKYKTTLDLTNGFWAHPITPESYWLTAFTWQGKQYCWTRLPQGFLNSPALFNADVVDLLKEIPNVQAYVDDIYISHDDPQEHLEQLEKIFSILLNAGYVVSLKKSEIAQREVEFLGFNITKEGRGLTDTFKQKLLNITPPKDLKQLQSILGKLNFARNFIPNYSELVKPLYTIVAPANGKFISWTEDNSNQLQHIISVLNQADNLEERNPETRLIIKVNSSPSAGYIRYYNEGSKRPIMYVNYIFSKAEAKFTQTEKLLTTMHKGLIKAMDLAMGQEILVYSPIVSMTKIQRTPLPERKALPVRWITWMTYLEDPRIQFHYDKSLPELQQIPNVTEDVIAKTKHPSEFAMVFYTDGSAIKHPDVNKSHSAGMGIAQVQFIPEYKIVHQWSIPLGDHTAQLAEIAAVEFACKKALKISGPVLIVTDSFYVAESANKELPYWKSNGFLNNKKKPLRHVSKWKSIAECLQLKPDIIIMHEKGHQQPMTTLHTEGNNLADKLATQGSYVVHAGKRTADGSEFEKRTADGSEFESPKKKAKVE

SEQ ID NO: 6713 - protein, 2082 aa, synthetic construct
MPAAKRVKLDGGDKKYSIGLDIGTNSVGWAVITDEYKVPSKKFKVLGNTDRHSIKKNLIGALLFDSGETAEATRLKRTARRRYTRRKNRICYLQEIFSNEMAKVDDSFFHRLEESFLVEEDKKHERHPIFGNIVDEVAYHEKYPTIYHLRKKLVDSTDKADLRLIYLALAHMIKFRGHFLIEGDLNPDNSDVDKLFIQLVQTYNQLFEENPINASGVDAKAILSARLSKSRRLENLIAQLPGEKKNGLFGNLIALSLGLTPNFKSNFDLAEDAKLQLSKDTYDDDLDNLLAQIGDQYADLFLAAKNLSDAILLSDILRVNTEITKAPLSASMIKRYDEHHQDLTLLKALVRQQLPEKYKEIFFDQSKNGYAGYIDGGASQEEFYKFIKPILEKMDGTEELLVKLNREDLLRKQRTFDNGSIPHQIHLGELHAILRRQEDFYPFLKDNREKIEKILTFRIPYYVGPLARGNSRFAWMTRKSEETITPWNFEEVVDKGASAQSFIERMTNFDKNLPNEKVLPKHSLLYEYFTVYNELTKVKYVTEGMRKPAFLSGEQKKAIVDLLFKTNRKVTVKQLKEDYFKKIECFDSVEISGVEDRFNASLGTYHDLLKIIKDKDFLDNEENEDILEDIVLTLTLFEDREMIEERLKTYAHLFDDKVMKQLKRRRYTGWGRLSRKLINGIRDKQSGKTILDFLKSDGFANRNFMQLIHDDSLTFKEDIQKAQVSGQGDSLHEHIANLAGSPAIKKGILQTVKVVDELVKVMGRHKPENIVIEMARENQTTQKGQKNSRERMKRIEEGIKELGSQILKEHPVENTQLQNEKLYLYYLQNGRDMYVDQELDINRLSDYDVDHIVPQSFLKDDSIDNKVLTRSDKARGKSDNVPSEEVVKKMKNYWRQLLNAKLITQRKFDNLTKAERGGLSELDKAGFIKRQLVETRQITKHVAQILDSRMNTKYDENDKLIREVKVITLKSKLVSDFRKDFQFYKVREINNYHHAHDAYLNAVVGTALIKKYPKLESEFVYGDYKVYDVRKMIAKSEQEIGKATAKYFFYSNIMNFFKTEITLANGEIRKRPLIETNGETGEIVWDKGRDFATVRKVLSMPQVNIVKKTEVQTGGFSKESILPKRNSDKLIARKKDWDPKKYGGFDSPTVAYSVLVVAKVEKGKSKKLKSVKELLGITIMERSSFEKNPIDFLEAKGYKEVKKDLIIKLPKYSLFELENGRKRMLASAGELQKGNELALPSKYVNFLYLASHYEKLKGSPEDNEQKQLFVEQHKHYLDEIIEQISEFSKRVILADANLDKVLSAYNKHRDKPIREQAENIIHLFTLTNLGAPAAFKYFDTTIDRKRYTSTKEVLDATLIHQSITGLYETRIDLSQLGGDGGGGGPAPGGIPWLMKKPLQLTTLVPLQEYEERLLKQTMLTGSYKEKLQSLFLKYDALWQHWENQVGHRRIKPHHIATGTVNPRPQKQYPINPKAKASIQTVINDLLKQGVLIQQNSIMNTPVYPVPKPDGKWRMVLDYREVNKTIPLIAAQNQHSAGILSSIFRGKYKTTLDLSNGFWAHSITPESYWLTAFTWLGQQYCWTRLPQGFLNSPALFNADVVDLLKEVPNVQVYVDDIYISHDDPREHLEQLEKVFSLLLNAGYVVSLKKSEIAQHEVEFLGFNITKEGRGLTETFKQKLLNITPPRDLKQLQSILGLLNFARNFIPNFSELVKPLYNIIATAPGKYITWTTDNSQQLQNIISMLNSAENLEERNPEVRLIMKVNTSPSAGYIRFYNEFAKRPIMYLNYVYTKAEVKFTNTEKLLTTIHKGLIKALDLGMGQEILVYSPIVSMTKIQKTPLPERKALPIRWITWMSYLEDPRIQFHYDKTLPELQQVPTVTDDIIAKIKHPSEFSMVFYTDGSAIKHPNVNKSHNAGMGIAQVQFKPEFTVINTWSIPLGDHTAQLAEVAAVEFACKKALKIDGPVLIVTDSFYVAESVNKELPYWQSNGFFNNKKKPLKHVSKWKSIADCIQLKPDIIIIHEKGHQPTASTFHTEGNNLADKLATQGSYVVNAGKRTADGSEFEKRTADGSEFESPKKKAKVE

SEQ ID NO: 6714 - protein, 2171 aa, synthetic construct
MPAAKRVKLDGGDKKYSIGLDIGTNSVGWAVITDEYKVPSKKFKVLGNTDRHSIKKNLIGALLFDSGETAEATRLKRTARRRYTRRKNRICYLQEIFSNEMAKVDDSFFHRLEESFLVEEDKKHERHPIFGNIVDEVAYHEKYPTIYHLRKKLVDSTDKADLRLIYLALAHMIKFRGHFLIEGDLNPDNSDVDKLFIQLVQTYNQLFEENPINASGVDAKAILSARLSKSRRLENLIAQLPGEKKNGLFGNLIALSLGLTPNFKSNFDLAEDAKLQLSKDTYDDDLDNLLAQIGDQYADLFLAAKNLSDAILLSDILRVNTEITKAPLSASMIKRYDEHHQDLTLLKALVRQQLPEKYKEIFFDQSKNGYAGYIDGGASQEEFYKFIKPILEKMDGTEELLVKLNREDLLRKQRTFDNGSIPHQIHLGELHAILRRQEDFYPFLKDNREKIEKILTFRIPYYVGPLARGNSRFAWMTRKSEETITPWNFEEVVDKGASAQSFIERMTNFDKNLPNEKVLPKHSLLYEYFTVYNELTKVKYVTEGMRKPAFLSGEQKKAIVDLLFKTNRKVTVKQLKEDYFKKIECFDSVEISGVEDRFNASLGTYHDLLKIIKDKDFLDNEENEDILEDIVLTLTLFEDREMIEERLKTYAHLFDDKVMKQLKRRRYTGWGRLSRKLINGIRDKQSGKTILDFLKSDGFANRNFMQLIHDDSLTFKEDIQKAQVSGQGDSLHEHIANLAGSPAIKKGILQTVKVVDELVKVMGRHKPENIVIEMARENQTTQKGQKNSRERMKRIEEGIKELGSQILKEHPVENTQLQNEKLYLYYLQNGRDMYVDQELDINRLSDYDVDHIVPQSFLKDDSIDNKVLTRSDKARGKSDNVPSEEVVKKMKNYWRQLLNAKLITQRKFDNLTKAERGGLSELDKAGFIKRQLVETRQITKHVAQILDSRMNTKYDENDKLIREVKVITLKSKLVSDFRKDFQFYKVREINNYHHAHDAYLNAVVGTALIKKYPKLESEFVYGDYKVYDVRKMIAKSEQEIGKATAKYFFYSNIMNFFKTEITLANGEIRKRPLIETNGETGEIVWDKGRDFATVRKVLSMPQVNIVKKTEVQTGGFSKESILPKRNSDKLIARKKDWDPKKYGGFDSPTVAYSVLVVAKVEKGKSKKLKSVKELLGITIMERSSFEKNPIDFLEAKGYKEVKKDLIIKLPKYSLFELENGRKRMLASAGELQKGNELALPSKYVNFLYLASHYEKLKGSPEDNEQKQLFVEQHKHYLDEIIEQISEFSKRVILADANLDKVLSAYNKHRDKPIREQAENIIHLFTLTNLGAPAAFKYFDTTIDRKRYTSTKEVLDATLIHQSITGLYETRIDLSQLGGDGGGGGPAPGGMNPLQLLQPLPAEVKGTKLLAHWNSGATITCIPESFLEDEQPIKQTLIKTIHGEKQQNVYYLTFKVKGRKVEAEVIASPYEYILLSPTDVPWLTQQPLQLTILVPLQEYQDRILNKTALPEEQKQQLKALFTKYDNLWQHWENQVGHRKIRPHNIATGDYPPRPQKQYPINPKAKPSIQIVIDDLLKQGVLTPQNSTMNTPVYPVPKPDGRWRMVLDYREVNKTIPLTAAQNQHSAGILATIVRQKYKTTLDLANGFWAHPITPDSYWLTAFTWQGKQYCWTRLPQGFLNSPALFTADAVDLLKEVPNVQVYVDDIYLSHDNPHEHIQQLEKVFQILLQAGYVVSLKKSEIGQRTVEFLGFNITKEGRGLTDTFKTKLLNVTPPKDLKQLQSILGLLNFARNFIPNFAELVQTLYNLIASSKGKYIEWTEDNTKQLNKVIEALNTASNLEERLPDQRLVIKVNTSPSAGYVRYYNESGKKPIMYLNYVFSKAELKFSMLEKLLTTMHKALIKAMDLAMGQEILVYSPIVSMTKIQKTPLPERKALPIRWITWMTYLEDPRIQFHYDKTLPELKHIPDVYTSSIPPLKHPSQYEGVFCTDGSAIKSPDPTKSNNAGMGIVHAIYNPEYKILNQWSIPLGHHTAQMAEIAAVEFACKKALKVPGPVLVITDSFYVAESANKELPYWKSNGFVNNKKEPLKHISKWKSIAECLSIKPDITIQHEKGHQPINTSIHTEGNALADKLATQGSYVVNAGKRTADGSEFEKRTADGSEFESPKKKAKVE

SEQ ID NO: 6715 - protein, 2089 aa, synthetic construct
MPAAKRVKLDGGDKKYSIGLDIGTNSVGWAVITDEYKVPSKKFKVLGNTDRHSIKKNLIGALLFDSGETAEATRLKRTARRRYTRRKNRICYLQEIFSNEMAKVDDSFFHRLEESFLVEEDKKHERHPIFGNIVDEVAYHEKYPTIYHLRKKLVDSTDKADLRLIYLALAHMIKFRGHFLIEGDLNPDNSDVDKLFIQLVQTYNQLFEENPINASGVDAKAILSARLSKSRRLENLIAQLPGEKKNGLFGNLIALSLGLTPNFKSNFDLAEDAKLQLSKDTYDDDLDNLLAQIGDQYADLFLAAKNLSDAILLSDILRVNTEITKAPLSASMIKRYDEHHQDLTLLKALVRQQLPEKYKEIFFDQSKNGYAGYIDGGASQEEFYKFIKPILEKMDGTEELLVKLNREDLLRKQRTFDNGSIPHQIHLGELHAILRRQEDFYPFLKDNREKIEKILTFRIPYYVGPLARGNSRFAWMTRKSEETITPWNFEEVVDKGASAQSFIERMTNFDKNLPNEKVLPKHSLLYEYFTVYNELTKVKYVTEGMRKPAFLSGEQKKAIVDLLFKTNRKVTVKQLKEDYFKKIECFDSVEISGVEDRFNASLGTYHDLLKIIKDKDFLDNEENEDILEDIVLTLTLFEDREMIEERLKTYAHLFDDKVMKQLKRRRYTGWGRLSRKLINGIRDKQSGKTILDFLKSDGFANRNFMQLIHDDSLTFKEDIQKAQVSGQGDSLHEHIANLAGSPAIKKGILQTVKVVDELVKVMGRHKPENIVIEMARENQTTQKGQKNSRERMKRIEEGIKELGSQILKEHPVENTQLQNEKLYLYYLQNGRDMYVDQELDINRLSDYDVDHIVPQSFLKDDSIDNKVLTRSDKARGKSDNVPSEEVVKKMKNYWRQLLNAKLITQRKFDNLTKAERGGLSELDKAGFIKRQLVETRQITKHVAQILDSRMNTKYDENDKLIREVKVITLKSKLVSDFRKDFQFYKVREINNYHHAHDAYLNAVVGTALIKKYPKLESEFVYGDYKVYDVRKMIAKSEQEIGKATAKYFFYSNIMNFFKTEITLANGEIRKRPLIETNGETGEIVWDKGRDFATVRKVLSMPQVNIVKKTEVQTGGFSKESILPKRNSDKLIARKKDWDPKKYGGFDSPTVAYSVLVVAKVEKGKSKKLKSVKELLGITIMERSSFEKNPIDFLEAKGYKEVKKDLIIKLPKYSLFELENGRKRMLASAGELQKGNELALPSKYVNFLYLASHYEKLKGSPEDNEQKQLFVEQHKHYLDEIIEQISEFSKRVILADANLDKVLSAYNKHRDKPIREQAENIIHLFTLTNLGAPAAFKYFDTTIDRKRYTSTKEVLDATLIHQSITGLYETRIDLSQLGGDGGGGGPAPGGVLNLEEEYRLHEKPVPSSIDPSWLQLFPTVWAERAGMGLANQVPPVVVELRSGASPVAVRQYPMSKEAREGIRPHIQRFLDLGVLVPCQSPWNTPLLPVKKPGTNDYRPVQDLREINKRVQDIHPTVPNPYNLLSSLPPSHTWYSVLDLKDAFFCLKLHPNSQPLFAFEWRDPEKGNTGQLTWTRLPQGFKNSPTLFNEALHRDLAPFRALNPQVVLLQYVDDLLVAAPTYRDCKEGTQKLLQELSKLGYRVSAKKAQLCQKEVTYLGYLLKEGKRWLTPARKATVMKIPPPTTPRQVREFLGTAGFCRLWIPGFASLAAPLYPLTKPSIPFIWTEEHQKAFDRIKEALLSAPALALPDLTKPFTLYVDERAGVARGVLTQTLGPWRRPVAYLSKKLDPVASGWPTCLKAVAAVALLLKDADKLTLGQNVTVIASHSLESIVRQPPDRWMTNARMTHYQSLLLNERVSFAPPAVLNPATLLPVESEATPVHRCSEILAEETGTRRDLKDQPLPGVPAWYTDGSSFIAEGKRRAGAAIVDGKRTVWASSLPEGTSAQKAELVALTQALRLAEGKDINIYTDSRYAFATAHIHGAIYKQRGWLTSAGKDIKNKEEILALLEAIHLPKRVAIIHCPGHQKGNDPVATGNRRADEAAKQAALSTRVLAETTKPAGKRTADGSEFEKRTADGSEFESPKKKAKVE

SEQ ID NO: 6716 - protein, 2091 aa, synthetic construct
MPAAKRVKLDGGDKKYSIGLDIGTNSVGWAVITDEYKVPSKKFKVLGNTDRHSIKKNLIGALLFDSGETAEATRLKRTARRRYTRRKNRICYLQEIFSNEMAKVDDSFFHRLEESFLVEEDKKHERHPIFGNIVDEVAYHEKYPTIYHLRKKLVDSTDKADLRLIYLALAHMIKFRGHFLIEGDLNPDNSDVDKLFIQLVQTYNQLFEENPINASGVDAKAILSARLSKSRRLENLIAQLPGEKKNGLFGNLIALSLGLTPNFKSNFDLAEDAKLQLSKDTYDDDLDNLLAQIGDQYADLFLAAKNLSDAILLSDILRVNTEITKAPLSASMIKRYDEHHQDLTLLKALVRQQLPEKYKEIFFDQSKNGYAGYIDGGASQEEFYKFIKPILEKMDGTEELLVKLNREDLLRKQRTFDNGSIPHQIHLGELHAILRRQEDFYPFLKDNREKIEKILTFRIPYYVGPLARGNSRFAWMTRKSEETITPWNFEEVVDKGASAQSFIERMTNFDKNLPNEKVLPKHSLLYEYFTVYNELTKVKYVTEGMRKPAFLSGEQKKAIVDLLFKTNRKVTVKQLKEDYFKKIECFDSVEISGVEDRFNASLGTYHDLLKIIKDKDFLDNEENEDILEDIVLTLTLFEDREMIEERLKTYAHLFDDKVMKQLKRRRYTGWGRLSRKLINGIRDKQSGKTILDFLKSDGFANRNFMQLIHDDSLTFKEDIQKAQVSGQGDSLHEHIANLAGSPAIKKGILQTVKVVDELVKVMGRHKPENIVIEMARENQTTQKGQKNSRERMKRIEEGIKELGSQILKEHPVENTQLQNEKLYLYYLQNGRDMYVDQELDINRLSDYDVDHIVPQSFLKDDSIDNKVLTRSDKARGKSDNVPSEEVVKKMKNYWRQLLNAKLITQRKFDNLTKAERGGLSELDKAGFIKRQLVETRQITKHVAQILDSRMNTKYDENDKLIREVKVITLKSKLVSDFRKDFQFYKVREINNYHHAHDAYLNAVVGTALIKKYPKLESEFVYGDYKVYDVRKMIAKSEQEIGKATAKYFFYSNIMNFFKTEITLANGEIRKRPLIETNGETGEIVWDKGRDFATVRKVLSMPQVNIVKKTEVQTGGFSKESILPKRNSDKLIARKKDWDPKKYGGFDSPTVAYSVLVVAKVEKGKSKKLKSVKELLGITIMERSSFEKNPIDFLEAKGYKEVKKDLIIKLPKYSLFELENGRKRMLASAGELQKGNELALPSKYVNFLYLASHYEKLKGSPEDNEQKQLFVEQHKHYLDEIIEQISEFSKRVILADANLDKVLSAYNKHRDKPIREQAENIIHLFTLTNLGAPAAFKYFDTTIDRKRYTSTKEVLDATLIHQSITGLYETRIDLSQLGGDGGGGGPAPGGTLNIEDEYRLHETSKEPDVPLGSTWLSDFPQAWAETGGMGLAVRQAPLIIPLKATSTPVSIKQYPMSQEARLGIKPHIQRLLDQGILVPCQSPWNTPLLPVKKPGTNDYRPVQDLREVNKRVEDIHPTVPNPYNLLSGLPPSHQWYTVLDLKDAFFCLRLHPTSQPLFAFEWRDPEMGISGQLTWTRLPQGFKNSPTLFNEALHRDLADFRIQHPDLILLQYVDDLLLAATSEQDCQRGTRALLQTLGNLGYRASAKKAQICQKQVKYLGYLLKEGQRWLTEARKETVMGQPTPKTPRQLREFLGTAGFCRLWIPGFAEMAAPLYPLTKPGTLFNWGPDQQKAYQEIKQALLTAPALGLPDLTKPFELFVDEKQGYAKGVLTQKLGPWRRPVAYLSKKLDPVAAGWPPCLRMVAAIAVLTKDAGKLTMGQPLVILAPHAVEALVKQPPDRWLSNARMTHYQAMLLDTDRVQFGPVVALNPATLLPLPEKEAPHDCLEILAETHGTRPDLTDQPIPDADYTWYTDGSSFLQEGQRRAGAAVTTETEVIWARALPAGTSAQRAELIALTQALKMAEGKKLNVYTDSRYAFATAHVHGEIYRRRGWLTSEGREIKNKNEILALLKALFLPKRLSIIHCPGHQKGNSAEARGNRMADQAAREAAMKAVLETSTLLAGKRTADGSEFEKRTADGSEFESPKKKAKVE

SEQ ID NO: 6717 - protein, 2091 aa, synthetic construct
MPAAKRVKLDGGDKKYSIGLDIGTNSVGWAVITDEYKVPSKKFKVLGNTDRHSIKKNLIGALLFDSGETAEATRLKRTARRRYTRRKNRICYLQEIFSNEMAKVDDSFFHRLEESFLVEEDKKHERHPIFGNIVDEVAYHEKYPTIYHLRKKLVDSTDKADLRLIYLALAHMIKFRGHFLIEGDLNPDNSDVDKLFIQLVQTYNQLFEENPINASGVDAKAILSARLSKSRRLENLIAQLPGEKKNGLFGNLIALSLGLTPNFKSNFDLAEDAKLQLSKDTYDDDLDNLLAQIGDQYADLFLAAKNLSDAILLSDILRVNTEITKAPLSASMIKRYDEHHQDLTLLKALVRQQLPEKYKEIFFDQSKNGYAGYIDGGASQEEFYKFIKPILEKMDGTEELLVKLNREDLLRKQRTFDNGSIPHQIHLGELHAILRRQEDFYPFLKDNREKIEKILTFRIPYYVGPLARGNSRFAWMTRKSEETITPWNFEEVVDKGASAQSFIERMTNFDKNLPNEKVLPKHSLLYEYFTVYNELTKVKYVTEGMRKPAFLSGEQKKAIVDLLFKTNRKVTVKQLKEDYFKKIECFDSVEISGVEDRFNASLGTYHDLLKIIKDKDFLDNEENEDILEDIVLTLTLFEDREMIEERLKTYAHLFDDKVMKQLKRRRYTGWGRLSRKLINGIRDKQSGKTILDFLKSDGFANRNFMQLIHDDSLTFKEDIQKAQVSGQGDSLHEHIANLAGSPAIKKGILQTVKVVDELVKVMGRHKPENIVIEMARENQTTQKGQKNSRERMKRIEEGIKELGSQILKEHPVENTQLQNEKLYLYYLQNGRDMYVDQELDINRLSDYDVDHIVPQSFLKDDSIDNKVLTRSDKARGKSDNVPSEEVVKKMKNYWRQLLNAKLITQRKFDNLTKAERGGLSELDKAGFIKRQLVETRQITKHVAQILDSRMNTKYDENDKLIREVKVITLKSKLVSDFRKDFQFYKVREINNYHHAHDAYLNAVVGTALIKKYPKLESEFVYGDYKVYDVRKMIAKSEQEIGKATAKYFFYSNIMNFFKTEITLANGEIRKRPLIETNGETGEIVWDKGRDFATVRKVLSMPQVNIVKKTEVQTGGFSKESILPKRNSDKLIARKKDWDPKKYGGFDSPTVAYSVLVVAKVEKGKSKKLKSVKELLGITIMERSSFEKNPIDFLEAKGYKEVKKDLIIKLPKYSLFELENGRKRMLASAGELQKGNELALPSKYVNFLYLASHYEKLKGSPEDNEQKQLFVEQHKHYLDEIIEQISEFSKRVILADANLDKVLSAYNKHRDKPIREQAENIIHLFTLTNLGAPAAFKYFDTTIDRKRYTSTKEVLDATLIHQSITGLYETRIDLSQLGGDGGGGGPAPGGTLNIEDEYRLHETSKEPDVPLGSTWLSDFPQAWAETGGMGLAVRQAPLIIPLKATSTPVSIKQYPMSQEARLGIKPHIQRLLDQGILVPCQSPWNTPLLPVKKPGTNDYRPVQDLREVNKRVEDIHPTVPNPYNLLSGLPPSHQWYTVLDLKDAFFCLRLHPTSQPLFAFEWRDPEMGISGQLTWTRLPQGFKNSPTLFNEALHRDLADFRIQHPDLILLQYVDDLLLAATSEQDCQRGTRALLQTLGNLGYRASAKKAQICQKQVKYLGYLLKEGQRWLTEARKETVMGQPTPKTPRQLREFLGKAGFCRLFIPGFAEMAAPLYPLTKPGTLFNWGPDQQKAYQEIKQALLTAPALGLPDLTKPFELFVDEKQGYAKGVLTQKLGPWRRPVAYLSKKLDPVAAGWPPCLRMVAAIAVLTKDAGKLTMGQPLVILAPHAVEALVKQPPDRWLSNARMTHYQAMLLDTDRVQFGPVVALNPATLLPLPEKEAPHDCLEILAETHGTRPDLTDQPIPDADYTWYTDGSSFLQEGQRRAGAAVTTETEVIWARALPAGTSAQRAELIALTQALKMAEGKKLNVYTDSRYAFATAHVHGEIYRRRGWLTSEGREIKNKNEILALLKALFLPKRLSIIHCPGHQKGNSAEARGNRMADQAAREAAMKAVLETSTLLAGKRTADGSEFEKRTADGSEFESPKKKAKVE

SEQ ID NO: 6718 - protein, 2122 aa, synthetic construct
MPAAKRVKLDGGDKKYSIGLDIGTNSVGWAVITDEYKVPSKKFKVLGNTDRHSIKKNLIGALLFDSGETAEATRLKRTARRRYTRRKNRICYLQEIFSNEMAKVDDSFFHRLEESFLVEEDKKHERHPIFGNIVDEVAYHEKYPTIYHLRKKLVDSTDKADLRLIYLALAHMIKFRGHFLIEGDLNPDNSDVDKLFIQLVQTYNQLFEENPINASGVDAKAILSARLSKSRRLENLIAQLPGEKKNGLFGNLIALSLGLTPNFKSNFDLAEDAKLQLSKDTYDDDLDNLLAQIGDQYADLFLAAKNLSDAILLSDILRVNTEITKAPLSASMIKRYDEHHQDLTLLKALVRQQLPEKYKEIFFDQSKNGYAGYIDGGASQEEFYKFIKPILEKMDGTEELLVKLNREDLLRKQRTFDNGSIPHQIHLGELHAILRRQEDFYPFLKDNREKIEKILTFRIPYYVGPLARGNSRFAWMTRKSEETITPWNFEEVVDKGASAQSFIERMTNFDKNLPNEKVLPKHSLLYEYFTVYNELTKVKYVTEGMRKPAFLSGEQKKAIVDLLFKTNRKVTVKQLKEDYFKKIECFDSVEISGVEDRFNASLGTYHDLLKIIKDKDFLDNEENEDILEDIVLTLTLFEDREMIEERLKTYAHLFDDKVMKQLKRRRYTGWGRLSRKLINGIRDKQSGKTILDFLKSDGFANRNFMQLIHDDSLTFKEDIQKAQVSGQGDSLHEHIANLAGSPAIKKGILQTVKVVDELVKVMGRHKPENIVIEMARENQTTQKGQKNSRERMKRIEEGIKELGSQILKEHPVENTQLQNEKLYLYYLQNGRDMYVDQELDINRLSDYDVDHIVPQSFLKDDSIDNKVLTRSDKARGKSDNVPSEEVVKKMKNYWRQLLNAKLITQRKFDNLTKAERGGLSELDKAGFIKRQLVETRQITKHVAQILDSRMNTKYDENDKLIREVKVITLKSKLVSDFRKDFQFYKVREINNYHHAHDAYLNAVVGTALIKKYPKLESEFVYGDYKVYDVRKMIAKSEQEIGKATAKYFFYSNIMNFFKTEITLANGEIRKRPLIETNGETGEIVWDKGRDFATVRKVLSMPQVNIVKKTEVQTGGFSKESILPKRNSDKLIARKKDWDPKKYGGFDSPTVAYSVLVVAKVEKGKSKKLKSVKELLGITIMERSSFEKNPIDFLEAKGYKEVKKDLIIKLPKYSLFELENGRKRMLASAGELQKGNELALPSKYVNFLYLASHYEKLKGSPEDNEQKQLFVEQHKHYLDEIIEQISEFSKRVILADANLDKVLSAYNKHRDKPIREQAENIIHLFTLTNLGAPAAFKYFDTTIDRKRYTSTKEVLDATLIHQSITGLYETRIDLSQLGGDGGPAPGGGGGLLGRDLLTKLKAQIQFSTEGPQVTWEDRPAMCLVLNLEEEYRLHEKPVPPSIDPSWLQLFPMVWAEKAGMGLANQVPPVVVELKSDASPVAVRQYPMSKEAREGIRPHIQRFLDLGILVPCQSPWNTPLLPVKKPGTNDYRPVQDLREVNKRVQDIHPTVPNPYNLLSSLPPSHTWYSVLDLKDAFFCLKLHPNSQPLFAFEWRDPEKGNTGQLTWTRLPQGFKNSPTLFNEALHRDLASFRALNPQVVMLQYVDDLLVAAPTYRDCKEGTRRLLQELSKLGYRVSAKKAQLCREEVTYLGYLLKGGKRWLTPARKATVMKIPTPTTPRQVREFLGTAGFCRLWIPGFASLAAPLYPLTRPKVPFTWTEAHQEAFGRIKEALLSAPALALPDLTKPFALYVDEKEGVARGVLTQTLGPWRRPVAYLSKKLDPVASGWPTCLKAIAAVALLLKDADKLTLGQNVLVIAPHNLESIVRQPPDRWMTNARMTHYQSLLLNERVSFAPPAILNPATLLPVESDDTPIHICSEILAEETGTRPDLRDQPLPGVPAWYTDGSSFIMDGRRQAGAAIVDNKRTVWASNLPEGTSAQKAELIALTQALRLAEGKSINIYTDSRYAFATAHVHGAIYKQRGWLTSAGKDIKNKEEILALLEAIHLPKRVAIIHCPGHQRGTDPVATGNRKADEAAKQAAQSTRILTETTKNAGKRTADGSEFEKRTADGSEFESPKKKAKVE

SEQ ID NO: 6719 - protein, 2122 aa, synthetic construct
MPAAKRVKLDGGDKKYSIGLDIGTNSVGWAVITDEYKVPSKKFKVLGNTDRHSIKKNLIGALLFDSGETAEATRLKRTARRRYTRRKNRICYLQEIFSNEMAKVDDSFFHRLEESFLVEEDKKHERHPIFGNIVDEVAYHEKYPTIYHLRKKLVDSTDKADLRLIYLALAHMIKFRGHFLIEGDLNPDNSDVDKLFIQLVQTYNQLFEENPINASGVDAKAILSARLSKSRRLENLIAQLPGEKKNGLFGNLIALSLGLTPNFKSNFDLAEDAKLQLSKDTYDDDLDNLLAQIGDQYADLFLAAKNLSDAILLSDILRVNTEITKAPLSASMIKRYDEHHQDLTLLKALVRQQLPEKYKEIFFDQSKNGYAGYIDGGASQEEFYKFIKPILEKMDGTEELLVKLNREDLLRKQRTFDNGSIPHQIHLGELHAILRRQEDFYPFLKDNREKIEKILTFRIPYYVGPLARGNSRFAWMTRKSEETITPWNFEEVVDKGASAQSFIERMTNFDKNLPNEKVLPKHSLLYEYFTVYNELTKVKYVTEGMRKPAFLSGEQKKAIVDLLFKTNRKVTVKQLKEDYFKKIECFDSVEISGVEDRFNASLGTYHDLLKIIKDKDFLDNEENEDILEDIVLTLTLFEDREMIEERLKTYAHLFDDKVMKQLKRRRYTGWGRLSRKLINGIRDKQSGKTILDFLKSDGFANRNFMQLIHDDSLTFKEDIQKAQVSGQGDSLHEHIANLAGSPAIKKGILQTVKVVDELVKVMGRHKPENIVIEMARENQTTQKGQKNSRERMKRIEEGIKELGSQILKEHPVENTQLQNEKLYLYYLQNGRDMYVDQELDINRLSDYDVDHIVPQSFLKDDSIDNKVLTRSDKARGKSDNVPSEEVVKKMKNYWRQLLNAKLITQRKFDNLTKAERGGLSELDKAGFIKRQLVETRQITKHVAQILDSRMNTKYDENDKLIREVKVITLKSKLVSDFRKDFQFYKVREINNYHHAHDAYLNAVVGTALIKKYPKLESEFVYGDYKVYDVRKMIAKSEQEIGKATAKYFFYSNIMNFFKTEITLANGEIRKRPLIETNGETGEIVWDKGRDFATVRKVLSMPQVNIVKKTEVQTGGFSKESILPKRNSDKLIARKKDWDPKKYGGFDSPTVAYSVLVVAKVEKGKSKKLKSVKELLGITIMERSSFEKNPIDFLEAKGYKEVKKDLIIKLPKYSLFELENGRKRMLASAGELQKGNELALPSKYVNFLYLASHYEKLKGSPEDNEQKQLFVEQHKHYLDEIIEQISEFSKRVILADANLDKVLSAYNKHRDKPIREQAENIIHLFTLTNLGAPAAFKYFDTTIDRKRYTSTKEVLDATLIHQSITGLYETRIDLSQLGGDGGPAPGGGGGLLGRDLLTKLKAQIQFSTEGPQVTWEDRPAMCLVLNLEEEYRLHEKPVPPSIDPSWLQLFPMVWAEKAGMGLANQVPPVVVELKSDASPVAVRQYPMSKEAREGIRPHIQRFLDLGILVPCQSPWNTPLLPVKKPGTNDYRPVQDLREVNKRVQDIHPTVPNPYNLLSSLPPSHTWYSVLDLKDAFFCLKLHPNSQPLFAFEWRDPEKGNTGQLTWTRLPQGFKNSPTLFNEALHRDLASFRALNPQVVMLQYVDDLLVAAPTYRDCKEGTRRLLQELSKLGYRVSAKKAQLCREEVTYLGYLLKGGKRWLTPARKATVMKIPTPTTPRQVREFLGKAGFCRLFIPGFASLAAPLYPLTRPKVPFTWTEAHQEAFGRIKEALLSAPALALPDLTKPFALYVDEKEGVARGVLTQTLGPWRRPVAYLSKKLDPVASGWPTCLKAIAAVALLLKDADKLTLGQNVLVIAPHNLESIVRQPPDRWMTNARMTHYQSLLLNERVSFAPPAILNPATLLPVESDDTPIHICSEILAEETGTRPDLRDQPLPGVPAWYTDGSSFIMDGRRQAGAAIVDNKRTVWASNLPEGTSAQKAELIALTQALRLAEGKSINIYTDSRYAFATAHVHGAIYKQRGWLTSAGKDIKNKEEILALLEAIHLPKRVAIIHCPGHQRGTDPVATGNRKADEAAKQAAQSTRILTETTKNAGKRTADGSEFEKRTADGSEFESPKKKAKVE

SEQ ID NO: 6720 - protein, 2213 aa, synthetic construct
MPAAKRVKLDGGDKKYSIGLDIGTNSVGWAVITDEYKVPSKKFKVLGNTDRHSIKKNLIGALLFDSGETAEATRLKRTARRRYTRRKNRICYLQEIFSNEMAKVDDSFFHRLEESFLVEEDKKHERHPIFGNIVDEVAYHEKYPTIYHLRKKLVDSTDKADLRLIYLALAHMIKFRGHFLIEGDLNPDNSDVDKLFIQLVQTYNQLFEENPINASGVDAKAILSARLSKSRRLENLIAQLPGEKKNGLFGNLIALSLGLTPNFKSNFDLAEDAKLQLSKDTYDDDLDNLLAQIGDQYADLFLAAKNLSDAILLSDILRVNTEITKAPLSASMIKRYDEHHQDLTLLKALVRQQLPEKYKEIFFDQSKNGYAGYIDGGASQEEFYKFIKPILEKMDGTEELLVKLNREDLLRKQRTFDNGSIPHQIHLGELHAILRRQEDFYPFLKDNREKIEKILTFRIPYYVGPLARGNSRFAWMTRKSEETITPWNFEEVVDKGASAQSFIERMTNFDKNLPNEKVLPKHSLLYEYFTVYNELTKVKYVTEGMRKPAFLSGEQKKAIVDLLFKTNRKVTVKQLKEDYFKKIECFDSVEISGVEDRFNASLGTYHDLLKIIKDKDFLDNEENEDILEDIVLTLTLFEDREMIEERLKTYAHLFDDKVMKQLKRRRYTGWGRLSRKLINGIRDKQSGKTILDFLKSDGFANRNFMQLIHDDSLTFKEDIQKAQVSGQGDSLHEHIANLAGSPAIKKGILQTVKVVDELVKVMGRHKPENIVIEMARENQTTQKGQKNSRERMKRIEEGIKELGSQILKEHPVENTQLQNEKLYLYYLQNGRDMYVDQELDINRLSDYDVDHIVPQSFLKDDSIDNKVLTRSDKARGKSDNVPSEEVVKKMKNYWRQLLNAKLITQRKFDNLTKAERGGLSELDKAGFIKRQLVETRQITKHVAQILDSRMNTKYDENDKLIREVKVITLKSKLVSDFRKDFQFYKVREINNYHHAHDAYLNAVVGTALIKKYPKLESEFVYGDYKVYDVRKMIAKSEQEIGKATAKYFFYSNIMNFFKTEITLANGEIRKRPLIETNGETGEIVWDKGRDFATVRKVLSMPQVNIVKKTEVQTGGFSKESILPKRNSDKLIARKKDWDPKKYGGFDSPTVAYSVLVVAKVEKGKSKKLKSVKELLGITIMERSSFEKNPIDFLEAKGYKEVKKDLIIKLPKYSLFELENGRKRMLASAGELQKGNELALPSKYVNFLYLASHYEKLKGSPEDNEQKQLFVEQHKHYLDEIIEQISEFSKRVILADANLDKVLSAYNKHRDKPIREQAENIIHLFTLTNLGAPAAFKYFDTTIDRKRYTSTKEVLDATLIHQSITGLYETRIDLSQLGGDGGPAPGGGGGTLGDQGSRGSDPLPEPRVTLTVEGIPTEFLVNTGAEHSVLTKPMGKMGSKRTVVAGATGSKVYPWTTKRLLKIGQKQVTHSFLVIPECPAPLLGRDLLTKLKAQIQFSTEGPQVTWEDRPAMCLVLNLEEEYRLHEKPVPPSIDPSWLQLFPMVWAEKAGMGLANQVPPVVVELKSDASPVAVRQYPMSKEAREGIRPHIQRFLDLGILVPCQSPWNTPLLPVKKPGTNDYRPVQDLREVNKRVQDIHPTVPNPYNLLSSLPPSHTWYSVLDLKDAFFCLKLHPNSQPLFAFEWRDPEKGNTGQLTWTRLPQGFKNSPTLFNEALHRDLASFRALNPQVVMLQYVDDLLVAAPTYRDCKEGTRRLLQELSKLGYRVSAKKAQLCREEVTYLGYLLKGGKRWLTPARKATVMKIPTPTTPRQVREFLGTAGFCRLWIPGFASLAAPLYPLTRPKVPFTWTEAHQEAFGRIKEALLSAPALALPDLTKPFALYVDEKEGVARGVLTQTLGPWRRPVAYLSKKLDPVASGWPTCLKAIAAVALLLKDADKLTLGQNVLVIAPHNLESIVRQPPDRWMTNARMTHYQSLLLNERVSFAPPAILNPATLLPVESDDTPIHICSEILAEETGTRPDLRDQPLPGVPAWYTDGSSFIMDGRRQAGAAIVDNKRTVWASNLPEGTSAQKAELIALTQALRLAEGKSINIYTDSRYAFATAHVHGAIYKQRGWLTSAGKDIKNKEEILALLEAIHLPKRVAIIHCPGHQRGTDPVATGNRKADEAAKQAAQSTRILTETTKNAGKRTADGSEFEKRTADGSEFESPKKKAKVE

SEQ ID NO: 6721 - protein, 2091 aa, synthetic construct
MPAAKRVKLDGGDKKYSIGLDIGTNSVGWAVITDEYKVPSKKFKVLGNTDRHSIKKNLIGALLFDSGETAEATRLKRTARRRYTRRKNRICYLQEIFSNEMAKVDDSFFHRLEESFLVEEDKKHERHPIFGNIVDEVAYHEKYPTIYHLRKKLVDSTDKADLRLIYLALAHMIKFRGHFLIEGDLNPDNSDVDKLFIQLVQTYNQLFEENPINASGVDAKAILSARLSKSRRLENLIAQLPGEKKNGLFGNLIALSLGLTPNFKSNFDLAEDAKLQLSKDTYDDDLDNLLAQIGDQYADLFLAAKNLSDAILLSDILRVNTEITKAPLSASMIKRYDEHHQDLTLLKALVRQQLPEKYKEIFFDQSKNGYAGYIDGGASQEEFYKFIKPILEKMDGTEELLVKLNREDLLRKQRTFDNGSIPHQIHLGELHAILRRQEDFYPFLKDNREKIEKILTFRIPYYVGPLARGNSRFAWMTRKSEETITPWNFEEVVDKGASAQSFIERMTNFDKNLPNEKVLPKHSLLYEYFTVYNELTKVKYVTEGMRKPAFLSGEQKKAIVDLLFKTNRKVTVKQLKEDYFKKIECFDSVEISGVEDRFNASLGTYHDLLKIIKDKDFLDNEENEDILEDIVLTLTLFEDREMIEERLKTYAHLFDDKVMKQLKRRRYTGWGRLSRKLINGIRDKQSGKTILDFLKSDGFANRNFMQLIHDDSLTFKEDIQKAQVSGQGDSLHEHIANLAGSPAIKKGILQTVKVVDELVKVMGRHKPENIVIEMARENQTTQKGQKNSRERMKRIEEGIKELGSQILKEHPVENTQLQNEKLYLYYLQNGRDMYVDQELDINRLSDYDVDHIVPQSFLKDDSIDNKVLTRSDKARGKSDNVPSEEVVKKMKNYWRQLLNAKLITQRKFDNLTKAERGGLSELDKAGFIKRQLVETRQITKHVAQILDSRMNTKYDENDKLIREVKVITLKSKLVSDFRKDFQFYKVREINNYHHAHDAYLNAVVGTALIKKYPKLESEFVYGDYKVYDVRKMIAKSEQEIGKATAKYFFYSNIMNFFKTEITLANGEIRKRPLIETNGETGEIVWDKGRDFATVRKVLSMPQVNIVKKTEVQTGGFSKESILPKRNSDKLIARKKDWDPKKYGGFDSPTVAYSVLVVAKVEKGKSKKLKSVKELLGITIMERSSFEKNPIDFLEAKGYKEVKKDLIIKLPKYSLFELENGRKRMLASAGELQKGNELALPSKYVNFLYLASHYEKLKGSPEDNEQKQLFVEQHKHYLDEIIEQISEFSKRVILADANLDKVLSAYNKHRDKPIREQAENIIHLFTLTNLGAPAAFKYFDTTIDRKRYTSTKEVLDATLIHQSITGLYETRIDLSQLGGDGGPAPGGGGGTLGIEDEYRLHETSTEPDVSLGSTWLSDFPQAWAETGGMGLAVRQAPLIIPLKATSTPVSIQQYPMSHEARLGIKPHIQRLLDQGILVPCQSPWNTPLLPVKKPGTNDYRPVQDLREVNKRVEDIHPTVPNPYNLLSGLPPSHQWYTVLDLKDAFFCLRLHPTSQPLFAFEWRDPGMGISGQLTWTRLPQGFKNSPTLFNEALHRDLADFRIQHPDLILLQYVDDILLAATSELDCQQGTRALLQTLGDLGYRASAKKAQICQKQVKYLGYLLREGQRWLTEARKETVMGQPVPKTPRQLREFLGTAGFCRLWIPGFAEMAAPLYPLTKPGTLFSWGPDQQKAYQEIKQALLTAPALGLPDLTKPFELFVDEKQGYAKGVLTQKLGPWRRPVAYLSKKLDPVAAGWPPCLRMVAAIAVLTKDAGKLTMGQPLVILAPHAVEALVKQPPDRWLSNARMTHYQAMLLDTDRVQFGPVVALNPATLLPLPEEGAPHDCLEILAETHGTRPDLTDQPIPDADHTWYTDGSSFLQEGQRKAGAAVTTETEVIWAGALPAGTSAQRAELIALTQALKMAEGKRLNVYTDSRYAFATAHIHGEIYRRRGWLTSEGREIKNKSEILALLKALFLPKRLSIIHCLGHQKGDSAEARGNRLADQAAREAAIKTPPDTSTLLAGKRTADGSEFEKRTADGSEFESPKKKAKVE

SEQ ID NO: 6722 - protein, 2085 aa, synthetic construct
MPAAKRVKLDGGDKKYSIGLDIGTNSVGWAVITDEYKVPSKKFKVLGNTDRHSIKKNLIGALLFDSGETAEATRLKRTARRRYTRRKNRICYLQEIFSNEMAKVDDSFFHRLEESFLVEEDKKHERHPIFGNIVDEVAYHEKYPTIYHLRKKLVDSTDKADLRLIYLALAHMIKFRGHFLIEGDLNPDNSDVDKLFIQLVQTYNQLFEENPINASGVDAKAILSARLSKSRRLENLIAQLPGEKKNGLFGNLIALSLGLTPNFKSNFDLAEDAKLQLSKDTYDDDLDNLLAQIGDQYADLFLAAKNLSDAILLSDILRVNTEITKAPLSASMIKRYDEHHQDLTLLKALVRQQLPEKYKEIFFDQSKNGYAGYIDGGASQEEFYKFIKPILEKMDGTEELLVKLNREDLLRKQRTFDNGSIPHQIHLGELHAILRRQEDFYPFLKDNREKIEKILTFRIPYYVGPLARGNSRFAWMTRKSEETITPWNFEEVVDKGASAQSFIERMTNFDKNLPNEKVLPKHSLLYEYFTVYNELTKVKYVTEGMRKPAFLSGEQKKAIVDLLFKTNRKVTVKQLKEDYFKKIECFDSVEISGVEDRFNASLGTYHDLLKIIKDKDFLDNEENEDILEDIVLTLTLFEDREMIEERLKTYAHLFDDKVMKQLKRRRYTGWGRLSRKLINGIRDKQSGKTILDFLKSDGFANRNFMQLIHDDSLTFKEDIQKAQVSGQGDSLHEHIANLAGSPAIKKGILQTVKVVDELVKVMGRHKPENIVIEMARENQTTQKGQKNSRERMKRIEEGIKELGSQILKEHPVENTQLQNEKLYLYYLQNGRDMYVDQELDINRLSDYDVDHIVPQSFLKDDSIDNKVLTRSDKARGKSDNVPSEEVVKKMKNYWRQLLNAKLITQRKFDNLTKAERGGLSELDKAGFIKRQLVETRQITKHVAQILDSRMNTKYDENDKLIREVKVITLKSKLVSDFRKDFQFYKVREINNYHHAHDAYLNAVVGTALIKKYPKLESEFVYGDYKVYDVRKMIAKSEQEIGKATAKYFFYSNIMNFFKTEITLANGEIRKRPLIETNGETGEIVWDKGRDFATVRKVLSMPQVNIVKKTEVQTGGFSKESILPKRNSDKLIARKKDWDPKKYGGFDSPTVAYSVLVVAKVEKGKSKKLKSVKELLGITIMERSSFEKNPIDFLEAKGYKEVKKDLIIKLPKYSLFELENGRKRMLASAGELQKGNELALPSKYVNFLYLASHYEKLKGSPEDNEQKQLFVEQHKHYLDEIIEQISEFSKRVILADANLDKVLSAYNKHRDKPIREQAENIIHLFTLTNLGAPAAFKYFDTTIDRKRYTSTKEVLDATLIHQSITGLYETRIDLSQLGGDGGPAPGGGGGTLQLDDEYRLYSPLVKPDQNIQFWLEQFPQAWAETAGMGLAKQVPPQVIQLKASATPVSVRQYPLSKEAQEGIRPHVQRLIQQGILVPVQSPWNTPLLPVRKPGTNDYRPVQDLREVNKRVQDIHPTVPNPYNLLCALPPQRSWYTVLDLKDAFFCLRLHPTSQPLFAFEWRDPGTGRTGQLTWTRLPQGFKNSPTIFDEALHRDLANFRIQHPQVTLLQYVDDLLLAGATKQDCLEGTKALLLELSDLGYRASAKKAQICRREVTYLGYSLRDGQRWLTEARKKTVVQIPAPTTAKQVREFLGTAGFCRLWIPGFATLAAPLYPLTKEKGEFSWAPEHQKAFDAIKKALLSAPALALPDVTKPFTLYVDERKGVARGVLTQTLGPWRRPVAYLSKKLDPVASGWPVCLKAIAAVAILVKDADKLTLGQNITVIAPHALENIVRQPPDRWMTNARMTHYQSLLLTERVTFAPPAALNPATLLPEETDEPVTHDCHQLLIEETGVRKDLTDIPLTGEVLTWFTDGSSYVVEGKRMAGAAVVDGTRTIWASSLPEGTSAQKAELMALTQALRLAEGKSINIYTDSRYAFATAHVHGAIYKQRGLLTSAGREIKNKEEILSLLEALHLPKRLAIIHCPGHQKAKDPISRGNQMADRVAKQAAQGVNLLAGKRTADGSEFEKRTADGSEFESPKKKAKVE

SEQ ID NO: 6723 - protein, 2082 aa, synthetic construct
MPAAKRVKLDGGDKKYSIGLDIGTNSVGWAVITDEYKVPSKKFKVLGNTDRHSIKKNLIGALLFDSGETAEATRLKRTARRRYTRRKNRICYLQEIFSNEMAKVDDSFFHRLEESFLVEEDKKHERHPIFGNIVDEVAYHEKYPTIYHLRKKLVDSTDKADLRLIYLALAHMIKFRGHFLIEGDLNPDNSDVDKLFIQLVQTYNQLFEENPINASGVDAKAILSARLSKSRRLENLIAQLPGEKKNGLFGNLIALSLGLTPNFKSNFDLAEDAKLQLSKDTYDDDLDNLLAQIGDQYADLFLAAKNLSDAILLSDILRVNTEITKAPLSASMIKRYDEHHQDLTLLKALVRQQLPEKYKEIFFDQSKNGYAGYIDGGASQEEFYKFIKPILEKMDGTEELLVKLNREDLLRKQRTFDNGSIPHQIHLGELHAILRRQEDFYPFLKDNREKIEKILTFRIPYYVGPLARGNSRFAWMTRKSEETITPWNFEEVVDKGASAQSFIERMTNFDKNLPNEKVLPKHSLLYEYFTVYNELTKVKYVTEGMRKPAFLSGEQKKAIVDLLFKTNRKVTVKQLKEDYFKKIECFDSVEISGVEDRFNASLGTYHDLLKIIKDKDFLDNEENEDILEDIVLTLTLFEDREMIEERLKTYAHLFDDKVMKQLKRRRYTGWGRLSRKLINGIRDKQSGKTILDFLKSDGFANRNFMQLIHDDSLTFKEDIQKAQVSGQGDSLHEHIANLAGSPAIKKGILQTVKVVDELVKVMGRHKPENIVIEMARENQTTQKGQKNSRERMKRIEEGIKELGSQILKEHPVENTQLQNEKLYLYYLQNGRDMYVDQELDINRLSDYDVDHIVPQSFLKDDSIDNKVLTRSDKARGKSDNVPSEEVVKKMKNYWRQLLNAKLITQRKFDNLTKAERGGLSELDKAGFIKRQLVETRQITKHVAQILDSRMNTKYDENDKLIREVKVITLKSKLVSDFRKDFQFYKVREINNYHHAHDAYLNAVVGTALIKKYPKLESEFVYGDYKVYDVRKMIAKSEQEIGKATAKYFFYSNIMNFFKTEITLANGEIRKRPLIETNGETGEIVWDKGRDFATVRKVLSMPQVNIVKKTEVQTGGFSKESILPKRNSDKLIARKKDWDPKKYGGFDSPTVAYSVLVVAKVEKGKSKKLKSVKELLGITIMERSSFEKNPIDFLEAKGYKEVKKDLIIKLPKYSLFELENGRKRMLASAGELQKGNELALPSKYVNFLYLASHYEKLKGSPEDNEQKQLFVEQHKHYLDEIIEQISEFSKRVILADANLDKVLSAYNKHRDKPIREQAENIIHLFTLTNLGAPAAFKYFDTTIDRKRYTSTKEVLDATLIHQSITGLYETRIDLSQLGGDGGPAPGGGGGIPWLMKKPLQLTTLVPLQEYEERLLKQTMLTGSYKEKLQSLFLKYDALWQHWENQVGHRRIKPHHIATGTVNPRPQKQYPINPKAKASIQTVINDLLKQGVLIQQNSIMNTPVYPVPKPDGKWRMVLDYREVNKTIPLIAAQNQHSAGILSSIFRGKYKTTLDLSNGFWAHSITPESYWLTAFTWLGQQYCWTRLPQGFLNSPALFNADVVDLLKEVPNVQVYVDDIYISHDDPREHLEQLEKVFSLLLNAGYVVSLKKSEIAQHEVEFLGFNITKEGRGLTETFKQKLLNITPPRDLKQLQSILGLLNFARNFIPNFSELVKPLYNIIATAPGKYITWTTDNSQQLQNIISMLNSAENLEERNPEVRLIMKVNTSPSAGYIRFYNEFAKRPIMYLNYVYTKAEVKFTNTEKLLTTIHKGLIKALDLGMGQEILVYSPIVSMTKIQKTPLPERKALPIRWITWMSYLEDPRIQFHYDKTLPELQQVPTVTDDIIAKIKHPSEFSMVFYTDGSAIKHPNVNKSHNAGMGIAQVQFKPEFTVINTWSIPLGDHTAQLAEVAAVEFACKKALKIDGPVLIVTDSFYVAESVNKELPYWQSNGFFNNKKKPLKHVSKWKSIADCIQLKPDIIIIHEKGHQPTASTFHTEGNNLADKLATQGSYVVNAGKRTADGSEFEKRTADGSEFESPKKKAKVE

SEQ ID NO: 6724 - protein, 2082 aa, synthetic construct
MPAAKRVKLDGGDKKYSIGLDIGTNSVGWAVITDEYKVPSKKFKVLGNTDRHSIKKNLIGALLFDSGETAEATRLKRTARRRYTRRKNRICYLQEIFSNEMAKVDDSFFHRLEESFLVEEDKKHERHPIFGNIVDEVAYHEKYPTIYHLRKKLVDSTDKADLRLIYLALAHMIKFRGHFLIEGDLNPDNSDVDKLFIQLVQTYNQLFEENPINASGVDAKAILSARLSKSRRLENLIAQLPGEKKNGLFGNLIALSLGLTPNFKSNFDLAEDAKLQLSKDTYDDDLDNLLAQIGDQYADLFLAAKNLSDAILLSDILRVNTEITKAPLSASMIKRYDEHHQDLTLLKALVRQQLPEKYKEIFFDQSKNGYAGYIDGGASQEEFYKFIKPILEKMDGTEELLVKLNREDLLRKQRTFDNGSIPHQIHLGELHAILRRQEDFYPFLKDNREKIEKILTFRIPYYVGPLARGNSRFAWMTRKSEETITPWNFEEVVDKGASAQSFIERMTNFDKNLPNEKVLPKHSLLYEYFTVYNELTKVKYVTEGMRKPAFLSGEQKKAIVDLLFKTNRKVTVKQLKEDYFKKIECFDSVEISGVEDRFNASLGTYHDLLKIIKDKDFLDNEENEDILEDIVLTLTLFEDREMIEERLKTYAHLFDDKVMKQLKRRRYTGWGRLSRKLINGIRDKQSGKTILDFLKSDGFANRNFMQLIHDDSLTFKEDIQKAQVSGQGDSLHEHIANLAGSPAIKKGILQTVKVVDELVKVMGRHKPENIVIEMARENQTTQKGQKNSRERMKRIEEGIKELGSQILKEHPVENTQLQNEKLYLYYLQNGRDMYVDQELDINRLSDYDVDHIVPQSFLKDDSIDNKVLTRSDKARGKSDNVPSEEVVKKMKNYWRQLLNAKLITQRKFDNLTKAERGGLSELDKAGFIKRQLVETRQITKHVAQILDSRMNTKYDENDKLIREVKVITLKSKLVSDFRKDFQFYKVREINNYHHAHDAYLNAVVGTALIKKYPKLESEFVYGDYKVYDVRKMIAKSEQEIGKATAKYFFYSNIMNFFKTEITLANGEIRKRPLIETNGETGEIVWDKGRDFATVRKVLSMPQVNIVKKTEVQTGGFSKESILPKRNSDKLIARKKDWDPKKYGGFDSPTVAYSVLVVAKVEKGKSKKLKSVKELLGITIMERSSFEKNPIDFLEAKGYKEVKKDLIIKLPKYSLFELENGRKRMLASAGELQKGNELALPSKYVNFLYLASHYEKLKGSPEDNEQKQLFVEQHKHYLDEIIEQISEFSKRVILADANLDKVLSAYNKHRDKPIREQAENIIHLFTLTNLGAPAAFKYFDTTIDRKRYTSTKEVLDATLIHQSITGLYETRIDLSQLGGDGGPAPGGGGGIPWLMKKPLQLTTLVPLQEYEERLLKQTMLTGSYKEKLQSLFLKYDALWQHWENQVGHRRIKPHHIATGTVNPRPQKQYPINPKAKASIQTVINDLLKQGVLIQQNSIMNTPVYPVPKPDGKWRMVLDYREVNKTIPLIAAQNQHSAGILSSIFRGKYKTTLDLSNGFWAHSITPESYWLTAFTWLGQQYCWTRLPQGFLNSPALFNADVVDLLKEVPNVQVYVDDIYISHDDPREHLEQLEKVFSLLLNAGYVVSLKKSEIAQHEVEFLGFNITKEGRGLTETFKQKLLNITPPRDLKQLQSILGKLNFARNFIPNFSELVKPLYNIIATAPGKYITWTTDNSQQLQNIISMLNSAENLEERNPEVRLIMKVNTSPSAGYIRFYNEFAKRPIMYLNYVYTKAEVKFTNTEKLLTTIHKGLIKALDLGMGQEILVYSPIVSMTKIQKTPLPERKALPIRWITWMSYLEDPRIQFHYDKTLPELQQVPTVTDDIIAKIKHPSEFSMVFYTDGSAIKHPNVNKSHNAGMGIAQVQFKPEFTVINTWSIPLGDHTAQLAEVAAVEFACKKALKIDGPVLIVTDSFYVAESVNKELPYWQSNGFFNNKKKPLKHVSKWKSIADCIQLKPDIIIIHEKGHQPTASTFHTEGNNLADKLATQGSYVVNAGKRTADGSEFEKRTADGSEFESPKKKAKVE

SEQ ID NO: 6725 - protein, 2091 aa, synthetic construct
MPAAKRVKLDGGDKKYSIGLDIGTNSVGWAVITDEYKVPSKKFKVLGNTDRHSIKKNLIGALLFDSGETAEATRLKRTARRRYTRRKNRICYLQEIFSNEMAKVDDSFFHRLEESFLVEEDKKHERHPIFGNIVDEVAYHEKYPTIYHLRKKLVDSTDKADLRLIYLALAHMIKFRGHFLIEGDLNPDNSDVDKLFIQLVQTYNQLFEENPINASGVDAKAILSARLSKSRRLENLIAQLPGEKKNGLFGNLIALSLGLTPNFKSNFDLAEDAKLQLSKDTYDDDLDNLLAQIGDQYADLFLAAKNLSDAILLSDILRVNTEITKAPLSASMIKRYDEHHQDLTLLKALVRQQLPEKYKEIFFDQSKNGYAGYIDGGASQEEFYKFIKPILEKMDGTEELLVKLNREDLLRKQRTFDNGSIPHQIHLGELHAILRRQEDFYPFLKDNREKIEKILTFRIPYYVGPLARGNSRFAWMTRKSEETITPWNFEEVVDKGASAQSFIERMTNFDKNLPNEKVLPKHSLLYEYFTVYNELTKVKYVTEGMRKPAFLSGEQKKAIVDLLFKTNRKVTVKQLKEDYFKKIECFDSVEISGVEDRFNASLGTYHDLLKIIKDKDFLDNEENEDILEDIVLTLTLFEDREMIEERLKTYAHLFDDKVMKQLKRRRYTGWGRLSRKLINGIRDKQSGKTILDFLKSDGFANRNFMQLIHDDSLTFKEDIQKAQVSGQGDSLHEHIANLAGSPAIKKGILQTVKVVDELVKVMGRHKPENIVIEMARENQTTQKGQKNSRERMKRIEEGIKELGSQILKEHPVENTQLQNEKLYLYYLQNGRDMYVDQELDINRLSDYDVDHIVPQSFLKDDSIDNKVLTRSDKARGKSDNVPSEEVVKKMKNYWRQLLNAKLITQRKFDNLTKAERGGLSELDKAGFIKRQLVETRQITKHVAQILDSRMNTKYDENDKLIREVKVITLKSKLVSDFRKDFQFYKVREINNYHHAHDAYLNAVVGTALIKKYPKLESEFVYGDYKVYDVRKMIAKSEQEIGKATAKYFFYSNIMNFFKTEITLANGEIRKRPLIETNGETGEIVWDKGRDFATVRKVLSMPQVNIVKKTEVQTGGFSKESILPKRNSDKLIARKKDWDPKKYGGFDSPTVAYSVLVVAKVEKGKSKKLKSVKELLGITIMERSSFEKNPIDFLEAKGYKEVKKDLIIKLPKYSLFELENGRKRMLASAGELQKGNELALPSKYVNFLYLASHYEKLKGSPEDNEQKQLFVEQHKHYLDEIIEQISEFSKRVILADANLDKVLSAYNKHRDKPIREQAENIIHLFTLTNLGAPAAFKYFDTTIDRKRYTSTKEVLDATLIHQSITGLYETRIDLSQLGGDGGPAPGGGGGTLNIEDEYRLHETSKEPDVPLGSTWLSDFPQAWAETGGMGLAVRQAPLIIPLKATSTPVSIKQYPMSQEARLGIKPHIQRLLDQGILVPCQSPWNTPLLPVKKPGTNDYRPVQDLREVNKRVEDIHPTVPNPYNLLSGLPPSHQWYTVLDLKDAFFCLRLHPTSQPLFAFEWRDPEMGISGQLTWTRLPQGFKNSPTLFNEALHRDLADFRIQHPDLILLQYVDDLLLAATSEQDCQRGTRALLQTLGNLGYRASAKKAQICQKQVKYLGYLLKEGQRWLTEARKETVMGQPTPKTPRQLREFLGTAGFCRLWIPGFAEMAAPLYPLTKPGTLFNWGPDQQKAYQEIKQALLTAPALGLPDLTKPFELFVDEKQGYAKGVLTQKLGPWRRPVAYLSKKLDPVAAGWPPCLRMVAAIAVLTKDAGKLTMGQPLVILAPHAVEALVKQPPDRWLSNARMTHYQAMLLDTDRVQFGPVVALNPATLLPLPEKEAPHDCLEILAETHGTRPDLTDQPIPDADYTWYTDGSSFLQEGQRRAGAAVTTETEVIWARALPAGTSAQRAELIALTQALKMAEGKKLNVYTDSRYAFATAHVHGEIYRRRGWLTSEGREIKNKNEILALLKALFLPKRLSIIHCPGHQKGNSAEARGNRMADQAAREAAMKAVLETSTLLAGKRTADGSEFEKRTADGSEFESPKKKAKVE

SEQ ID NO: 6726 - protein, 2091 aa, synthetic construct
MPAAKRVKLDGGDKKYSIGLDIGTNSVGWAVITDEYKVPSKKFKVLGNTDRHSIKKNLIGALLFDSGETAEATRLKRTARRRYTRRKNRICYLQEIFSNEMAKVDDSFFHRLEESFLVEEDKKHERHPIFGNIVDEVAYHEKYPTIYHLRKKLVDSTDKADLRLIYLALAHMIKFRGHFLIEGDLNPDNSDVDKLFIQLVQTYNQLFEENPINASGVDAKAILSARLSKSRRLENLIAQLPGEKKNGLFGNLIALSLGLTPNFKSNFDLAEDAKLQLSKDTYDDDLDNLLAQIGDQYADLFLAAKNLSDAILLSDILRVNTEITKAPLSASMIKRYDEHHQDLTLLKALVRQQLPEKYKEIFFDQSKNGYAGYIDGGASQEEFYKFIKPILEKMDGTEELLVKLNREDLLRKQRTFDNGSIPHQIHLGELHAILRRQEDFYPFLKDNREKIEKILTFRIPYYVGPLARGNSRFAWMTRKSEETITPWNFEEVVDKGASAQSFIERMTNFDKNLPNEKVLPKHSLLYEYFTVYNELTKVKYVTEGMRKPAFLSGEQKKAIVDLLFKTNRKVTVKQLKEDYFKKIECFDSVEISGVEDRFNASLGTYHDLLKIIKDKDFLDNEENEDILEDIVLTLTLFEDREMIEERLKTYAHLFDDKVMKQLKRRRYTGWGRLSRKLINGIRDKQSGKTILDFLKSDGFANRNFMQLIHDDSLTFKEDIQKAQVSGQGDSLHEHIANLAGSPAIKKGILQTVKVVDELVKVMGRHKPENIVIEMARENQTTQKGQKNSRERMKRIEEGIKELGSQILKEHPVENTQLQNEKLYLYYLQNGRDMYVDQELDINRLSDYDVDHIVPQSFLKDDSIDNKVLTRSDKARGKSDNVPSEEVVKKMKNYWRQLLNAKLITQRKFDNLTKAERGGLSELDKAGFIKRQLVETRQITKHVAQILDSRMNTKYDENDKLIREVKVITLKSKLVSDFRKDFQFYKVREINNYHHAHDAYLNAVVGTALIKKYPKLESEFVYGDYKVYDVRKMIAKSEQEIGKATAKYFFYSNIMNFFKTEITLANGEIRKRPLIETNGETGEIVWDKGRDFATVRKVLSMPQVNIVKKTEVQTGGFSKESILPKRNSDKLIARKKDWDPKKYGGFDSPTVAYSVLVVAKVEKGKSKKLKSVKELLGITIMERSSFEKNPIDFLEAKGYKEVKKDLIIKLPKYSLFELENGRKRMLASAGELQKGNELALPSKYVNFLYLASHYEKLKGSPEDNEQKQLFVEQHKHYLDEIIEQISEFSKRVILADANLDKVLSAYNKHRDKPIREQAENIIHLFTLTNLGAPAAFKYFDTTIDRKRYTSTKEVLDATLIHQSITGLYETRIDLSQLGGDGGPAPGGGGGTLNIEDEYRLHETSKEPDVPLGSTWLSDFPQAWAETGGMGLAVRQAPLIIPLKATSTPVSIKQYPMSQEARLGIKPHIQRLLDQGILVPCQSPWNTPLLPVKKPGTNDYRPVQDLREVNKRVEDIHPTVPNPYNLLSGLPPSHQWYTVLDLKDAFFCLRLHPTSQPLFAFEWRDPEMGISGQLTWTRLPQGFKNSPTLFNEALHRDLADFRIQHPDLILLQYVDDLLLAATSEQDCQRGTRALLQTLGNLGYRASAKKAQICQKQVKYLGYLLKEGQRWLTEARKETVMGQPTPKTPRQLREFLGKAGFCRLFIPGFAEMAAPLYPLTKPGTLFNWGPDQQKAYQEIKQALLTAPALGLPDLTKPFELFVDEKQGYAKGVLTQKLGPWRRPVAYLSKKLDPVAAGWPPCLRMVAAIAVLTKDAGKLTMGQPLVILAPHAVEALVKQPPDRWLSNARMTHYQAMLLDTDRVQFGPVVALNPATLLPLPEKEAPHDCLEILAETHGTRPDLTDQPIPDADYTWYTDGSSFLQEGQRRAGAAVTTETEVIWARALPAGTSAQRAELIALTQALKMAEGKKLNVYTDSRYAFATAHVHGEIYRRRGWLTSEGREIKNKNEILALLKALFLPKRLSIIHCPGHQKGNSAEARGNRMADQAAREAAMKAVLETSTLLAGKRTADGSEFEKRTADGSEFESPKKKAKVE

SEQ ID NO: 6727 - protein, 2095 aa, synthetic construct
MPAAKRVKLDGGDKKYSIGLDIGTNSVGWAVITDEYKVPSKKFKVLGNTDRHSIKKNLIGALLFDSGETAEATRLKRTARRRYTRRKNRICYLQEIFSNEMAKVDDSFFHRLEESFLVEEDKKHERHPIFGNIVDEVAYHEKYPTIYHLRKKLVDSTDKADLRLIYLALAHMIKFRGHFLIEGDLNPDNSDVDKLFIQLVQTYNQLFEENPINASGVDAKAILSARLSKSRRLENLIAQLPGEKKNGLFGNLIALSLGLTPNFKSNFDLAEDAKLQLSKDTYDDDLDNLLAQIGDQYADLFLAAKNLSDAILLSDILRVNTEITKAPLSASMIKRYDEHHQDLTLLKALVRQQLPEKYKEIFFDQSKNGYAGYIDGGASQEEFYKFIKPILEKMDGTEELLVKLNREDLLRKQRTFDNGSIPHQIHLGELHAILRRQEDFYPFLKDNREKIEKILTFRIPYYVGPLARGNSRFAWMTRKSEETITPWNFEEVVDKGASAQSFIERMTNFDKNLPNEKVLPKHSLLYEYFTVYNELTKVKYVTEGMRKPAFLSGEQKKAIVDLLFKTNRKVTVKQLKEDYFKKIECFDSVEISGVEDRFNASLGTYHDLLKIIKDKDFLDNEENEDILEDIVLTLTLFEDREMIEERLKTYAHLFDDKVMKQLKRRRYTGWGRLSRKLINGIRDKQSGKTILDFLKSDGFANRNFMQLIHDDSLTFKEDIQKAQVSGQGDSLHEHIANLAGSPAIKKGILQTVKVVDELVKVMGRHKPENIVIEMARENQTTQKGQKNSRERMKRIEEGIKELGSQILKEHPVENTQLQNEKLYLYYLQNGRDMYVDQELDINRLSDYDVDHIVPQSFLKDDSIDNKVLTRSDKARGKSDNVPSEEVVKKMKNYWRQLLNAKLITQRKFDNLTKAERGGLSELDKAGFIKRQLVETRQITKHVAQILDSRMNTKYDENDKLIREVKVITLKSKLVSDFRKDFQFYKVREINNYHHAHDAYLNAVVGTALIKKYPKLESEFVYGDYKVYDVRKMIAKSEQEIGKATAKYFFYSNIMNFFKTEITLANGEIRKRPLIETNGETGEIVWDKGRDFATVRKVLSMPQVNIVKKTEVQTGGFSKESILPKRNSDKLIARKKDWDPKKYGGFDSPTVAYSVLVVAKVEKGKSKKLKSVKELLGITIMERSSFEKNPIDFLEAKGYKEVKKDLIIKLPKYSLFELENGRKRMLASAGELQKGNELALPSKYVNFLYLASHYEKLKGSPEDNEQKQLFVEQHKHYLDEIIEQISEFSKRVILADANLDKVLSAYNKHRDKPIREQAENIIHLFTLTNLGAPAAFKYFDTTIDRKRYTSTKEVLDATLIHQSITGLYETRIDLSQLGGDGGGSSEAAAKGGTAPLEEEYRLFLEAPIQNVTLLEQWKREIPKVWAEINPPGLASTQAPIHVQLLSTALPVRVRQYPITLEAKRSLRETIRKFRAAGILRPVHSPWNTPLLPVRKSGTSEYRMVQDLREVNKRVETIHPTVPNPYTLLSLLPPDRIWYSVLDLKDAFFCIPLAPESQLIFAFEWADAEEGESGQLTWTRLPQGFKNSPTLFNEALNRDLQGFRLDHPSVSLLQYVDDLLIAADTQAACLSATRDLLMTLAELGYRVSGKKAQLCQEEVTYLGFKIHKGSRSLSNSRTQAILQIPVPKTKRQVREFLGTIGYCRLWIPGFAELAQPLYAATRPGNDPLVWGEKEEEAFQSLKLALTQPPALALPSLDKPFQLFVEETSGAAKGVLTQALGPWKRPVAYLSKRLDPVAAGWPRCLRAIAAAALLTREASKLTFGQDIEITSSHNLESLLRSPPDKWLTNARITQYQVLLLDPPRVRFKQTAALNPATLLPETDDTLPIHHCLDTLDSLTSTRPDLTDQPLAQAEATLFTDGSSYIRDGKRYAGAAVVTLDSVIWAEPLPIGTSAQKAELIALTKALEWSKDKSVNIYTDSRYAFATLHVHGMIYRERGWLTAGGKAIKNAPEILALLTAVWLPKRVAVMHCKGHQKDDAPTSTGNRRADEVAREVAIRPLSTQATISAGKRTADGSEFEKRTADGSEFESPKKKAKVE

SEQ ID NO: 6728 - protein, 2099 aa, synthetic construct
MPAAKRVKLDGGDKKYSIGLDIGTNSVGWAVITDEYKVPSKKFKVLGNTDRHSIKKNLIGALLFDSGETAEATRLKRTARRRYTRRKNRICYLQEIFSNEMAKVDDSFFHRLEESFLVEEDKKHERHPIFGNIVDEVAYHEKYPTIYHLRKKLVDSTDKADLRLIYLALAHMIKFRGHFLIEGDLNPDNSDVDKLFIQLVQTYNQLFEENPINASGVDAKAILSARLSKSRRLENLIAQLPGEKKNGLFGNLIALSLGLTPNFKSNFDLAEDAKLQLSKDTYDDDLDNLLAQIGDQYADLFLAAKNLSDAILLSDILRVNTEITKAPLSASMIKRYDEHHQDLTLLKALVRQQLPEKYKEIFFDQSKNGYAGYIDGGASQEEFYKFIKPILEKMDGTEELLVKLNREDLLRKQRTFDNGSIPHQIHLGELHAILRRQEDFYPFLKDNREKIEKILTFRIPYYVGPLARGNSRFAWMTRKSEETITPWNFEEVVDKGASAQSFIERMTNFDKNLPNEKVLPKHSLLYEYFTVYNELTKVKYVTEGMRKPAFLSGEQKKAIVDLLFKTNRKVTVKQLKEDYFKKIECFDSVEISGVEDRFNASLGTYHDLLKIIKDKDFLDNEENEDILEDIVLTLTLFEDREMIEERLKTYAHLFDDKVMKQLKRRRYTGWGRLSRKLINGIRDKQSGKTILDFLKSDGFANRNFMQLIHDDSLTFKEDIQKAQVSGQGDSLHEHIANLAGSPAIKKGILQTVKVVDELVKVMGRHKPENIVIEMARENQTTQKGQKNSRERMKRIEEGIKELGSQILKEHPVENTQLQNEKLYLYYLQNGRDMYVDQELDINRLSDYDVDHIVPQSFLKDDSIDNKVLTRSDKARGKSDNVPSEEVVKKMKNYWRQLLNAKLITQRKFDNLTKAERGGLSELDKAGFIKRQLVETRQITKHVAQILDSRMNTKYDENDKLIREVKVITLKSKLVSDFRKDFQFYKVREINNYHHAHDAYLNAVVGTALIKKYPKLESEFVYGDYKVYDVRKMIAKSEQEIGKATAKYFFYSNIMNFFKTEITLANGEIRKRPLIETNGETGEIVWDKGRDFATVRKVLSMPQVNIVKKTEVQTGGFSKESILPKRNSDKLIARKKDWDPKKYGGFDSPTVAYSVLVVAKVEKGKSKKLKSVKELLGITIMERSSFEKNPIDFLEAKGYKEVKKDLIIKLPKYSLFELENGRKRMLASAGELQKGNELALPSKYVNFLYLASHYEKLKGSPEDNEQKQLFVEQHKHYLDEIIEQISEFSKRVILADANLDKVLSAYNKHRDKPIREQAENIIHLFTLTNLGAPAAFKYFDTTIDRKRYTSTKEVLDATLIHQSITGLYETRIDLSQLGGDGGGSSEAAAKGGTVSLQDEHRLFDIPVTTSLPDVWLQDFPQAWAETGGLGRAKCQAPIIIDLKPTAVPVSIKQYPMSLEAHMGIRQHIIKFLELGVLRPCRSPWNTPLLPVKKPGTQDYRPVQDLREINKRTVDIHPTVPNPYNLLSTLKPDYSWYTVLDLKDAFFCLPLAPQSQELFAFEWKDPERGISGQLTWTRLPQGFKNSPTLFNEALHRDLTDFRTQHPEVTLLQYVDDLLLAAPTKKACTQGTRHLLQELGEKGYRASAKKAQICQTKVTYLGYILSEGKRWLTPGRIETVARIPPPRNPREVREFLGTAGFCRLWIPGFAELAAPLYALTKPSTPFTWQTEHQLAFEALKKALLSAPALGLPDTSKPFTLFLDERQGIAKGVLTQKLGPWKRPVAYLSKKLDPVAAGWPPCLRIMAATAMLVKDSAKLTLGQPLTVITPHTLEAIVRQPPDRWITNARLTHYQALLLDTDRVQFGPPVTLNPATLLPVPENQPSPHDCRQVLAETHGTREDLKDQELPDADHTWYTDGSSYLDSGTRRAGAAVVDGHNTIWAQSLPPGTSAQKAELIALTKALELSKGKKANIYTDSRYAFATAHTHGSIYERRGWLTSEGKEIKNKAEIIALLKALFLPQEVAIIHCPGHQKGQDPVAVGNRQADRVARQAAMAEVLTLATEPDNTSHITAGKRTADGSEFEKRTADGSEFESPKKKAKVE

SEQ ID NO: 6729 - protein, 2124 aa, synthetic construct
MPAAKRVKLDGGDKKYSIGLDIGTNSVGWAVITDEYKVPSKKFKVLGNTDRHSIKKNLIGALLFDSGETAEATRLKRTARRRYTRRKNRICYLQEIFSNEMAKVDDSFFHRLEESFLVEEDKKHERHPIFGNIVDEVAYHEKYPTIYHLRKKLVDSTDKADLRLIYLALAHMIKFRGHFLIEGDLNPDNSDVDKLFIQLVQTYNQLFEENPINASGVDAKAILSARLSKSRRLENLIAQLPGEKKNGLFGNLIALSLGLTPNFKSNFDLAEDAKLQLSKDTYDDDLDNLLAQIGDQYADLFLAAKNLSDAILLSDILRVNTEITKAPLSASMIKRYDEHHQDLTLLKALVRQQLPEKYKEIFFDQSKNGYAGYIDGGASQEEFYKFIKPILEKMDGTEELLVKLNREDLLRKQRTFDNGSIPHQIHLGELHAILRRQEDFYPFLKDNREKIEKILTFRIPYYVGPLARGNSRFAWMTRKSEETITPWNFEEVVDKGASAQSFIERMTNFDKNLPNEKVLPKHSLLYEYFTVYNELTKVKYVTEGMRKPAFLSGEQKKAIVDLLFKTNRKVTVKQLKEDYFKKIECFDSVEISGVEDRFNASLGTYHDLLKIIKDKDFLDNEENEDILEDIVLTLTLFEDREMIEERLKTYAHLFDDKVMKQLKRRRYTGWGRLSRKLINGIRDKQSGKTILDFLKSDGFANRNFMQLIHDDSLTFKEDIQKAQVSGQGDSLHEHIANLAGSPAIKKGILQTVKVVDELVKVMGRHKPENIVIEMARENQTTQKGQKNSRERMKRIEEGIKELGSQILKEHPVENTQLQNEKLYLYYLQNGRDMYVDQELDINRLSDYDVDHIVPQSFLKDDSIDNKVLTRSDKARGKSDNVPSEEVVKKMKNYWRQLLNAKLITQRKFDNLTKAERGGLSELDKAGFIKRQLVETRQITKHVAQILDSRMNTKYDENDKLIREVKVITLKSKLVSDFRKDFQFYKVREINNYHHAHDAYLNAVVGTALIKKYPKLESEFVYGDYKVYDVRKMIAKSEQEIGKATAKYFFYSNIMNFFKTEITLANGEIRKRPLIETNGETGEIVWDKGRDFATVRKVLSMPQVNIVKKTEVQTGGFSKESILPKRNSDKLIARKKDWDPKKYGGFDSPTVAYSVLVVAKVEKGKSKKLKSVKELLGITIMERSSFEKNPIDFLEAKGYKEVKKDLIIKLPKYSLFELENGRKRMLASAGELQKGNELALPSKYVNFLYLASHYEKLKGSPEDNEQKQLFVEQHKHYLDEIIEQISEFSKRVILADANLDKVLSAYNKHRDKPIREQAENIIHLFTLTNLGAPAAFKYFDTTIDRKRYTSTKEVLDATLIHQSITGLYETRIDLSQLGGDGGGSSEAAAKGGLLGRDLLTKLKAQIQFSTEGPQVTWEDRPAMCLVLNLEEEYRLHEKPVPPSIDPSWLQLFPMVWAEKAGMGLANQVPPVVVELKSDASPVAVRQYPMSKEAREGIRPHIQRFLDLGILVPCQSPWNTPLLPVKKPGTNDYRPVQDLREVNKRVQDIHPTVPNPYNLLSSLPPSHTWYSVLDLKDAFFCLKLHPNSQPLFAFEWRDPEKGNTGQLTWTRLPQGFKNSPTLFNEALHRDLASFRALNPQVVMLQYVDDLLVAAPTYRDCKEGTRRLLQELSKLGYRVSAKKAQLCREEVTYLGYLLKGGKRWLTPARKATVMKIPTPTTPRQVREFLGTAGFCRLWIPGFASLAAPLYPLTRPKVPFTWTEAHQEAFGRIKEALLSAPALALPDLTKPFALYVDEKEGVARGVLTQTLGPWRRPVAYLSKKLDPVASGWPTCLKAIAAVALLLKDADKLTLGQNVLVIAPHNLESIVRQPPDRWMTNARMTHYQSLLLNERVSFAPPAILNPATLLPVESDDTPIHICSEILAEETGTRPDLRDQPLPGVPAWYTDGSSFIMDGRRQAGAAIVDNKRTVWASNLPEGTSAQKAELIALTQALRLAEGKSINIYTDSRYAFATAHVHGAIYKQRGWLTSAGKDIKNKEEILALLEAIHLPKRVAIIHCPGHQRGTDPVATGNRKADEAAKQAAQSTRILTETTKNAGKRTADGSEFEKRTADGSEFESPKKKAKVE

SEQ ID NO: 6730 - protein, 2093 aa, synthetic construct
MPAAKRVKLDGGDKKYSIGLDIGTNSVGWAVITDEYKVPSKKFKVLGNTDRHSIKKNLIGALLFDSGETAEATRLKRTARRRYTRRKNRICYLQEIFSNEMAKVDDSFFHRLEESFLVEEDKKHERHPIFGNIVDEVAYHEKYPTIYHLRKKLVDSTDKADLRLIYLALAHMIKFRGHFLIEGDLNPDNSDVDKLFIQLVQTYNQLFEENPINASGVDAKAILSARLSKSRRLENLIAQLPGEKKNGLFGNLIALSLGLTPNFKSNFDLAEDAKLQLSKDTYDDDLDNLLAQIGDQYADLFLAAKNLSDAILLSDILRVNTEITKAPLSASMIKRYDEHHQDLTLLKALVRQQLPEKYKEIFFDQSKNGYAGYIDGGASQEEFYKFIKPILEKMDGTEELLVKLNREDLLRKQRTFDNGSIPHQIHLGELHAILRRQEDFYPFLKDNREKIEKILTFRIPYYVGPLARGNSRFAWMTRKSEETITPWNFEEVVDKGASAQSFIERMTNFDKNLPNEKVLPKHSLLYEYFTVYNELTKVKYVTEGMRKPAFLSGEQKKAIVDLLFKTNRKVTVKQLKEDYFKKIECFDSVEISGVEDRFNASLGTYHDLLKIIKDKDFLDNEENEDILEDIVLTLTLFEDREMIEERLKTYAHLFDDKVMKQLKRRRYTGWGRLSRKLINGIRDKQSGKTILDFLKSDGFANRNFMQLIHDDSLTFKEDIQKAQVSGQGDSLHEHIANLAGSPAIKKGILQTVKVVDELVKVMGRHKPENIVIEMARENQTTQKGQKNSRERMKRIEEGIKELGSQILKEHPVENTQLQNEKLYLYYLQNGRDMYVDQELDINRLSDYDVDHIVPQSFLKDDSIDNKVLTRSDKARGKSDNVPSEEVVKKMKNYWRQLLNAKLITQRKFDNLTKAERGGLSELDKAGFIKRQLVETRQITKHVAQILDSRMNTKYDENDKLIREVKVITLKSKLVSDFRKDFQFYKVREINNYHHAHDAYLNAVVGTALIKKYPKLESEFVYGDYKVYDVRKMIAKSEQEIGKATAKYFFYSNIMNFFKTEITLANGEIRKRPLIETNGETGEIVWDKGRDFATVRKVLSMPQVNIVKKTEVQTGGFSKESILPKRNSDKLIARKKDWDPKKYGGFDSPTVAYSVLVVAKVEKGKSKKLKSVKELLGITIMERSSFEKNPIDFLEAKGYKEVKKDLIIKLPKYSLFELENGRKRMLASAGELQKGNELALPSKYVNFLYLASHYEKLKGSPEDNEQKQLFVEQHKHYLDEIIEQISEFSKRVILADANLDKVLSAYNKHRDKPIREQAENIIHLFTLTNLGAPAAFKYFDTTIDRKRYTSTKEVLDATLIHQSITGLYETRIDLSQLGGDGGGSSEAAAKGGTLNLEDEYRLYETSAEPEVSPGSTWLSDFPQAWAETGGMGLAVRQAPLIIPLKATSTPVSIKQYPMSQEAKLGIKPHIQRLLDQGILVPCQSPWNTPLLPVKKPGTNDYRPVQDLREVNKRVEDIHPTVPNPYNLLSGLPPSHRWYTVLDLKDAFFCLRLHPTSQPLFAFEWRDPGMGISGQLTWTRLPQGFKNSPTLFNEALHRDLADFRIQHPDLILLQYVDDILLAATSELDCQQGTRALLLTLGNLGYRASAKKAQLCQKQVKYLGYLLKEGQRWLTEARKETVMGQPTPKTPRQLREFLGTAGFCRLWIPGFAEMAAPLYPLTKPGTLFNWGPDQQKAYQEIKQALLTAPALGLPDLTKPFELFVDEKQGYAKGVLTQKLGPWRRPVAYLSKKLDPVAAGWPPCLRMVAAIAVLRKDAGKLTMGQPLVILAPHAVEALVKQPPDRWLSNARMTHYQAMLLDTDRVQFGPVVALNPATLLPLPEEGAPHDCLEILAETHGTRPDLTDQPIPDADHTWYTDGSSFLQEGQRKAGAAVTTETEVIWARALPAGTSAQRAELIALTQALKMAEGKRLNVYTDSRYAFATAHIHGEIYRRRGWLTSEGREIKNKSEILALLKALFLPKRLSIIHCLGHQKGDSAEARGNRLADQAAREAAIKTPPDTSTLLAGKRTADGSEFEKRTADGSEFESPKKKAKVE

SEQ ID NO: 6731 - protein, 2093 aa, synthetic construct
MPAAKRVKLDGGDKKYSIGLDIGTNSVGWAVITDEYKVPSKKFKVLGNTDRHSIKKNLIGALLFDSGETAEATRLKRTARRRYTRRKNRICYLQEIFSNEMAKVDDSFFHRLEESFLVEEDKKHERHPIFGNIVDEVAYHEKYPTIYHLRKKLVDSTDKADLRLIYLALAHMIKFRGHFLIEGDLNPDNSDVDKLFIQLVQTYNQLFEENPINASGVDAKAILSARLSKSRRLENLIAQLPGEKKNGLFGNLIALSLGLTPNFKSNFDLAEDAKLQLSKDTYDDDLDNLLAQIGDQYADLFLAAKNLSDAILLSDILRVNTEITKAPLSASMIKRYDEHHQDLTLLKALVRQQLPEKYKEIFFDQSKNGYAGYIDGGASQEEFYKFIKPILEKMDGTEELLVKLNREDLLRKQRTFDNGSIPHQIHLGELHAILRRQEDFYPFLKDNREKIEKILTFRIPYYVGPLARGNSRFAWMTRKSEETITPWNFEEVVDKGASAQSFIERMTNFDKNLPNEKVLPKHSLLYEYFTVYNELTKVKYVTEGMRKPAFLSGEQKKAIVDLLFKTNRKVTVKQLKEDYFKKIECFDSVEISGVEDRFNASLGTYHDLLKIIKDKDFLDNEENEDILEDIVLTLTLFEDREMIEERLKTYAHLFDDKVMKQLKRRRYTGWGRLSRKLINGIRDKQSGKTILDFLKSDGFANRNFMQLIHDDSLTFKEDIQKAQVSGQGDSLHEHIANLAGSPAIKKGILQTVKVVDELVKVMGRHKPENIVIEMARENQTTQKGQKNSRERMKRIEEGIKELGSQILKEHPVENTQLQNEKLYLYYLQNGRDMYVDQELDINRLSDYDVDHIVPQSFLKDDSIDNKVLTRSDKARGKSDNVPSEEVVKKMKNYWRQLLNAKLITQRKFDNLTKAERGGLSELDKAGFIKRQLVETRQITKHVAQILDSRMNTKYDENDKLIREVKVITLKSKLVSDFRKDFQFYKVREINNYHHAHDAYLNAVVGTALIKKYPKLESEFVYGDYKVYDVRKMIAKSEQEIGKATAKYFFYSNIMNFFKTEITLANGEIRKRPLIETNGETGEIVWDKGRDFATVRKVLSMPQVNIVKKTEVQTGGFSKESILPKRNSDKLIARKKDWDPKKYGGFDSPTVAYSVLVVAKVEKGKSKKLKSVKELLGITIMERSSFEKNPIDFLEAKGYKEVKKDLIIKLPKYSLFELENGRKRMLASAGELQKGNELALPSKYVNFLYLASHYEKLKGSPEDNEQKQLFVEQHKHYLDEIIEQISEFSKRVILADANLDKVLSAYNKHRDKPIREQAENIIHLFTLTNLGAPAAFKYFDTTIDRKRYTSTKEVLDATLIHQSITGLYETRIDLSQLGGDGGGSSEAAAKGGTLNIEDEYRLHETSKEPDVPLGSTWLSDFPQAWAETGGMGLAVRQAPLIIPLKATSTPVSIKQYPMSQEARLGIKPHIQRLLDQGILVPCQSPWNTPLLPVKKPGTNDYRPVQDLREVNKRVEDIHPTVPNPYNLLSGLPPSHQWYTVLDLKDAFFCLRLHPTSQPLFAFEWRDPEMGISGQLTWTRLPQGFKNSPTLFNEALHRDLADFRIQHPDLILLQYVDDLLLAATSEQDCQRGTRALLQTLGNLGYRASAKKAQICQKQVKYLGYLLKEGQRWLTEARKETVMGQPTPKTPRQLREFLGKAGFCRLFIPGFAEMAAPLYPLTKPGTLFNWGPDQQKAYQEIKQALLTAPALGLPDLTKPFELFVDEKQGYAKGVLTQKLGPWRRPVAYLSKKLDPVAAGWPPCLRMVAAIAVLTKDAGKLTMGQPLVILAPHAVEALVKQPPDRWLSNARMTHYQAMLLDTDRVQFGPVVALNPATLLPLPEKEAPHDCLEILAETHGTRPDLTDQPIPDADYTWYTDGSSFLQEGQRRAGAAVTTETEVIWARALPAGTSAQRAELIALTQALKMAEGKKLNVYTDSRYAFATAHVHGEIYRRRGWLTSEGREIKNKNEILALLKALFLPKRLSIIHCPGHQKGNSAEARGNRMADQAAREAAMKAVLETSTLLAGKRTADGSEFEKRTADGSEFESPKKKAKVE

SEQ ID NO: 6732 - protein, 2095 aa, synthetic construct
MPAAKRVKLDGGDKKYSIGLDIGTNSVGWAVITDEYKVPSKKFKVLGNTDRHSIKKNLIGALLFDSGETAEATRLKRTARRRYTRRKNRICYLQEIFSNEMAKVDDSFFHRLEESFLVEEDKKHERHPIFGNIVDEVAYHEKYPTIYHLRKKLVDSTDKADLRLIYLALAHMIKFRGHFLIEGDLNPDNSDVDKLFIQLVQTYNQLFEENPINASGVDAKAILSARLSKSRRLENLIAQLPGEKKNGLFGNLIALSLGLTPNFKSNFDLAEDAKLQLSKDTYDDDLDNLLAQIGDQYADLFLAAKNLSDAILLSDILRVNTEITKAPLSASMIKRYDEHHQDLTLLKALVRQQLPEKYKEIFFDQSKNGYAGYIDGGASQEEFYKFIKPILEKMDGTEELLVKLNREDLLRKQRTFDNGSIPHQIHLGELHAILRRQEDFYPFLKDNREKIEKILTFRIPYYVGPLARGNSRFAWMTRKSEETITPWNFEEVVDKGASAQSFIERMTNFDKNLPNEKVLPKHSLLYEYFTVYNELTKVKYVTEGMRKPAFLSGEQKKAIVDLLFKTNRKVTVKQLKEDYFKKIECFDSVEISGVEDRFNASLGTYHDLLKIIKDKDFLDNEENEDILEDIVLTLTLFEDREMIEERLKTYAHLFDDKVMKQLKRRRYTGWGRLSRKLINGIRDKQSGKTILDFLKSDGFANRNFMQLIHDDSLTFKEDIQKAQVSGQGDSLHEHIANLAGSPAIKKGILQTVKVVDELVKVMGRHKPENIVIEMARENQTTQKGQKNSRERMKRIEEGIKELGSQILKEHPVENTQLQNEKLYLYYLQNGRDMYVDQELDINRLSDYDVDHIVPQSFLKDDSIDNKVLTRSDKARGKSDNVPSEEVVKKMKNYWRQLLNAKLITQRKFDNLTKAERGGLSELDKAGFIKRQLVETRQITKHVAQILDSRMNTKYDENDKLIREVKVITLKSKLVSDFRKDFQFYKVREINNYHHAHDAYLNAVVGTALIKKYPKLESEFVYGDYKVYDVRKMIAKSEQEIGKATAKYFFYSNIMNFFKTEITLANGEIRKRPLIETNGETGEIVWDKGRDFATVRKVLSMPQVNIVKKTEVQTGGFSKESILPKRNSDKLIARKKDWDPKKYGGFDSPTVAYSVLVVAKVEKGKSKKLKSVKELLGITIMERSSFEKNPIDFLEAKGYKEVKKDLIIKLPKYSLFELENGRKRMLASAGELQKGNELALPSKYVNFLYLASHYEKLKGSPEDNEQKQLFVEQHKHYLDEIIEQISEFSKRVILADANLDKVLSAYNKHRDKPIREQAENIIHLFTLTNLGAPAAFKYFDTTIDRKRYTSTKEVLDATLIHQSITGLYETRIDLSQLGGDGGEAAAKGSSGGTAPLEEEYRLFLEAPIQNVTLLEQWKREIPKVWAEINPPGLASTQAPIHVQLLSTALPVRVRQYPITLEAKRSLRETIRKFRAAGILRPVHSPWNTPLLPVRKSGTSEYRMVQDLREVNKRVETIHPTVPNPYTLLSLLPPDRIWYSVLDLKDAFFCIPLAPESQLIFAFEWADAEEGESGQLTWTRLPQGFKNSPTLFNEALNRDLQGFRLDHPSVSLLQYVDDLLIAADTQAACLSATRDLLMTLAELGYRVSGKKAQLCQEEVTYLGFKIHKGSRSLSNSRTQAILQIPVPKTKRQVREFLGTIGYCRLWIPGFAELAQPLYAATRPGNDPLVWGEKEEEAFQSLKLALTQPPALALPSLDKPFQLFVEETSGAAKGVLTQALGPWKRPVAYLSKRLDPVAAGWPRCLRAIAAAALLTREASKLTFGQDIEITSSHNLESLLRSPPDKWLTNARITQYQVLLLDPPRVRFKQTAALNPATLLPETDDTLPIHHCLDTLDSLTSTRPDLTDQPLAQAEATLFTDGSSYIRDGKRYAGAAVVTLDSVIWAEPLPIGTSAQKAELIALTKALEWSKDKSVNIYTDSRYAFATLHVHGMIYRERGWLTAGGKAIKNAPEILALLTAVWLPKRVAVMHCKGHQKDDAPTSTGNRRADEVAREVAIRPLSTQATISAGKRTADGSEFEKRTADGSEFESPKKKAKVE

SEQ ID NO: 6733 - protein, 2095 aa, synthetic construct
MPAAKRVKLDGGDKKYSIGLDIGTNSVGWAVITDEYKVPSKKFKVLGNTDRHSIKKNLIGALLFDSGETAEATRLKRTARRRYTRRKNRICYLQEIFSNEMAKVDDSFFHRLEESFLVEEDKKHERHPIFGNIVDEVAYHEKYPTIYHLRKKLVDSTDKADLRLIYLALAHMIKFRGHFLIEGDLNPDNSDVDKLFIQLVQTYNQLFEENPINASGVDAKAILSARLSKSRRLENLIAQLPGEKKNGLFGNLIALSLGLTPNFKSNFDLAEDAKLQLSKDTYDDDLDNLLAQIGDQYADLFLAAKNLSDAILLSDILRVNTEITKAPLSASMIKRYDEHHQDLTLLKALVRQQLPEKYKEIFFDQSKNGYAGYIDGGASQEEFYKFIKPILEKMDGTEELLVKLNREDLLRKQRTFDNGSIPHQIHLGELHAILRRQEDFYPFLKDNREKIEKILTFRIPYYVGPLARGNSRFAWMTRKSEETITPWNFEEVVDKGASAQSFIERMTNFDKNLPNEKVLPKHSLLYEYFTVYNELTKVKYVTEGMRKPAFLSGEQKKAIVDLLFKTNRKVTVKQLKEDYFKKIECFDSVEISGVEDRFNASLGTYHDLLKIIKDKDFLDNEENEDILEDIVLTLTLFEDREMIEERLKTYAHLFDDKVMKQLKRRRYTGWGRLSRKLINGIRDKQSGKTILDFLKSDGFANRNFMQLIHDDSLTFKEDIQKAQVSGQGDSLHEHIANLAGSPAIKKGILQTVKVVDELVKVMGRHKPENIVIEMARENQTTQKGQKNSRERMKRIEEGIKELGSQILKEHPVENTQLQNEKLYLYYLQNGRDMYVDQELDINRLSDYDVDHIVPQSFLKDDSIDNKVLTRSDKARGKSDNVPSEEVVKKMKNYWRQLLNAKLITQRKFDNLTKAERGGLSELDKAGFIKRQLVETRQITKHVAQILDSRMNTKYDENDKLIREVKVITLKSKLVSDFRKDFQFYKVREINNYHHAHDAYLNAVVGTALIKKYPKLESEFVYGDYKVYDVRKMIAKSEQEIGKATAKYFFYSNIMNFFKTEITLANGEIRKRPLIETNGETGEIVWDKGRDFATVRKVLSMPQVNIVKKTEVQTGGFSKESILPKRNSDKLIARKKDWDPKKYGGFDSPTVAYSVLVVAKVEKGKSKKLKSVKELLGITIMERSSFEKNPIDFLEAKGYKEVKKDLIIKLPKYSLFELENGRKRMLASAGELQKGNELALPSKYVNFLYLASHYEKLKGSPEDNEQKQLFVEQHKHYLDEIIEQISEFSKRVILADANLDKVLSAYNKHRDKPIREQAENIIHLFTLTNLGAPAAFKYFDTTIDRKRYTSTKEVLDATLIHQSITGLYETRIDLSQLGGDGGEAAAKGSSGGTAPLEEEYRLFLEAPIQNVTLLEQWKREIPKVWAEINPPGLASTQAPIHVQLLSTALPVRVRQYPITLEAKRSLRETIRKFRAAGILRPVHSPWNTPLLPVRKSGTSEYRMVQDLREVNKRVETIHPTVPNPYTLLSLLPPDRIWYSVLDLKDAFFCIPLAPESQLIFAFEWADAEEGESGQLTWTRLPQGFKNSPTLFNEALNRDLQGFRLDHPSVSLLQYVDDLLIAADTQAACLSATRDLLMTLAELGYRVSGKKAQLCQEEVTYLGFKIHKGSRSLSNSRTQAILQIPVPKTKRQVREFLGKIGYCRLFIPGFAELAQPLYAATRPGNDPLVWGEKEEEAFQSLKLALTQPPALALPSLDKPFQLFVEETSGAAKGVLTQALGPWKRPVAYLSKRLDPVAAGWPRCLRAIAAAALLTREASKLTFGQDIEITSSHNLESLLRSPPDKWLTNARITQYQVLLLDPPRVRFKQTAALNPATLLPETDDTLPIHHCLDTLDSLTSTRPDLTDQPLAQAEATLFTDGSSYIRDGKRYAGAAVVTLDSVIWAEPLPIGTSAQKAELIALTKALEWSKDKSVNIYTDSRYAFATLHVHGMIYRERGWLTAGGKAIKNAPEILALLTAVWLPKRVAVMHCKGHQKDDAPTSTGNRRADEVAREVAIRPLSTQATISAGKRTADGSEFEKRTADGSEFESPKKKAKVE

SEQ ID NO: 6734 - protein, 2092 aa, synthetic construct
MPAAKRVKLDGGDKKYSIGLDIGTNSVGWAVITDEYKVPSKKFKVLGNTDRHSIKKNLIGALLFDSGETAEATRLKRTARRRYTRRKNRICYLQEIFSNEMAKVDDSFFHRLEESFLVEEDKKHERHPIFGNIVDEVAYHEKYPTIYHLRKKLVDSTDKADLRLIYLALAHMIKFRGHFLIEGDLNPDNSDVDKLFIQLVQTYNQLFEENPINASGVDAKAILSARLSKSRRLENLIAQLPGEKKNGLFGNLIALSLGLTPNFKSNFDLAEDAKLQLSKDTYDDDLDNLLAQIGDQYADLFLAAKNLSDAILLSDILRVNTEITKAPLSASMIKRYDEHHQDLTLLKALVRQQLPEKYKEIFFDQSKNGYAGYIDGGASQEEFYKFIKPILEKMDGTEELLVKLNREDLLRKQRTFDNGSIPHQIHLGELHAILRRQEDFYPFLKDNREKIEKILTFRIPYYVGPLARGNSRFAWMTRKSEETITPWNFEEVVDKGASAQSFIERMTNFDKNLPNEKVLPKHSLLYEYFTVYNELTKVKYVTEGMRKPAFLSGEQKKAIVDLLFKTNRKVTVKQLKEDYFKKIECFDSVEISGVEDRFNASLGTYHDLLKIIKDKDFLDNEENEDILEDIVLTLTLFEDREMIEERLKTYAHLFDDKVMKQLKRRRYTGWGRLSRKLINGIRDKQSGKTILDFLKSDGFANRNFMQLIHDDSLTFKEDIQKAQVSGQGDSLHEHIANLAGSPAIKKGILQTVKVVDELVKVMGRHKPENIVIEMARENQTTQKGQKNSRERMKRIEEGIKELGSQILKEHPVENTQLQNEKLYLYYLQNGRDMYVDQELDINRLSDYDVDHIVPQSFLKDDSIDNKVLTRSDKARGKSDNVPSEEVVKKMKNYWRQLLNAKLITQRKFDNLTKAERGGLSELDKAGFIKRQLVETRQITKHVAQILDSRMNTKYDENDKLIREVKVITLKSKLVSDFRKDFQFYKVREINNYHHAHDAYLNAVVGTALIKKYPKLESEFVYGDYKVYDVRKMIAKSEQEIGKATAKYFFYSNIMNFFKTEITLANGEIRKRPLIETNGETGEIVWDKGRDFATVRKVLSMPQVNIVKKTEVQTGGFSKESILPKRNSDKLIARKKDWDPKKYGGFDSPTVAYSVLVVAKVEKGKSKKLKSVKELLGITIMERSSFEKNPIDFLEAKGYKEVKKDLIIKLPKYSLFELENGRKRMLASAGELQKGNELALPSKYVNFLYLASHYEKLKGSPEDNEQKQLFVEQHKHYLDEIIEQISEFSKRVILADANLDKVLSAYNKHRDKPIREQAENIIHLFTLTNLGAPAAFKYFDTTIDRKRYTSTKEVLDATLIHQSITGLYETRIDLSQLGGDGGEAAAKGSSGGTLQLEEEYRLFEPESTQKQEMDIWLKNFPQAWAETGGMGTAHCQAPVLIQLKATATPISIRQYPMPHEAYQGIKPHIRRMLDQGILKPCQSPWNTPLLPVKKPGTEDYRPVQDLREVNKRVEDIHPTVPNPYNLLSTLPPSHPWYTVLDLKDAFFCLRLHSESQLLFAFEWRDPEIGLSGQLTWTRLPQGFKNSPTLFNEALHSDLADFRVRYPALVLLQYVDDLLLAAATRTECLEGTKALLETLGNKGYRASAKKAQICLQEVTYLGYSLKDGQRWLTKARKEAILSIPVPKNSRQVREFLGKAGYCRLFIPGFAELAAPLYPLTRPGTLFQWGTEQQLAFEDIKKALLSSPALGLPDITKPFELFIDENSGFAKGVLVQKLGPWKRPVAYLSKKLDTVASGWPPCLRMVAAIAILVKDAGKLTLGQPLTILTSHPVEALVRQPPNKWLSNARMTHYQAMLLDAERVHFGPTVSLNPATLLPLPSGGNHHDCLQILAETHGTRPDLTDQPLPDADLTWYTDGSSFIRNGEREAGAAVTTESEVIWAAPLPPGTSAQRAELIALTQALKMAEGKKLTVYTDSRYAFATTHVHGEIYRRRGWLTSEGKEIKNKNEILALLEALFLPKRLSIIHCPGHQKGDSPQAKGNRLADDTAKKAATETHSSLTVLPAGKRTADGSEFEKRTADGSEFESPKKKAKVE

SEQ ID NO: 6735 - protein, 2091 aa, synthetic construct
MPAAKRVKLDGGDKKYSIGLDIGTNSVGWAVITDEYKVPSKKFKVLGNTDRHSIKKNLIGALLFDSGETAEATRLKRTARRRYTRRKNRICYLQEIFSNEMAKVDDSFFHRLEESFLVEEDKKHERHPIFGNIVDEVAYHEKYPTIYHLRKKLVDSTDKADLRLIYLALAHMIKFRGHFLIEGDLNPDNSDVDKLFIQLVQTYNQLFEENPINASGVDAKAILSARLSKSRRLENLIAQLPGEKKNGLFGNLIALSLGLTPNFKSNFDLAEDAKLQLSKDTYDDDLDNLLAQIGDQYADLFLAAKNLSDAILLSDILRVNTEITKAPLSASMIKRYDEHHQDLTLLKALVRQQLPEKYKEIFFDQSKNGYAGYIDGGASQEEFYKFIKPILEKMDGTEELLVKLNREDLLRKQRTFDNGSIPHQIHLGELHAILRRQEDFYPFLKDNREKIEKILTFRIPYYVGPLARGNSRFAWMTRKSEETITPWNFEEVVDKGASAQSFIERMTNFDKNLPNEKVLPKHSLLYEYFTVYNELTKVKYVTEGMRKPAFLSGEQKKAIVDLLFKTNRKVTVKQLKEDYFKKIECFDSVEISGVEDRFNASLGTYHDLLKIIKDKDFLDNEENEDILEDIVLTLTLFEDREMIEERLKTYAHLFDDKVMKQLKRRRYTGWGRLSRKLINGIRDKQSGKTILDFLKSDGFANRNFMQLIHDDSLTFKEDIQKAQVSGQGDSLHEHIANLAGSPAIKKGILQTVKVVDELVKVMGRHKPENIVIEMARENQTTQKGQKNSRERMKRIEEGIKELGSQILKEHPVENTQLQNEKLYLYYLQNGRDMYVDQELDINRLSDYDVDHIVPQSFLKDDSIDNKVLTRSDKARGKSDNVPSEEVVKKMKNYWRQLLNAKLITQRKFDNLTKAERGGLSELDKAGFIKRQLVETRQITKHVAQILDSRMNTKYDENDKLIREVKVITLKSKLVSDFRKDFQFYKVREINNYHHAHDAYLNAVVGTALIKKYPKLESEFVYGDYKVYDVRKMIAKSEQEIGKATAKYFFYSNIMNFFKTEITLANGEIRKRPLIETNGETGEIVWDKGRDFATVRKVLSMPQVNIVKKTEVQTGGFSKESILPKRNSDKLIARKKDWDPKKYGGFDSPTVAYSVLVVAKVEKGKSKKLKSVKELLGITIMERSSFEKNPIDFLEAKGYKEVKKDLIIKLPKYSLFELENGRKRMLASAGELQKGNELALPSKYVNFLYLASHYEKLKGSPEDNEQKQLFVEQHKHYLDEIIEQISEFSKRVILADANLDKVLSAYNKHRDKPIREQAENIIHLFTLTNLGAPAAFKYFDTTIDRKRYTSTKEVLDATLIHQSITGLYETRIDLSQLGGDGGEAAAKGSSGGVLNLEEEYRLHEKPVPSSIDPSWLQLFPTVWAERAGMGLANQVPPVVVELRSGASPVAVRQYPMSKEAREGIRPHIQKFLDLGVLVPCRSPWNTPLLPVKKPGTNDYRPVQDLREINKRVQDIHPTVPNPYNLLSSLPPSYTWYSVLDLKDAFFCLRLHPNSQPLFAFEWKDPEKGNTGQLTWTRLPQGFKNSPTLFNEALHRDLAPFRALNPQVVLLQYVDDLLVAAPTYEDCKKGTQKLLQELSKLGYRVSAKKAQLCQREVTYLGYLLKEGKRWLTPARKATVMKIPVPTTPRQVREFLGKAGFCRLFIPGFASLAAPLYPLTKPSIPFIWTEEHQQAFDHIKKALLSAPALALPDLTKPFTLYIDERAGVARGVLTQTLGPWRRPVAYLSKKLDPVASGWPTCLKAVAAVALLLKDADKLTLGQNVTVIASHSLESIVRQPPDRWMTNARMTHYQSLLLNERVSFAPPAVLNPATLLPVESEATPVHRCSEILAEETGTRRDLEDQPLPGVPTWYTDGSSFITEGKRRAGAPIVDGKRTVWASSLPEGTSAQKAELVALTQALRLAEGKNINIYTDSRYAFATAHIHGAIYKQRGWLTSAGKDIKNKEEILALLEAIHLPRRVAIIHCPGHQRGSNPVATGNRRADEAAKQAALSTRVLAGTTKPAGKRTADGSEFEKRTADGSEFESPKKKAKVE

SEQ ID NO: 6736 - protein, 2215 aa, synthetic construct
MPAAKRVKLDGGDKKYSIGLDIGTNSVGWAVITDEYKVPSKKFKVLGNTDRHSIKKNLIGALLFDSGETAEATRLKRTARRRYTRRKNRICYLQEIFSNEMAKVDDSFFHRLEESFLVEEDKKHERHPIFGNIVDEVAYHEKYPTIYHLRKKLVDSTDKADLRLIYLALAHMIKFRGHFLIEGDLNPDNSDVDKLFIQLVQTYNQLFEENPINASGVDAKAILSARLSKSRRLENLIAQLPGEKKNGLFGNLIALSLGLTPNFKSNFDLAEDAKLQLSKDTYDDDLDNLLAQIGDQYADLFLAAKNLSDAILLSDILRVNTEITKAPLSASMIKRYDEHHQDLTLLKALVRQQLPEKYKEIFFDQSKNGYAGYIDGGASQEEFYKFIKPILEKMDGTEELLVKLNREDLLRKQRTFDNGSIPHQIHLGELHAILRRQEDFYPFLKDNREKIEKILTFRIPYYVGPLARGNSRFAWMTRKSEETITPWNFEEVVDKGASAQSFIERMTNFDKNLPNEKVLPKHSLLYEYFTVYNELTKVKYVTEGMRKPAFLSGEQKKAIVDLLFKTNRKVTVKQLKEDYFKKIECFDSVEISGVEDRFNASLGTYHDLLKIIKDKDFLDNEENEDILEDIVLTLTLFEDREMIEERLKTYAHLFDDKVMKQLKRRRYTGWGRLSRKLINGIRDKQSGKTILDFLKSDGFANRNFMQLIHDDSLTFKEDIQKAQVSGQGDSLHEHIANLAGSPAIKKGILQTVKVVDELVKVMGRHKPENIVIEMARENQTTQKGQKNSRERMKRIEEGIKELGSQILKEHPVENTQLQNEKLYLYYLQNGRDMYVDQELDINRLSDYDVDHIVPQSFLKDDSIDNKVLTRSDKARGKSDNVPSEEVVKKMKNYWRQLLNAKLITQRKFDNLTKAERGGLSELDKAGFIKRQLVETRQITKHVAQILDSRMNTKYDENDKLIREVKVITLKSKLVSDFRKDFQFYKVREINNYHHAHDAYLNAVVGTALIKKYPKLESEFVYGDYKVYDVRKMIAKSEQEIGKATAKYFFYSNIMNFFKTEITLANGEIRKRPLIETNGETGEIVWDKGRDFATVRKVLSMPQVNIVKKTEVQTGGFSKESILPKRNSDKLIARKKDWDPKKYGGFDSPTVAYSVLVVAKVEKGKSKKLKSVKELLGITIMERSSFEKNPIDFLEAKGYKEVKKDLIIKLPKYSLFELENGRKRMLASAGELQKGNELALPSKYVNFLYLASHYEKLKGSPEDNEQKQLFVEQHKHYLDEIIEQISEFSKRVILADANLDKVLSAYNKHRDKPIREQAENIIHLFTLTNLGAPAAFKYFDTTIDRKRYTSTKEVLDATLIHQSITGLYETRIDLSQLGGDGGEAAAKGSSGGTLGDQGSRGSDPLPEPRVTLTVEGIPTEFLVNTGAEHSVLTKPMGKMGSKRTVVAGATGSKVYPWTTKRLLKIGQKQVTHSFLVIPECPAPLLGRDLLTKLKAQIQFSTEGPQVTWEDRPAMCLVLNLEEEYRLHEKPVPPSIDPSWLQLFPMVWAEKAGMGLANQVPPVVVELKSDASPVAVRQYPMSKEAREGIRPHIQRFLDLGILVPCQSPWNTPLLPVKKPGTNDYRPVQDLREVNKRVQDIHPTVPNPYNLLSSLPPSHTWYSVLDLKDAFFCLKLHPNSQPLFAFEWRDPEKGNTGQLTWTRLPQGFKNSPTLFNEALHRDLASFRALNPQVVMLQYVDDLLVAAPTYRDCKEGTRRLLQELSKLGYRVSAKKAQLCREEVTYLGYLLKGGKRWLTPARKATVMKIPTPTTPRQVREFLGKAGFCRLFIPGFASLAAPLYPLTRPKVPFTWTEAHQEAFGRIKEALLSAPALALPDLTKPFALYVDEKEGVARGVLTQTLGPWRRPVAYLSKKLDPVASGWPTCLKAIAAVALLLKDADKLTLGQNVLVIAPHNLESIVRQPPDRWMTNARMTHYQSLLLNERVSFAPPAILNPATLLPVESDDTPIHICSEILAEETGTRPDLRDQPLPGVPAWYTDGSSFIMDGRRQAGAAIVDNKRTVWASNLPEGTSAQKAELIALTQALRLAEGKSINIYTDSRYAFATAHVHGAIYKQRGWLTSAGKDIKNKEEILALLEAIHLPKRVAIIHCPGHQRGTDPVATGNRKADEAAKQAAQSTRILTETTKNAGKRTADGSEFEKRTADGSEFESPKKKAKVE

SEQ ID NO: 6737 - protein, 2093 aa, synthetic construct
MPAAKRVKLDGGDKKYSIGLDIGTNSVGWAVITDEYKVPSKKFKVLGNTDRHSIKKNLIGALLFDSGETAEATRLKRTARRRYTRRKNRICYLQEIFSNEMAKVDDSFFHRLEESFLVEEDKKHERHPIFGNIVDEVAYHEKYPTIYHLRKKLVDSTDKADLRLIYLALAHMIKFRGHFLIEGDLNPDNSDVDKLFIQLVQTYNQLFEENPINASGVDAKAILSARLSKSRRLENLIAQLPGEKKNGLFGNLIALSLGLTPNFKSNFDLAEDAKLQLSKDTYDDDLDNLLAQIGDQYADLFLAAKNLSDAILLSDILRVNTEITKAPLSASMIKRYDEHHQDLTLLKALVRQQLPEKYKEIFFDQSKNGYAGYIDGGASQEEFYKFIKPILEKMDGTEELLVKLNREDLLRKQRTFDNGSIPHQIHLGELHAILRRQEDFYPFLKDNREKIEKILTFRIPYYVGPLARGNSRFAWMTRKSEETITPWNFEEVVDKGASAQSFIERMTNFDKNLPNEKVLPKHSLLYEYFTVYNELTKVKYVTEGMRKPAFLSGEQKKAIVDLLFKTNRKVTVKQLKEDYFKKIECFDSVEISGVEDRFNASLGTYHDLLKIIKDKDFLDNEENEDILEDIVLTLTLFEDREMIEERLKTYAHLFDDKVMKQLKRRRYTGWGRLSRKLINGIRDKQSGKTILDFLKSDGFANRNFMQLIHDDSLTFKEDIQKAQVSGQGDSLHEHIANLAGSPAIKKGILQTVKVVDELVKVMGRHKPENIVIEMARENQTTQKGQKNSRERMKRIEEGIKELGSQILKEHPVENTQLQNEKLYLYYLQNGRDMYVDQELDINRLSDYDVDHIVPQSFLKDDSIDNKVLTRSDKARGKSDNVPSEEVVKKMKNYWRQLLNAKLITQRKFDNLTKAERGGLSELDKAGFIKRQLVETRQITKHVAQILDSRMNTKYDENDKLIREVKVITLKSKLVSDFRKDFQFYKVREINNYHHAHDAYLNAVVGTALIKKYPKLESEFVYGDYKVYDVRKMIAKSEQEIGKATAKYFFYSNIMNFFKTEITLANGEIRKRPLIETNGETGEIVWDKGRDFATVRKVLSMPQVNIVKKTEVQTGGFSKESILPKRNSDKLIARKKDWDPKKYGGFDSPTVAYSVLVVAKVEKGKSKKLKSVKELLGITIMERSSFEKNPIDFLEAKGYKEVKKDLIIKLPKYSLFELENGRKRMLASAGELQKGNELALPSKYVNFLYLASHYEKLKGSPEDNEQKQLFVEQHKHYLDEIIEQISEFSKRVILADANLDKVLSAYNKHRDKPIREQAENIIHLFTLTNLGAPAAFKYFDTTIDRKRYTSTKEVLDATLIHQSITGLYETRIDLSQLGGDGGEAAAKGSSGGTLNLEDEYRLYETSAEPEVSPGSTWLSDFPQAWAETGGMGLAVRQAPLIIPLKATSTPVSIKQYPMSQEAKLGIKPHIQRLLDQGILVPCQSPWNTPLLPVKKPGTNDYRPVQDLREVNKRVEDIHPTVPNPYNLLSGLPPSHRWYTVLDLKDAFFCLRLHPTSQPLFAFEWRDPGMGISGQLTWTRLPQGFKNSPTLFNEALHRDLADFRIQHPDLILLQYVDDILLAATSELDCQQGTRALLLTLGNLGYRASAKKAQLCQKQVKYLGYLLKEGQRWLTEARKETVMGQPTPKTPRQLREFLGTAGFCRLWIPGFAEMAAPLYPLTKPGTLFNWGPDQQKAYQEIKQALLTAPALGLPDLTKPFELFVDEKQGYAKGVLTQKLGPWRRPVAYLSKKLDPVAAGWPPCLRMVAAIAVLRKDAGKLTMGQPLVILAPHAVEALVKQPPDRWLSNARMTHYQAMLLDTDRVQFGPVVALNPATLLPLPEEGAPHDCLEILAETHGTRPDLTDQPIPDADHTWYTDGSSFLQEGQRKAGAAVTTETEVIWARALPAGTSAQRAELIALTQALKMAEGKRLNVYTDSRYAFATAHIHGEIYRRRGWLTSEGREIKNKSEILALLKALFLPKRLSIIHCLGHQKGDSAEARGNRLADQAAREAAIKTPPDTSTLLAGKRTADGSEFEKRTADGSEFESPKKKAKVE

SEQ ID NO: 6738 - protein, 2093 aa, synthetic construct; identical to SEQ ID NO: 4512

SEQ ID NO: 6739 - protein, 2093 aa, synthetic construct
MPAAKRVKLDGGDKKYSIGLDIGTNSVGWAVITDEYKVPSKKFKVLGNTDRHSIKKNLIGALLFDSGETAEATRLKRTARRRYTRRKNRICYLQEIFSNEMAKVDDSFFHRLEESFLVEEDKKHERHPIFGNIVDEVAYHEKYPTIYHLRKKLVDSTDKADLRLIYLALAHMIKFRGHFLIEGDLNPDNSDVDKLFIQLVQTYNQLFEENPINASGVDAKAILSARLSKSRRLENLIAQLPGEKKNGLFGNLIALSLGLTPNFKSNFDLAEDAKLQLSKDTYDDDLDNLLAQIGDQYADLFLAAKNLSDAILLSDILRVNTEITKAPLSASMIKRYDEHHQDLTLLKALVRQQLPEKYKEIFFDQSKNGYAGYIDGGASQEEFYKFIKPILEKMDGTEELLVKLNREDLLRKQRTFDNGSIPHQIHLGELHAILRRQEDFYPFLKDNREKIEKILTFRIPYYVGPLARGNSRFAWMTRKSEETITPWNFEEVVDKGASAQSFIERMTNFDKNLPNEKVLPKHSLLYEYFTVYNELTKVKYVTEGMRKPAFLSGEQKKAIVDLLFKTNRKVTVKQLKEDYFKKIECFDSVEISGVEDRFNASLGTYHDLLKIIKDKDFLDNEENEDILEDIVLTLTLFEDREMIEERLKTYAHLFDDKVMKQLKRRRYTGWGRLSRKLINGIRDKQSGKTILDFLKSDGFANRNFMQLIHDDSLTFKEDIQKAQVSGQGDSLHEHIANLAGSPAIKKGILQTVKVVDELVKVMGRHKPENIVIEMARENQTTQKGQKNSRERMKRIEEGIKELGSQILKEHPVENTQLQNEKLYLYYLQNGRDMYVDQELDINRLSDYDVDHIVPQSFLKDDSIDNKVLTRSDKARGKSDNVPSEEVVKKMKNYWRQLLNAKLITQRKFDNLTKAERGGLSELDKAGFIKRQLVETRQITKHVAQILDSRMNTKYDENDKLIREVKVITLKSKLVSDFRKDFQFYKVREINNYHHAHDAYLNAVVGTALIKKYPKLESEFVYGDYKVYDVRKMIAKSEQEIGKATAKYFFYSNIMNFFKTEITLANGEIRKRPLIETNGETGEIVWDKGRDFATVRKVLSMPQVNIVKKTEVQTGGFSKESILPKRNSDKLIARKKDWDPKKYGGFDSPTVAYSVLVVAKVEKGKSKKLKSVKELLGITIMERSSFEKNPIDFLEAKGYKEVKKDLIIKLPKYSLFELENGRKRMLASAGELQKGNELALPSKYVNFLYLASHYEKLKGSPEDNEQKQLFVEQHKHYLDEIIEQISEFSKRVILADANLDKVLSAYNKHRDKPIREQAENIIHLFTLTNLGAPAAFKYFDTTIDRKRYTSTKEVLDATLIHQSITGLYETRIDLSQLGGDGGEAAAKGSSGGTLGIEDEYRLHETSTEPDVSLGSTWLSDFPQAWAETGGMGLAVRQAPLIIPLKATSTPVSIQQYPMSHEARLGIKPHIQRLLDQGILVPCQSPWNTPLLPVKKPGTNDYRPVQDLREVNKRVEDIHPTVPNPYNLLSGLPPSHQWYTVLDLKDAFFCLRLHPTSQPLFAFEWRDPGMGISGQLTWTRLPQGFKNSPTLFDEALHRDLADFRIQHPDLILLQYVDDILLAATSELDCQQGTRALLQTLGDLGYRASAKKAQICQKQVKYLGYLLREGQRWLTEARKETVMGQPVPKTPRQLREFLGTAGFCRLWIPGFAEMAAPLYPLTKTGTLFSWGPDQQKAYQEIKQALLTAPALGLPDLTKPFELFVDEKQGYAKGVLTQKLGPWRRPVAYLSKKLDPVAAGWPPCLRMVAAIAVLTKDAGKLTMGQPLVILAPHAVEALVKQPPDRWLSNARMTHYQAMLLDTDRVQFGPVVALNPATLLPLPEEGAPHDCLEILAETHGTRPDLTDQPIPDADHTWYTDGSSFLQEGQRKAGAAVTTETEVIWAGALPAGTSAQRAELIALTQALKMAEGKRLNVYTDSRYAFATAHIHGEIYRRRGLLTSEGREIKNKSEILALLKALFLPKRLSIIHCLGHQKGDSAEARGNRLADQAAREAAIKTPPDTSTLLAGKRTADGSEFEKRTADGSEFESPKKKAKVE

SEQ ID NO: 6740 - protein, 2093 aa, synthetic construct
MPAAKRVKLDGGDKKYSIGLDIGTNSVGWAVITDEYKVPSKKFKVLGNTDRHSIKKNLIGALLFDSGETAEATRLKRTARRRYTRRKNRICYLQEIFSNEMAKVDDSFFHRLEESFLVEEDKKHERHPIFGNIVDEVAYHEKYPTIYHLRKKLVDSTDKADLRLIYLALAHMIKFRGHFLIEGDLNPDNSDVDKLFIQLVQTYNQLFEENPINASGVDAKAILSARLSKSRRLENLIAQLPGEKKNGLFGNLIALSLGLTPNFKSNFDLAEDAKLQLSKDTYDDDLDNLLAQIGDQYADLFLAAKNLSDAILLSDILRVNTEITKAPLSASMIKRYDEHHQDLTLLKALVRQQLPEKYKEIFFDQSKNGYAGYIDGGASQEEFYKFIKPILEKMDGTEELLVKLNREDLLRKQRTFDNGSIPHQIHLGELHAILRRQEDFYPFLKDNREKIEKILTFRIPYYVGPLARGNSRFAWMTRKSEETITPWNFEEVVDKGASAQSFIERMTNFDKNLPNEKVLPKHSLLYEYFTVYNELTKVKYVTEGMRKPAFLSGEQKKAIVDLLFKTNRKVTVKQLKEDYFKKIECFDSVEISGVEDRFNASLGTYHDLLKIIKDKDFLDNEENEDILEDIVLTLTLFEDREMIEERLKTYAHLFDDKVMKQLKRRRYTGWGRLSRKLINGIRDKQSGKTILDFLKSDGFANRNFMQLIHDDSLTFKEDIQKAQVSGQGDSLHEHIANLAGSPAIKKGILQTVKVVDELVKVMGRHKPENIVIEMARENQTTQKGQKNSRERMKRIEEGIKELGSQILKEHPVENTQLQNEKLYLYYLQNGRDMYVDQELDINRLSDYDVDHIVPQSFLKDDSIDNKVLTRSDKARGKSDNVPSEEVVKKMKNYWRQLLNAKLITQRKFDNLTKAERGGLSELDKAGFIKRQLVETRQITKHVAQILDSRMNTKYDENDKLIREVKVITLKSKLVSDFRKDFQFYKVREINNYHHAHDAYLNAVVGTALIKKYPKLESEFVYGDYKVYDVRKMIAKSEQEIGKATAKYFFYSNIMNFFKTEITLANGEIRKRPLIETNGETGEIVWDKGRDFATVRKVLSMPQVNIVKKTEVQTGGFSKESILPKRNSDKLIARKKDWDPKKYGGFDSPTVAYSVLVVAKVEKGKSKKLKSVKELLGITIMERSSFEKNPIDFLEAKGYKEVKKDLIIKLPKYSLFELENGRKRMLASAGELQKGNELALPSKYVNFLYLASHYEKLKGSPEDNEQKQLFVEQHKHYLDEIIEQISEFSKRVILADANLDKVLSAYNKHRDKPIREQAENIIHLFTLTNLGAPAAFKYFDTTIDRKRYTSTKEVLDATLIHQSITGLYETRIDLSQLGGDGGEAAAKGSSGGTLNIEDEYRLHEISTEPDVSPGSTWLSDFPQAWAETGGMGLAVRQAPLIIPLKATSTPVSIKQYPMSQEAKLGIKPHIQRLLDQGILVPCQSPWNTPLLPVKKPGTNDYRPVQGLREVNKRVEDIHPTVPNPYNLLSGLPTSHRWYTVLDLKDAFFCLRLHPTSQPLFASEWRDPGMGISGQLTWTRLPQGFKNSPTLFNEALHRGLADFRIQHPDLILLQYVDDLLLAATSELDCQQGTRALLKTLGNLGYRASAKKAQICQKQVKYLGYLLREGQRWLTEARKETVMGQPTPKTPRQLREFLGTAGFCRLWIPRFAEMAAPLYPLTKPGTLFNWGPDQQKAYHEIKQALLTAPALGLPDLTKPFELFVDEKQGYAKGVLTQKLGPWRRPVAYLSKKLDPVAAGWPPCLRMVAAIAVLTKDAGKLTMGQPLVILAPHAVEALVKQPPDRWLSNARMTHYQAMLLDTDRVQFGPVVALNPATLLPLPEEGAPHDCLEILAETHGTEPDLTDQPIPDADHTWYTDGSSFLQEGQRKAGAAVTTETEVIWARALPAGTSAQRAELIALTQALKMAEGKRLNVYTDSRYAFATAHIHGEIYKRRGWLTSEGREIKNKSEILALLKALFLPKRLSIIHCLGHQKGDSAEARGNRLADQAAREAAIKTPPDTSTLLAGKRTADGSEFEKRTADGSEFESPKKKAKVE

SEQ ID NO: 6741 - protein, 2087 aa, synthetic construct
MPAAKRVKLDGGDKKYSIGLDIGTNSVGWAVITDEYKVPSKKFKVLGNTDRHSIKKNLIGALLFDSGETAEATRLKRTARRRYTRRKNRICYLQEIFSNEMAKVDDSFFHRLEESFLVEEDKKHERHPIFGNIVDEVAYHEKYPTIYHLRKKLVDSTDKADLRLIYLALAHMIKFRGHFLIEGDLNPDNSDVDKLFIQLVQTYNQLFEENPINASGVDAKAILSARLSKSRRLENLIAQLPGEKKNGLFGNLIALSLGLTPNFKSNFDLAEDAKLQLSKDTYDDDLDNLLAQIGDQYADLFLAAKNLSDAILLSDILRVNTEITKAPLSASMIKRYDEHHQDLTLLKALVRQQLPEKYKEIFFDQSKNGYAGYIDGGASQEEFYKFIKPILEKMDGTEELLVKLNREDLLRKQRTFDNGSIPHQIHLGELHAILRRQEDFYPFLKDNREKIEKILTFRIPYYVGPLARGNSRFAWMTRKSEETITPWNFEEVVDKGASAQSFIERMTNFDKNLPNEKVLPKHSLLYEYFTVYNELTKVKYVTEGMRKPAFLSGEQKKAIVDLLFKTNRKVTVKQLKEDYFKKIECFDSVEISGVEDRFNASLGTYHDLLKIIKDKDFLDNEENEDILEDIVLTLTLFEDREMIEERLKTYAHLFDDKVMKQLKRRRYTGWGRLSRKLINGIRDKQSGKTILDFLKSDGFANRNFMQLIHDDSLTFKEDIQKAQVSGQGDSLHEHIANLAGSPAIKKGILQTVKVVDELVKVMGRHKPENIVIEMARENQTTQKGQKNSRERMKRIEEGIKELGSQILKEHPVENTQLQNEKLYLYYLQNGRDMYVDQELDINRLSDYDVDHIVPQSFLKDDSIDNKVLTRSDKARGKSDNVPSEEVVKKMKNYWRQLLNAKLITQRKFDNLTKAERGGLSELDKAGFIKRQLVETRQITKHVAQILDSRMNTKYDENDKLIREVKVITLKSKLVSDFRKDFQFYKVREINNYHHAHDAYLNAVVGTALIKKYPKLESEFVYGDYKVYDVRKMIAKSEQEIGKATAKYFFYSNIMNFFKTEITLANGEIRKRPLIETNGETGEIVWDKGRDFATVRKVLSMPQVNIVKKTEVQTGGFSKESILPKRNSDKLIARKKDWDPKKYGGFDSPTVAYSVLVVAKVEKGKSKKLKSVKELLGITIMERSSFEKNPIDFLEAKGYKEVKKDLIIKLPKYSLFELENGRKRMLASAGELQKGNELALPSKYVNFLYLASHYEKLKGSPEDNEQKQLFVEQHKHYLDEIIEQISEFSKRVILADANLDKVLSAYNKHRDKPIREQAENIIHLFTLTNLGAPAAFKYFDTTIDRKRYTSTKEVLDATLIHQSITGLYETRIDLSQLGGDGGEAAAKGSSGGTLQLDDEYRLYSPLVKPDQNIQFWLEQFPQAWAETAGMGLAKQVPPQVIQLKASATPVSVRQYPLSKEAQEGIRPHVQRLIQQGILVPVQSPWNTPLLPVRKPGTNDYRPVQDLREVNKRVQDIHPTVPNPYNLLCALPPQRSWYTVLDLKDAFFCLRLHPTSQPLFAFEWRDPGTGRTGQLTWTRLPQGFKNSPTIFDEALHRDLANFRIQHPQVTLLQYVDDLLLAGATKQDCLEGTKALLLELSDLGYRASAKKAQICRREVTYLGYSLRDGQRWLTEARKKTVVQIPAPTTAKQVREFLGTAGFCRLWIPGFATLAAPLYPLTKEKGEFSWAPEHQKAFDAIKKALLSAPALALPDVTKPFTLYVDERKGVARGVLTQTLGPWRRPVAYLSKKLDPVASGWPVCLKAIAAVAILVKDADKLTLGQNITVIAPHALENIVRQPPDRWMTNARMTHYQSLLLTERVTFAPPAALNPATLLPEETDEPVTHDCHQLLIEETGVRKDLTDIPLTGEVLTWFTDGSSYVVEGKRMAGAAVVDGTRTIWASSLPEGTSAQKAELMALTQALRLAEGKSINIYTDSRYAFATAHVHGAIYKQRGLLTSAGREIKNKEEILSLLEALHLPKRLAIIHCPGHQKAKDPISRGNQMADRVAKQAAQGVNLLAGKRTADGSEFEKRTADGSEFESPKKKAKVE

SEQ ID NO: 6742 - protein, 2014 aa, synthetic construct
MPAAKRVKLDGGDKKYSIGLDIGTNSVGWAVITDEYKVPSKKFKVLGNTDRHSIKKNLIGALLFDSGETAEATRLKRTARRRYTRRKNRICYLQEIFSNEMAKVDDSFFHRLEESFLVEEDKKHERHPIFGNIVDEVAYHEKYPTIYHLRKKLVDSTDKADLRLIYLALAHMIKFRGHFLIEGDLNPDNSDVDKLFIQLVQTYNQLFEENPINASGVDAKAILSARLSKSRRLENLIAQLPGEKKNGLFGNLIALSLGLTPNFKSNFDLAEDAKLQLSKDTYDDDLDNLLAQIGDQYADLFLAAKNLSDAILLSDILRVNTEITKAPLSASMIKRYDEHHQDLTLLKALVRQQLPEKYKEIFFDQSKNGYAGYIDGGASQEEFYKFIKPILEKMDGTEELLVKLNREDLLRKQRTFDNGSIPHQIHLGELHAILRRQEDFYPFLKDNREKIEKILTFRIPYYVGPLARGNSRFAWMTRKSEETITPWNFEEVVDKGASAQSFIERMTNFDKNLPNEKVLPKHSLLYEYFTVYNELTKVKYVTEGMRKPAFLSGEQKKAIVDLLFKTNRKVTVKQLKEDYFKKIECFDSVEISGVEDRFNASLGTYHDLLKIIKDKDFLDNEENEDILEDIVLTLTLFEDREMIEERLKTYAHLFDDKVMKQLKRRRYTGWGRLSRKLINGIRDKQSGKTILDFLKSDGFANRNFMQLIHDDSLTFKEDIQKAQVSGQGDSLHEHIANLAGSPAIKKGILQTVKVVDELVKVMGRHKPENIVIEMARENQTTQKGQKNSRERMKRIEEGIKELGSQILKEHPVENTQLQNEKLYLYYLQNGRDMYVDQELDINRLSDYDVDHIVPQSFLKDDSIDNKVLTRSDKARGKSDNVPSEEVVKKMKNYWRQLLNAKLITQRKFDNLTKAERGGLSELDKAGFIKRQLVETRQITKHVAQILDSRMNTKYDENDKLIREVKVITLKSKLVSDFRKDFQFYKVREINNYHHAHDAYLNAVVGTALIKKYPKLESEFVYGDYKVYDVRKMIAKSEQEIGKATAKYFFYSNIMNFFKTEITLANGEIRKRPLIETNGETGEIVWDKGRDFATVRKVLSMPQVNIVKKTEVQTGGFSKESILPKRNSDKLIARKKDWDPKKYGGFDSPTVAYSVLVVAKVEKGKSKKLKSVKELLGITIMERSSFEKNPIDFLEAKGYKEVKKDLIIKLPKYSLFELENGRKRMLASAGELQKGNELALPSKYVNFLYLASHYEKLKGSPEDNEQKQLFVEQHKHYLDEIIEQISEFSKRVILADANLDKVLSAYNKHRDKPIREQAENIIHLFTLTNLGAPAAFKYFDTTIDRKRYTSTKEVLDATLIHQSITGLYETRIDLSQLGGDGGEAAAKGSSGGPRSRAIDIPVPHADKISWKITDPVWVDQWPLTYEKTLAAIALVQEQLAAGHIEPTNSPWNTPIFIIKKKSGSWRLLQDLRAVNKVMVPMGALQPGLPSPVAPPLNYHKIVIDLKDCFFTIPLHPEDRPYFAFSVPQINFQSPMPRYQWKVLPQGMANSPTLCQKFVAAAIAPVRSQWPEAYILHYMDDILLACDSAEAAKACYAHIISCLTSYGLKIAPDKVQVSEPFSYLGFELHHQQVFTPRVCLKTDHLKTLNDFQKLLGDIQWLRPYLKLPTSALVPLNNILKPDPNPLSVRALTPEAKQSLALINKAIQNQSVQQISYNLPLVLLLLPTPHTPTAVFWQPNGTDPTKNGSPLLWLHLPASPSKVLLTYPSLLAMLIIKGRYTGRQLFGRDPHSIIIPYTQDQLTWLLQTSDEWAIALSSFTGDIDNHYPSDPVIQFAKLHQFIFPKITKCAPIPQATLVFTDGSSNGIAAYVIDNQPISIKSPYLSAQLVELYAILQVFTVLAHQPFNLYTDSAYIAQSVPLLETVPFIKSSTNATPLFSKLQQLILNRQHPFFIGHLRAHLNLPGPLAEGNALADAATQIFPIISDAGKRTADGSEFEKRTADGSEFESPKKKAKVE

SEQ ID NO: 6743 - protein, 2072 aa, synthetic construct
MPAAKRVKLDGGDKKYSIGLDIGTNSVGWAVITDEYKVPSKKFKVLGNTDRHSIKKNLIGALLFDSGETAEATRLKRTARRRYTRRKNRICYLQEIFSNEMAKVDDSFFHRLEESFLVEEDKKHERHPIFGNIVDEVAYHEKYPTIYHLRKKLVDSTDKADLRLIYLALAHMIKFRGHFLIEGDLNPDNSDVDKLFIQLVQTYNQLFEENPINASGVDAKAILSARLSKSRRLENLIAQLPGEKKNGLFGNLIALSLGLTPNFKSNFDLAEDAKLQLSKDTYDDDLDNLLAQIGDQYADLFLAAKNLSDAILLSDILRVNTEITKAPLSASMIKRYDEHHQDLTLLKALVRQQLPEKYKEIFFDQSKNGYAGYIDGGASQEEFYKFIKPILEKMDGTEELLVKLNREDLLRKQRTFDNGSIPHQIHLGELHAILRRQEDFYPFLKDNREKIEKILTFRIPYYVGPLARGNSRFAWMTRKSEETITPWNFEEVVDKGASAQSFIERMTNFDKNLPNEKVLPKHSLLYEYFTVYNELTKVKYVTEGMRKPAFLSGEQKKAIVDLLFKTNRKVTVKQLKEDYFKKIECFDSVEISGVEDRFNASLGTYHDLLKIIKDKDFLDNEENEDILEDIVLTLTLFEDREMIEERLKTYAHLFDDKVMKQLKRRRYTGWGRLSRKLINGIRDKQSGKTILDFLKSDGFANRNFMQLIHDDSLTFKEDIQKAQVSGQGDSLHEHIANLAGSPAIKKGILQTVKVVDELVKVMGRHKPENIVIEMARENQTTQKGQKNSRERMKRIEEGIKELGSQILKEHPVENTQLQNEKLYLYYLQNGRDMYVDQELDINRLSDYDVDHIVPQSFLKDDSIDNKVLTRSDKARGKSDNVPSEEVVKKMKNYWRQLLNAKLITQRKFDNLTKAERGGLSELDKAGFIKRQLVETRQITKHVAQILDSRMNTKYDENDKLIREVKVITLKSKLVSDFRKDFQFYKVREINNYHHAHDAYLNAVVGTALIKKYPKLESEFVYGDYKVYDVRKMIAKSEQEIGKATAKYFFYSNIMNFFKTEITLANGEIRKRPLIETNGETGEIVWDKGRDFATVRKVLSMPQVNIVKKTEVQTGGFSKESILPKRNSDKLIARKKDWDPKKYGGFDSPTVAYSVLVVAKVEKGKSKKLKSVKELLGITIMERSSFEKNPIDFLEAKGYKEVKKDLIIKLPKYSLFELENGRKRMLASAGELQKGNELALPSKYVNFLYLASHYEKLKGSPEDNEQKQLFVEQHKHYLDEIIEQISEFSKRVILADANLDKVLSAYNKHRDKPIREQAENIIHLFTLTNLGAPAAFKYFDTTIDRKRYTSTKEVLDATLIHQSITGLYETRIDLSQLGGDGGEAAAKGSSGGSCQTKNTLNIDEYLLQFPDQLWASLPTDIGRMLVPPITIKIKDNASLPSIRQYPLPKDKTEGLRPLISSLENQGILIKCHSPCNTPIFPIKKAGRDEYRMIHDLRAINNIVAPLTAVVASPTTVLSNLAPSLHWFTVIDLSNAFFSVPIHKDSQYLFAFTFEGHQYTWTVLPQGFIHSPTLFSQALYQSLHKIKFKISSEICIYMDDVLIASKDRDTNLKDTAVMLQHLASEGHKVSKKKLQLCQQEVVYLGQLLTPEGRKILPDRKVTVSQFQQPTTIRQIRAFLGLVGYCRHWIPEFSIHSKFLEKQLKKDTAEPFQLDDQQVEAFNKLKHAITTAPVLVVPDPAKPFQLYTSHSEHASIAVLTQKHAGRTRPIAFLSSKFDAIESGLPPCLKACASIHRSLTQADSFILGAPLIIYTTHAICTLLQRDRSQLVTASRFSKWEADLLRPELTFVACSAVSPAHLYMQSCENNIPPHDCVLLTHTISRPRPDLSDLPIPDPDMTLFSDGSYTTGRGGAAVVMHRPVTDDFIIIHQQPGGASAQTAELLALAAACHLATDKTVNIYTDSRYAYGVVHDFGHLWMHRGFVTSAGTPIKNHKEIEYLLKQIMKPKQVSVIKIEAHTKGVSMEVRGNAAADEAAKNAVFLVQRAGKRTADGSEFEKRTADGSEFESPKKKAKVE

SEQ ID NO: 6744 - protein, 2093 aa, synthetic construct
MPAAKRVKLDGGDKKYSIGLDIGTNSVGWAVITDEYKVPSKKFKVLGNTDRHSIKKNLIGALLFDSGETAEATRLKRTARRRYTRRKNRICYLQEIFSNEMAKVDDSFFHRLEESFLVEEDKKHERHPIFGNIVDEVAYHEKYPTIYHLRKKLVDSTDKADLRLIYLALAHMIKFRGHFLIEGDLNPDNSDVDKLFIQLVQTYNQLFEENPINASGVDAKAILSARLSKSRRLENLIAQLPGEKKNGLFGNLIALSLGLTPNFKSNFDLAEDAKLQLSKDTYDDDLDNLLAQIGDQYADLFLAAKNLSDAILLSDILRVNTEITKAPLSASMIKRYDEHHQDLTLLKALVRQQLPEKYKEIFFDQSKNGYAGYIDGGASQEEFYKFIKPILEKMDGTEELLVKLNREDLLRKQRTFDNGSIPHQIHLGELHAILRRQEDFYPFLKDNREKIEKILTFRIPYYVGPLARGNSRFAWMTRKSEETITPWNFEEVVDKGASAQSFIERMTNFDKNLPNEKVLPKHSLLYEYFTVYNELTKVKYVTEGMRKPAFLSGEQKKAIVDLLFKTNRKVTVKQLKEDYFKKIECFDSVEISGVEDRFNASLGTYHDLLKIIKDKDFLDNEENEDILEDIVLTLTLFEDREMIEERLKTYAHLFDDKVMKQLKRRRYTGWGRLSRKLINGIRDKQSGKTILDFLKSDGFANRNFMQLIHDDSLTFKEDIQKAQVSGQGDSLHEHIANLAGSPAIKKGILQTVKVVDELVKVMGRHKPENIVIEMARENQTTQKGQKNSRERMKRIEEGIKELGSQILKEHPVENTQLQNEKLYLYYLQNGRDMYVDQELDINRLSDYDVDHIVPQSFLKDDSIDNKVLTRSDKARGKSDNVPSEEVVKKMKNYWRQLLNAKLITQRKFDNLTKAERGGLSELDKAGFIKRQLVETRQITKHVAQILDSRMNTKYDENDKLIREVKVITLKSKLVSDFRKDFQFYKVREINNYHHAHDAYLNAVVGTALIKKYPKLESEFVYGDYKVYDVRKMIAKSEQEIGKATAKYFFYSNIMNFFKTEITLANGEIRKRPLIETNGETGEIVWDKGRDFATVRKVLSMPQVNIVKKTEVQTGGFSKESILPKRNSDKLIARKKDWDPKKYGGFDSPTVAYSVLVVAKVEKGKSKKLKSVKELLGITIMERSSFEKNPIDFLEAKGYKEVKKDLIIKLPKYSLFELENGRKRMLASAGELQKGNELALPSKYVNFLYLASHYEKLKGSPEDNEQKQLFVEQHKHYLDEIIEQISEFSKRVILADANLDKVLSAYNKHRDKPIREQAENIIHLFTLTNLGAPAAFKYFDTTIDRKRYTSTKEVLDATLIHQSITGLYETRIDLSQLGGDGGEAAAKGSSGGTLNIEDEYRLHETSKEPDVPLGSTWLSDFPQAWAETGGMGLAVRQAPLIIPLKATSTPVSIKQYPMSQEARLGIKPHIQRLLDQGILVPCQSPWNTPLLPVKKPGTNDYRPVQDLREVNKRVEDIHPTVPNPYNLLSGLPPSHQWYTVLDLKDAFFCLRLHPTSQPLFAFEWRDPEMGISGQLTWTRLPQGFKNSPTLFNEALHRDLADFRIQHPDLILLQYVDDLLLAATSEQDCQRGTRALLQTLGNLGYRASAKKAQICQKQVKYLGYLLKEGQRWLTEARKETVMGQPTPKTPRQLREFLGTAGFCRLWIPGFAEMAAPLYPLTKPGTLFNWGPDQQKAYQEIKQALLTAPALGLPDLTKPFELFVDEKQGYAKGVLTQKLGPWRRPVAYLSKKLDPVAAGWPPCLRMVAAIAVLTKDAGKLTMGQPLVILAPHAVEALVKQPPDRWLSNARMTHYQAMLLDTDRVQFGPVVALNPATLLPLPEKEAPHDCLEILAETHGTRPDLTDQPIPDADYTWYTDGSSFLQEGQRRAGAAVTTETEVIWARALPAGTSAQRAELIALTQALKMAEGKKLNVYTDSRYAFATAHVHGEIYRRRGWLTSEGREIKNKNEILALLKALFLPKRLSIIHCPGHQKGNSAEARGNRMADQAAREAAMKAVLETSTLLAGKRTADGSEFEKRTADGSEFESPKKKAKVE

SEQ ID NO: 6745 - protein, 2093 aa, synthetic construct
MPAAKRVKLDGGDKKYSIGLDIGTNSVGWAVITDEYKVPSKKFKVLGNTDRHSIKKNLIGALLFDSGETAEATRLKRTARRRYTRRKNRICYLQEIFSNEMAKVDDSFFHRLEESFLVEEDKKHERHPIFGNIVDEVAYHEKYPTIYHLRKKLVDSTDKADLRLIYLALAHMIKFRGHFLIEGDLNPDNSDVDKLFIQLVQTYNQLFEENPINASGVDAKAILSARLSKSRRLENLIAQLPGEKKNGLFGNLIALSLGLTPNFKSNFDLAEDAKLQLSKDTYDDDLDNLLAQIGDQYADLFLAAKNLSDAILLSDILRVNTEITKAPLSASMIKRYDEHHQDLTLLKALVRQQLPEKYKEIFFDQSKNGYAGYIDGGASQEEFYKFIKPILEKMDGTEELLVKLNREDLLRKQRTFDNGSIPHQIHLGELHAILRRQEDFYPFLKDNREKIEKILTFRIPYYVGPLARGNSRFAWMTRKSEETITPWNFEEVVDKGASAQSFIERMTNFDKNLPNEKVLPKHSLLYEYFTVYNELTKVKYVTEGMRKPAFLSGEQKKAIVDLLFKTNRKVTVKQLKEDYFKKIECFDSVEISGVEDRFNASLGTYHDLLKIIKDKDFLDNEENEDILEDIVLTLTLFEDREMIEERLKTYAHLFDDKVMKQLKRRRYTGWGRLSRKLINGIRDKQSGKTILDFLKSDGFANRNFMQLIHDDSLTFKEDIQKAQVSGQGDSLHEHIANLAGSPAIKKGILQTVKVVDELVKVMGRHKPENIVIEMARENQTTQKGQKNSRERMKRIEEGIKELGSQILKEHPVENTQLQNEKLYLYYLQNGRDMYVDQELDINRLSDYDVDHIVPQSFLKDDSIDNKVLTRSDKARGKSDNVPSEEVVKKMKNYWRQLLNAKLITQRKFDNLTKAERGGLSELDKAGFIKRQLVETRQITKHVAQILDSRMNTKYDENDKLIREVKVITLKSKLVSDFRKDFQFYKVREINNYHHAHDAYLNAVVGTALIKKYPKLESEFVYGDYKVYDVRKMIAKSEQEIGKATAKYFFYSNIMNFFKTEITLANGEIRKRPLIETNGETGEIVWDKGRDFATVRKVLSMPQVNIVKKTEVQTGGFSKESILPKRNSDKLIARKKDWDPKKYGGFDSPTVAYSVLVVAKVEKGKSKKLKSVKELLGITIMERSSFEKNPIDFLEAKGYKEVKKDLIIKLPKYSLFELENGRKRMLASAGELQKGNELALPSKYVNFLYLASHYEKLKGSPEDNEQKQLFVEQHKHYLDEIIEQISEFSKRVILADANLDKVLSAYNKHRDKPIREQAENIIHLFTLTNLGAPAAFKYFDTTIDRKRYTSTKEVLDATLIHQSITGLYETRIDLSQLGGDGGGSSPAPGGTAPLEEEYRLFLEAPIQNVTLLEQWKREIPKVWAEINPPGLASTQAPIHVQLLSTALPVRVRQYPITLEAKRSLRETIRKFRAAGILRPVHSPWNTPLLPVRKSGTSEYRMVQDLREVNKRVETIHPTVPNPYTLLSLLPPDRIWYSVLDLKDAFFCIPLAPESQLIFAFEWADAEEGESGQLTWTRLPQGFKNSPTLFNEALNRDLQGFRLDHPSVSLLQYVDDLLIAADTQAACLSATRDLLMTLAELGYRVSGKKAQLCQEEVTYLGFKIHKGSRSLSNSRTQAILQIPVPKTKRQVREFLGTIGYCRLWIPGFAELAQPLYAATRPGNDPLVWGEKEEEAFQSLKLALTQPPALALPSLDKPFQLFVEETSGAAKGVLTQALGPWKRPVAYLSKRLDPVAAGWPRCLRAIAAAALLTREASKLTFGQDIEITSSHNLESLLRSPPDKWLTNARITQYQVLLLDPPRVRFKQTAALNPATLLPETDDTLPIHHCLDTLDSLTSTRPDLTDQPLAQAEATLFTDGSSYIRDGKRYAGAAVVTLDSVIWAEPLPIGTSAQKAELIALTKALEWSKDKSVNIYTDSRYAFATLHVHGMIYRERGWLTAGGKAIKNAPEILALLTAVWLPKRVAVMHCKGHQKDDAPTSTGNRRADEVAREVAIRPLSTQATISAGKRTADGSEFEKRTADGSEFESPKKKAKVE

SEQ ID NO: 6746 - protein, 2097 aa, synthetic construct
MPAAKRVKLDGGDKKYSIGLDIGTNSVGWAVITDEYKVPSKKFKVLGNTDRHSIKKNLIGALLFDSGETAEATRLKRTARRRYTRRKNRICYLQEIFSNEMAKVDDSFFHRLEESFLVEEDKKHERHPIFGNIVDEVAYHEKYPTIYHLRKKLVDSTDKADLRLIYLALAHMIKFRGHFLIEGDLNPDNSDVDKLFIQLVQTYNQLFEENPINASGVDAKAILSARLSKSRRLENLIAQLPGEKKNGLFGNLIALSLGLTPNFKSNFDLAEDAKLQLSKDTYDDDLDNLLAQIGDQYADLFLAAKNLSDAILLSDILRVNTEITKAPLSASMIKRYDEHHQDLTLLKALVRQQLPEKYKEIFFDQSKNGYAGYIDGGASQEEFYKFIKPILEKMDGTEELLVKLNREDLLRKQRTFDNGSIPHQIHLGELHAILRRQEDFYPFLKDNREKIEKILTFRIPYYVGPLARGNSRFAWMTRKSEETITPWNFEEVVDKGASAQSFIERMTNFDKNLPNEKVLPKHSLLYEYFTVYNELTKVKYVTEGMRKPAFLSGEQKKAIVDLLFKTNRKVTVKQLKEDYFKKIECFDSVEISGVEDRFNASLGTYHDLLKIIKDKDFLDNEENEDILEDIVLTLTLFEDREMIEERLKTYAHLFDDKVMKQLKRRRYTGWGRLSRKLINGIRDKQSGKTILDFLKSDGFANRNFMQLIHDDSLTFKEDIQKAQVSGQGDSLHEHIANLAGSPAIKKGILQTVKVVDELVKVMGRHKPENIVIEMARENQTTQKGQKNSRERMKRIEEGIKELGSQILKEHPVENTQLQNEKLYLYYLQNGRDMYVDQELDINRLSDYDVDHIVPQSFLKDDSIDNKVLTRSDKARGKSDNVPSEEVVKKMKNYWRQLLNAKLITQRKFDNLTKAERGGLSELDKAGFIKRQLVETRQITKHVAQILDSRMNTKYDENDKLIREVKVITLKSKLVSDFRKDFQFYKVREINNYHHAHDAYLNAVVGTALIKKYPKLESEFVYGDYKVYDVRKMIAKSEQEIGKATAKYFFYSNIMNFFKTEITLANGEIRKRPLIETNGETGEIVWDKGRDFATVRKVLSMPQVNIVKKTEVQTGGFSKESILPKRNSDKLIARKKDWDPKKYGGFDSPTVAYSVLVVAKVEKGKSKKLKSVKELLGITIMERSSFEKNPIDFLEAKGYKEVKKDLIIKLPKYSLFELENGRKRMLASAGELQKGNELALPSKYVNFLYLASHYEKLKGSPEDNEQKQLFVEQHKHYLDEIIEQISEFSKRVILADANLDKVLSAYNKHRDKPIREQAENIIHLFTLTNLGAPAAFKYFDTTIDRKRYTSTKEVLDATLIHQSITGLYETRIDLSQLGGDGGGSSPAPGGTVSLQDEHRLFDIPVTTSLPDVWLQDFPQAWAETGGLGRAKCQAPIIIDLKPTAVPVSIKQYPMSLEAHMGIRQHIIKFLELGVLRPCRSPWNTPLLPVKKPGTQDYRPVQDLREINKRTVDIHPTVPNPYNLLSTLKPDYSWYTVLDLKDAFFCLPLAPQSQELFAFEWKDPERGISGQLTWTRLPQGFKNSPTLFNEALHRDLTDFRTQHPEVTLLQYVDDLLLAAPTKKACTQGTRHLLQELGEKGYRASAKKAQICQTKVTYLGYILSEGKRWLTPGRIETVARIPPPRNPREVREFLGKAGFCRLFIPGFAELAAPLYALTKPSTPFTWQTEHQLAFEALKKALLSAPALGLPDTSKPFTLFLDERQGIAKGVLTQKLGPWKRPVAYLSKKLDPVAAGWPPCLRIMAATAMLVKDSAKLTLGQPLTVITPHTLEAIVRQPPDRWITNARLTHYQALLLDTDRVQFGPPVTLNPATLLPVPENQPSPHDCRQVLAETHGTREDLKDQELPDADHTWYTDGSSYLDSGTRRAGAAVVDGHNTIWAQSLPPGTSAQKAELIALTKALELSKGKKANIYTDSRYAFATAHTHGSIYERRGWLTSEGKEIKNKAEIIALLKALFLPQEVAIIHCPGHQKGQDPVAVGNRQADRVARQAAMAEVLTLATEPDNTSHITAGKRTADGSEFEKRTADGSEFESPKKKAKVE

SEQ ID NO: 6747 - protein, 2082 aa, synthetic construct
MPAAKRVKLDGGDKKYSIGLDIGTNSVGWAVITDEYKVPSKKFKVLGNTDRHSIKKNLIGALLFDSGETAEATRLKRTARRRYTRRKNRICYLQEIFSNEMAKVDDSFFHRLEESFLVEEDKKHERHPIFGNIVDEVAYHEKYPTIYHLRKKLVDSTDKADLRLIYLALAHMIKFRGHFLIEGDLNPDNSDVDKLFIQLVQTYNQLFEENPINASGVDAKAILSARLSKSRRLENLIAQLPGEKKNGLFGNLIALSLGLTPNFKSNFDLAEDAKLQLSKDTYDDDLDNLLAQIGDQYADLFLAAKNLSDAILLSDILRVNTEITKAPLSASMIKRYDEHHQDLTLLKALVRQQLPEKYKEIFFDQSKNGYAGYIDGGASQEEFYKFIKPILEKMDGTEELLVKLNREDLLRKQRTFDNGSIPHQIHLGELHAILRRQEDFYPFLKDNREKIEKILTFRIPYYVGPLARGNSRFAWMTRKSEETITPWNFEEVVDKGASAQSFIERMTNFDKNLPNEKVLPKHSLLYEYFTVYNELTKVKYVTEGMRKPAFLSGEQKKAIVDLLFKTNRKVTVKQLKEDYFKKIECFDSVEISGVEDRFNASLGTYHDLLKIIKDKDFLDNEENEDILEDIVLTLTLFEDREMIEERLKTYAHLFDDKVMKQLKRRRYTGWGRLSRKLINGIRDKQSGKTILDFLKSDGFANRNFMQLIHDDSLTFKEDIQKAQVSGQGDSLHEHIANLAGSPAIKKGILQTVKVVDELVKVMGRHKPENIVIEMARENQTTQKGQKNSRERMKRIEEGIKELGSQILKEHPVENTQLQNEKLYLYYLQNGRDMYVDQELDINRLSDYDVDHIVPQSFLKDDSIDNKVLTRSDKARGKSDNVPSEEVVKKMKNYWRQLLNAKLITQRKFDNLTKAERGGLSELDKAGFIKRQLVETRQITKHVAQILDSRMNTKYDENDKLIREVKVITLKSKLVSDFRKDFQFYKVREINNYHHAHDAYLNAVVGTALIKKYPKLESEFVYGDYKVYDVRKMIAKSEQEIGKATAKYFFYSNIMNFFKTEITLANGEIRKRPLIETNGETGEIVWDKGRDFATVRKVLSMPQVNIVKKTEVQTGGFSKESILPKRNSDKLIARKKDWDPKKYGGFDSPTVAYSVLVVAKVEKGKSKKLKSVKELLGITIMERSSFEKNPIDFLEAKGYKEVKKDLIIKLPKYSLFELENGRKRMLASAGELQKGNELALPSKYVNFLYLASHYEKLKGSPEDNEQKQLFVEQHKHYLDEIIEQISEFSKRVILADANLDKVLSAYNKHRDKPIREQAENIIHLFTLTNLGAPAAFKYFDTTIDRKRYTSTKEVLDATLIHQSITGLYETRIDLSQLGGDGGGSSPAPGGVPWILKKPLELTIKLDLEEQQGTLLNNSILSKKGKEELKQLFEKYSALWQSWENQVGHRRIRPHKIATGTVKPTPQKQYHINPKAKPDIQIVINDLLKQGVLIQKESTMNTPVYPVPKPNGRWRMVLDYRAVNKVTPLIAVQNQHSYGILGSLFKGRYKTTIDLSNGFWAHPIVPEDYWITAFTWQGKQYCWTVLPQGFLNSPGLFTGDVVDLLQGIPNVEVYVDDVYISHDSEKEHLEYLDILFNRLKEAGYIISLKKSNIANSIVDFLGFQITNEGRGLTDTFKEKLENITAPTTLKQLQSILGLLNFARNFIPDFTELIAPLYALIPKSTKNYVPWQIEHSTTLETLITKLNGAEYLQGRKGDKTLIMKVNASYTTGYIRYYNEGEKKPISYVSIVFSKTELKFTELEKLLTTVHKGLLKALDLSMGQNIHVYSPIVSMQNIQKTPQTAKKALASRWLSWLSYLEDPRIRFFYDPQMPALKDLPAVDTGKDNKKHPSNFQHIFYTDGSAITSPTKEGHLNAGMGIVYFINKDGNLQKQQEWSISLGNHTAQFAEIAAFEFALKKCLPLGGNILVVTDSNYVAKAYNEELDVWASNGFVNNRKKPLKHISKWKSVADLKRLRPDVVVTHEPGHQKLDSSPHAYGNNLADQLATQASFKVHAGKRTADGSEFEKRTADGSEFESPKKKAKVE

SEQ ID NO: 6748 - protein, 2090 aa, synthetic construct
MPAAKRVKLDGGDKKYSIGLDIGTNSVGWAVITDEYKVPSKKFKVLGNTDRHSIKKNLIGALLFDSGETAEATRLKRTARRRYTRRKNRICYLQEIFSNEMAKVDDSFFHRLEESFLVEEDKKHERHPIFGNIVDEVAYHEKYPTIYHLRKKLVDSTDKADLRLIYLALAHMIKFRGHFLIEGDLNPDNSDVDKLFIQLVQTYNQLFEENPINASGVDAKAILSARLSKSRRLENLIAQLPGEKKNGLFGNLIALSLGLTPNFKSNFDLAEDAKLQLSKDTYDDDLDNLLAQIGDQYADLFLAAKNLSDAILLSDILRVNTEITKAPLSASMIKRYDEHHQDLTLLKALVRQQLPEKYKEIFFDQSKNGYAGYIDGGASQEEFYKFIKPILEKMDGTEELLVKLNREDLLRKQRTFDNGSIPHQIHLGELHAILRRQEDFYPFLKDNREKIEKILTFRIPYYVGPLARGNSRFAWMTRKSEETITPWNFEEVVDKGASAQSFIERMTNFDKNLPNEKVLPKHSLLYEYFTVYNELTKVKYVTEGMRKPAFLSGEQKKAIVDLLFKTNRKVTVKQLKEDYFKKIECFDSVEISGVEDRFNASLGTYHDLLKIIKDKDFLDNEENEDILEDIVLTLTLFEDREMIEERLKTYAHLFDDKVMKQLKRRRYTGWGRLSRKLINGIRDKQSGKTILDFLKSDGFANRNFMQLIHDDSLTFKEDIQKAQVSGQGDSLHEHIANLAGSPAIKKGILQTVKVVDELVKVMGRHKPENIVIEMARENQTTQKGQKNSRERMKRIEEGIKELGSQILKEHPVENTQLQNEKLYLYYLQNGRDMYVDQELDINRLSDYDVDHIVPQSFLKDDSIDNKVLTRSDKARGKSDNVPSEEVVKKMKNYWRQLLNAKLITQRKFDNLTKAERGGLSELDKAGFIKRQLVETRQITKHVAQILDSRMNTKYDENDKLIREVKVITLKSKLVSDFRKDFQFYKVREINNYHHAHDAYLNAVVGTALIKKYPKLESEFVYGDYKVYDVRKMIAKSEQEIGKATAKYFFYSNIMNFFKTEITLANGEIRKRPLIETNGETGEIVWDKGRDFATVRKVLSMPQVNIVKKTEVQTGGFSKESILPKRNSDKLIARKKDWDPKKYGGFDSPTVAYSVLVVAKVEKGKSKKLKSVKELLGITIMERSSFEKNPIDFLEAKGYKEVKKDLIIKLPKYSLFELENGRKRMLASAGELQKGNELALPSKYVNFLYLASHYEKLKGSPEDNEQKQLFVEQHKHYLDEIIEQISEFSKRVILADANLDKVLSAYNKHRDKPIREQAENIIHLFTLTNLGAPAAFKYFDTTIDRKRYTSTKEVLDATLIHQSITGLYETRIDLSQLGGDGGGSSPAPGGTLQLEEEYRLFEPESTQKQEMDIWLKNFPQAWAETGGMGTAHCQAPVLIQLKATATPISIRQYPMPHEAYQGIKPHIRRMLDQGILKPCQSPWNTPLLPVKKPGTEDYRPVQDLREVNKRVEDIHPTVPNPYNLLSTLPPSHPWYTVLDLKDAFFCLRLHSESQLLFAFEWRDPEIGLSGQLTWTRLPQGFKNSPTLFNEALHSDLADFRVRYPALVLLQYVDDLLLAAATRTECLEGTKALLETLGNKGYRASAKKAQICLQEVTYLGYSLKDGQRWLTKARKEAILSIPVPKNSRQVREFLGTAGYCRLWIPGFAELAAPLYPLTRPGTLFQWGTEQQLAFEDIKKALLSSPALGLPDITKPFELFIDENSGFAKGVLVQKLGPWKRPVAYLSKKLDTVASGWPPCLRMVAAIAILVKDAGKLTLGQPLTILTSHPVEALVRQPPNKWLSNARMTHYQAMLLDAERVHFGPTVSLNPATLLPLPSGGNHHDCLQILAETHGTRPDLTDQPLPDADLTWYTDGSSFIRNGEREAGAAVTTESEVIWAAPLPPGTSAQRAELIALTQALKMAEGKKLTVYTDSRYAFATTHVHGEIYRRRGWLTSEGKEIKNKNEILALLEALFLPKRLSIIHCPGHQKGDSPQAKGNRLADDTAKKAATETHSSLTVLPAGKRTADGSEFEKRTADGSEFESPKKKAKVE

SEQ ID NO: 6749 - protein, 2213 aa, synthetic construct
MPAAKRVKLDGGDKKYSIGLDIGTNSVGWAVITDEYKVPSKKFKVLGNTDRHSIKKNLIGALLFDSGETAEATRLKRTARRRYTRRKNRICYLQEIFSNEMAKVDDSFFHRLEESFLVEEDKKHERHPIFGNIVDEVAYHEKYPTIYHLRKKLVDSTDKADLRLIYLALAHMIKFRGHFLIEGDLNPDNSDVDKLFIQLVQTYNQLFEENPINASGVDAKAILSARLSKSRRLENLIAQLPGEKKNGLFGNLIALSLGLTPNFKSNFDLAEDAKLQLSKDTYDDDLDNLLAQIGDQYADLFLAAKNLSDAILLSDILRVNTEITKAPLSASMIKRYDEHHQDLTLLKALVRQQLPEKYKEIFFDQSKNGYAGYIDGGASQEEFYKFIKPILEKMDGTEELLVKLNREDLLRKQRTFDNGSIPHQIHLGELHAILRRQEDFYPFLKDNREKIEKILTFRIPYYVGPLARGNSRFAWMTRKSEETITPWNFEEVVDKGASAQSFIERMTNFDKNLPNEKVLPKHSLLYEYFTVYNELTKVKYVTEGMRKPAFLSGEQKKAIVDLLFKTNRKVTVKQLKEDYFKKIECFDSVEISGVEDRFNASLGTYHDLLKIIKDKDFLDNEENEDILEDIVLTLTLFEDREMIEERLKTYAHLFDDKVMKQLKRRRYTGWGRLSRKLINGIRDKQSGKTILDFLKSDGFANRNFMQLIHDDSLTFKEDIQKAQVSGQGDSLHEHIANLAGSPAIKKGILQTVKVVDELVKVMGRHKPENIVIEMARENQTTQKGQKNSRERMKRIEEGIKELGSQILKEHPVENTQLQNEKLYLYYLQNGRDMYVDQELDINRLSDYDVDHIVPQSFLKDDSIDNKVLTRSDKARGKSDNVPSEEVVKKMKNYWRQLLNAKLITQRKFDNLTKAERGGLSELDKAGFIKRQLVETRQITKHVAQILDSRMNTKYDENDKLIREVKVITLKSKLVSDFRKDFQFYKVREINNYHHAHDAYLNAVVGTALIKKYPKLESEFVYGDYKVYDVRKMIAKSEQEIGKATAKYFFYSNIMNFFKTEITLANGEIRKRPLIETNGETGEIVWDKGRDFATVRKVLSMPQVNIVKKTEVQTGGFSKESILPKRNSDKLIARKKDWDPKKYGGFDSPTVAYSVLVVAKVEKGKSKKLKSVKELLGITIMERSSFEKNPIDFLEAKGYKEVKKDLIIKLPKYSLFELENGRKRMLASAGELQKGNELALPSKYVNFLYLASHYEKLKGSPEDNEQKQLFVEQHKHYLDEIIEQISEFSKRVILADANLDKVLSAYNKHRDKPIREQAENIIHLFTLTNLGAPAAFKYFDTTIDRKRYTSTKEVLDATLIHQSITGLYETRIDLSQLGGDGGGSSPAPGGTLGDQGSRGSDPLPEPRVTLTVEGIPTEFLVNTGAEHSVLTKPMGKMGSKRTVVAGATGSKVYPWTTKRLLKIGQKQVTHSFLVIPECPAPLLGRDLLTKLKAQIQFSTEGPQVTWEDRPAMCLVLNLEEEYRLHEKPVPPSIDPSWLQLFPMVWAEKAGMGLANQVPPVVVELKSDASPVAVRQYPMSKEAREGIRPHIQRFLDLGILVPCQSPWNTPLLPVKKPGTNDYRPVQDLREVNKRVQDIHPTVPNPYNLLSSLPPSHTWYSVLDLKDAFFCLKLHPNSQPLFAFEWRDPEKGNTGQLTWTRLPQGFKNSPTLFNEALHRDLASFRALNPQVVMLQYVDDLLVAAPTYRDCKEGTRRLLQELSKLGYRVSAKKAQLCREEVTYLGYLLKGGKRWLTPARKATVMKIPTPTTPRQVREFLGTAGFCRLWIPGFASLAAPLYPLTRPKVPFTWTEAHQEAFGRIKEALLSAPALALPDLTKPFALYVDEKEGVARGVLTQTLGPWRRPVAYLSKKLDPVASGWPTCLKAIAAVALLLKDADKLTLGQNVLVIAPHNLESIVRQPPDRWMTNARMTHYQSLLLNERVSFAPPAILNPATLLPVESDDTPIHICSEILAEETGTRPDLRDQPLPGVPAWYTDGSSFIMDGRRQAGAAIVDNKRTVWASNLPEGTSAQKAELIALTQALRLAEGKSINIYTDSRYAFATAHVHGAIYKQRGWLTSAGKDIKNKEEILALLEAIHLPKRVAIIHCPGHQRGTDPVATGNRKADEAAKQAAQSTRILTETTKNAGKRTADGSEFEKRTADGSEFESPKKKAKVE

SEQ ID NO: 6750 - protein, 2091 aa, synthetic construct
MPAAKRVKLDGGDKKYSIGLDIGTNSVGWAVITDEYKVPSKKFKVLGNTDRHSIKKNLIGALLFDSGETAEATRLKRTARRRYTRRKNRICYLQEIFSNEMAKVDDSFFHRLEESFLVEEDKKHERHPIFGNIVDEVAYHEKYPTIYHLRKKLVDSTDKADLRLIYLALAHMIKFRGHFLIEGDLNPDNSDVDKLFIQLVQTYNQLFEENPINASGVDAKAILSARLSKSRRLENLIAQLPGEKKNGLFGNLIALSLGLTPNFKSNFDLAEDAKLQLSKDTYDDDLDNLLAQIGDQYADLFLAAKNLSDAILLSDILRVNTEITKAPLSASMIKRYDEHHQDLTLLKALVRQQLPEKYKEIFFDQSKNGYAGYIDGGASQEEFYKFIKPILEKMDGTEELLVKLNREDLLRKQRTFDNGSIPHQIHLGELHAILRRQEDFYPFLKDNREKIEKILTFRIPYYVGPLARGNSRFAWMTRKSEETITPWNFEEVVDKGASAQSFIERMTNFDKNLPNEKVLPKHSLLYEYFTVYNELTKVKYVTEGMRKPAFLSGEQKKAIVDLLFKTNRKVTVKQLKEDYFKKIECFDSVEISGVEDRFNASLGTYHDLLKIIKDKDFLDNEENEDILEDIVLTLTLFEDREMIEERLKTYAHLFDDKVMKQLKRRRYTGWGRLSRKLINGIRDKQSGKTILDFLKSDGFANRNFMQLIHDDSLTFKEDIQKAQVSGQGDSLHEHIANLAGSPAIKKGILQTVKVVDELVKVMGRHKPENIVIEMARENQTTQKGQKNSRERMKRIEEGIKELGSQILKEHPVENTQLQNEKLYLYYLQNGRDMYVDQELDINRLSDYDVDHIVPQSFLKDDSIDNKVLTRSDKARGKSDNVPSEEVVKKMKNYWRQLLNAKLITQRKFDNLTKAERGGLSELDKAGFIKRQLVETRQITKHVAQILDSRMNTKYDENDKLIREVKVITLKSKLVSDFRKDFQFYKVREINNYHHAHDAYLNAVVGTALIKKYPKLESEFVYGDYKVYDVRKMIAKSEQEIGKATAKYFFYSNIMNFFKTEITLANGEIRKRPLIETNGETGEIVWDKGRDFATVRKVLSMPQVNIVKKTEVQTGGFSKESILPKRNSDKLIARKKDWDPKKYGGFDSPTVAYSVLVVAKVEKGKSKKLKSVKELLGITIMERSSFEKNPIDFLEAKGYKEVKKDLIIKLPKYSLFELENGRKRMLASAGELQKGNELALPSKYVNFLYLASHYEKLKGSPEDNEQKQLFVEQHKHYLDEIIEQISEFSKRVILADANLDKVLSAYNKHRDKPIREQAENIIHLFTLTNLGAPAAFKYFDTTIDRKRYTSTKEVLDATLIHQSITGLYETRIDLSQLGGDGGGSSPAPGGTLGIEDEYRLHETSTEPDVSLGSTWLSDFPQAWAETGGMGLAVRQAPLIIPLKATSTPVSIQQYPMSHEARLGIKPHIQRLLDQGILVPCQSPWNTPLLPVKKPGTNDYRPVQDLREVNKRVEDIHPTVPNPYNLLSGLPPSHQWYTVLDLKDAFFCLRLHPTSQPLFAFEWRDPGMGISGQLTWTRLPQGFKNSPTLFNEALHRDLADFRIQHPDLILLQYVDDILLAATSELDCQQGTRALLQTLGDLGYRASAKKAQICQKQVKYLGYLLREGQRWLTEARKETVMGQPVPKTPRQLREFLGTAGFCRLWIPGFAEMAAPLYPLTKPGTLFSWGPDQQKAYQEIKQALLTAPALGLPDLTKPFELFVDEKQGYAKGVLTQKLGPWRRPVAYLSKKLDPVAAGWPPCLRMVAAIAVLTKDAGKLTMGQPLVILAPHAVEALVKQPPDRWLSNARMTHYQAMLLDTDRVQFGPVVALNPATLLPLPEEGAPHDCLEILAETHGTRPDLTDQPIPDADHTWYTDGSSFLQEGQRKAGAAVTTETEVIWAGALPAGTSAQRAELIALTQALKMAEGKRLNVYTDSRYAFATAHIHGEIYRRRGWLTSEGREIKNKSEILALLKALFLPKRLSIIHCLGHQKGDSAEARGNRLADQAAREAAIKTPPDTSTLLAGKRTADGSEFEKRTADGSEFESPKKKAKVE

SEQ ID NO: 6751 - protein, 2111 aa, synthetic construct
MPAAKRVKLDGGDKKYSIGLDIGTNSVGWAVITDEYKVPSKKFKVLGNTDRHSIKKNLIGALLFDSGETAEATRLKRTARRRYTRRKNRICYLQEIFSNEMAKVDDSFFHRLEESFLVEEDKKHERHPIFGNIVDEVAYHEKYPTIYHLRKKLVDSTDKADLRLIYLALAHMIKFRGHFLIEGDLNPDNSDVDKLFIQLVQTYNQLFEENPINASGVDAKAILSARLSKSRRLENLIAQLPGEKKNGLFGNLIALSLGLTPNFKSNFDLAEDAKLQLSKDTYDDDLDNLLAQIGDQYADLFLAAKNLSDAILLSDILRVNTEITKAPLSASMIKRYDEHHQDLTLLKALVRQQLPEKYKEIFFDQSKNGYAGYIDGGASQEEFYKFIKPILEKMDGTEELLVKLNREDLLRKQRTFDNGSIPHQIHLGELHAILRRQEDFYPFLKDNREKIEKILTFRIPYYVGPLARGNSRFAWMTRKSEETITPWNFEEVVDKGASAQSFIERMTNFDKNLPNEKVLPKHSLLYEYFTVYNELTKVKYVTEGMRKPAFLSGEQKKAIVDLLFKTNRKVTVKQLKEDYFKKIECFDSVEISGVEDRFNASLGTYHDLLKIIKDKDFLDNEENEDILEDIVLTLTLFEDREMIEERLKTYAHLFDDKVMKQLKRRRYTGWGRLSRKLINGIRDKQSGKTILDFLKSDGFANRNFMQLIHDDSLTFKEDIQKAQVSGQGDSLHEHIANLAGSPAIKKGILQTVKVVDELVKVMGRHKPENIVIEMARENQTTQKGQKNSRERMKRIEEGIKELGSQILKEHPVENTQLQNEKLYLYYLQNGRDMYVDQELDINRLSDYDVDHIVPQSFLKDDSIDNKVLTRSDKARGKSDNVPSEEVVKKMKNYWRQLLNAKLITQRKFDNLTKAERGGLSELDKAGFIKRQLVETRQITKHVAQILDSRMNTKYDENDKLIREVKVITLKSKLVSDFRKDFQFYKVREINNYHHAHDAYLNAVVGTALIKKYPKLESEFVYGDYKVYDVRKMIAKSEQEIGKATAKYFFYSNIMNFFKTEITLANGEIRKRPLIETNGETGEIVWDKGRDFATVRKVLSMPQVNIVKKTEVQTGGFSKESILPKRNSDKLIARKKDWDPKKYGGFDSPTVAYSVLVVAKVEKGKSKKLKSVKELLGITIMERSSFEKNPIDFLEAKGYKEVKKDLIIKLPKYSLFELENGRKRMLASAGELQKGNELALPSKYVNFLYLASHYEKLKGSPEDNEQKQLFVEQHKHYLDEIIEQISEFSKRVILADANLDKVLSAYNKHRDKPIREQAENIIHLFTLTNLGAPAAFKYFDTTIDRKRYTSTKEVLDATLIHQSITGLYETRIDLSQLGGDGGGSSPAPGGTLNIEDEYRLHETSKEPDVSLGSTWLSDFPQAWAETGGMGLAVRQAPLIIPLKATSTPVSIKQYPMSQEARLGIKPHIQRLLDQGILVPCQSPWNTPLLPVKKPGTNDYRPVQDLREVNKRVEDIHPTVPNPYNLLSGLPPSHQWYTVLDLKDAFFCLRLHPTSQPLFAFEWRDPEMGISGQLTWTRLPQGFKNSPTLFNEALHRDLADFRIQHPDLILLQYVDDLLLAATSELDCQQGTRALLQTLGNLGYRASAKKAQICQKQVKYLGYLLKEGQRWLTEARKETVMGQPTPKTPRQLREFLGKAGFCRLFIPGFAEMAAPLYPLTKPGTLFNWGPDQQKAYQEIKQALLTAPALGLPDLTKPFELFVDEKQGYAKGVLTQKLGPWRRPVAYLSKKLDPVAAGWPPCLRMVAAIAVLTKDAGKLTMGQPLVILAPHAVEALVKQPPDRWLSNARMTHYQALLLDTDRVQFGPVVALNPATLLPLPEEGLQHNCLDILAEAHGTRPDLTDQPLPDADHTWYTDGSSLLQEGQRKAGAAVTTETEVIWAKALPAGTSAQRAELIALTQALKMAEGKKLNVYTDSRYAFATAHIHGEIYRRRGWLTSEGKEIKNKDEILALLKALFLPKRLSIIHCPGHQKGHSAEARGNRMADQAARKAAITETPDTSTLLIENSSPSGGSKRTADGSEFEAGKRTADGSEFEKRTADGSEFESPKKKAKVE

SEQ ID NO: 6752 - protein, 2111 aa, synthetic construct; identical to SEQ ID NO: 6751

SEQ ID NO: 6753 - protein, 2082 aa, synthetic construct
MPAAKRVKLDGGDKKYSIGLDIGTNSVGWAVITDEYKVPSKKFKVLGNTDRHSIKKNLIGALLFDSGETAEATRLKRTARRRYTRRKNRICYLQEIFSNEMAKVDDSFFHRLEESFLVEEDKKHERHPIFGNIVDEVAYHEKYPTIYHLRKKLVDSTDKADLRLIYLALAHMIKFRGHFLIEGDLNPDNSDVDKLFIQLVQTYNQLFEENPINASGVDAKAILSARLSKSRRLENLIAQLPGEKKNGLFGNLIALSLGLTPNFKSNFDLAEDAKLQLSKDTYDDDLDNLLAQIGDQYADLFLAAKNLSDAILLSDILRVNTEITKAPLSASMIKRYDEHHQDLTLLKALVRQQLPEKYKEIFFDQSKNGYAGYIDGGASQEEFYKFIKPILEKMDGTEELLVKLNREDLLRKQRTFDNGSIPHQIHLGELHAILRRQEDFYPFLKDNREKIEKILTFRIPYYVGPLARGNSRFAWMTRKSEETITPWNFEEVVDKGASAQSFIERMTNFDKNLPNEKVLPKHSLLYEYFTVYNELTKVKYVTEGMRKPAFLSGEQKKAIVDLLFKTNRKVTVKQLKEDYFKKIECFDSVEISGVEDRFNASLGTYHDLLKIIKDKDFLDNEENEDILEDIVLTLTLFEDREMIEERLKTYAHLFDDKVMKQLKRRRYTGWGRLSRKLINGIRDKQSGKTILDFLKSDGFANRNFMQLIHDDSLTFKEDIQKAQVSGQGDSLHEHIANLAGSPAIKKGILQTVKVVDELVKVMGRHKPENIVIEMARENQTTQKGQKNSRERMKRIEEGIKELGSQILKEHPVENTQLQNEKLYLYYLQNGRDMYVDQELDINRLSDYDVDHIVPQSFLKDDSIDNKVLTRSDKARGKSDNVPSEEVVKKMKNYWRQLLNAKLITQRKFDNLTKAERGGLSELDKAGFIKRQLVETRQITKHVAQILDSRMNTKYDENDKLIREVKVITLKSKLVSDFRKDFQFYKVREINNYHHAHDAYLNAVVGTALIKKYPKLESEFVYGDYKVYDVRKMIAKSEQEIGKATAKYFFYSNIMNFFKTEITLANGEIRKRPLIETNGETGEIVWDKGRDFATVRKVLSMPQVNIVKKTEVQTGGFSKESILPKRNSDKLIARKKDWDPKKYGGFDSPTVAYSVLVVAKVEKGKSKKLKSVKELLGITIMERSSFEKNPIDFLEAKGYKEVKKDLIIKLPKYSLFELENGRKRMLASAGELQKGNELALPSKYVNFLYLASHYEKLKGSPEDNEQKQLFVEQHKHYLDEIIEQISEFSKRVILADANLDKVLSAYNKHRDKPIREQAENIIHLFTLTNLGAPAAFKYFDTTIDRKRYTSTKEVLDATLIHQSITGLYETRIDLSQLGGDGGGSSPAPGGIPWLMKKPLQLTTLVPLQEYEERLLKQTMLTGSYKEKLQSLFLKYDALWQHWENQVGHRRIKPHHIATGTVNPRPQKQYPINPKAKASIQTVINDLLKQGVLIQQNSIMNTPVYPVPKPDGKWRMVLDYREVNKTIPLIAAQNQHSAGILSSIFRGKYKTTLDLSNGFWAHSITPESYWLTAFTWLGQQYCWTRLPQGFLNSPALFNADVVDLLKEVPNVQVYVDDIYISHDDPREHLEQLEKVFSLLLNAGYVVSLKKSEIAQHEVEFLGFNITKEGRGLTETFKQKLLNITPPRDLKQLQSILGLLNFARNFIPNFSELVKPLYNIIATAPGKYITWTTDNSQQLQNIISMLNSAENLEERNPEVRLIMKVNTSPSAGYIRFYNEFAKRPIMYLNYVYTKAEVKFTNTEKLLTTIHKGLIKALDLGMGQEILVYSPIVSMTKIQKTPLPERKALPIRWITWMSYLEDPRIQFHYDKTLPELQQVPTVTDDIIAKIKHPSEFSMVFYTDGSAIKHPNVNKSHNAGMGIAQVQFKPEFTVINTWSIPLGDHTAQLAEVAAVEFACKKALKIDGPVLIVTDSFYVAESVNKELPYWQSNGFFNNKKKPLKHVSKWKSIADCIQLKPDIIIIHEKGHQPTASTFHTEGNNLADKLATQGSYVVNAGKRTADGSEFEKRTADGSEFESPKKKAKVE

SEQ ID NO: 6754 - protein, 2091 aa, synthetic construct
MPAAKRVKLDGGDKKYSIGLDIGTNSVGWAVITDEYKVPSKKFKVLGNTDRHSIKKNLIGALLFDSGETAEATRLKRTARRRYTRRKNRICYLQEIFSNEMAKVDDSFFHRLEESFLVEEDKKHERHPIFGNIVDEVAYHEKYPTIYHLRKKLVDSTDKADLRLIYLALAHMIKFRGHFLIEGDLNPDNSDVDKLFIQLVQTYNQLFEENPINASGVDAKAILSARLSKSRRLENLIAQLPGEKKNGLFGNLIALSLGLTPNFKSNFDLAEDAKLQLSKDTYDDDLDNLLAQIGDQYADLFLAAKNLSDAILLSDILRVNTEITKAPLSASMIKRYDEHHQDLTLLKALVRQQLPEKYKEIFFDQSKNGYAGYIDGGASQEEFYKFIKPILEKMDGTEELLVKLNREDLLRKQRTFDNGSIPHQIHLGELHAILRRQEDFYPFLKDNREKIEKILTFRIPYYVGPLARGNSRFAWMTRKSEETITPWNFEEVVDKGASAQSFIERMTNFDKNLPNEKVLPKHSLLYEYFTVYNELTKVKYVTEGMRKPAFLSGEQKKAIVDLLFKTNRKVTVKQLKEDYFKKIECFDSVEISGVEDRFNASLGTYHDLLKIIKDKDFLDNEENEDILEDIVLTLTLFEDREMIEERLKTYAHLFDDKVMKQLKRRRYTGWGRLSRKLINGIRDKQSGKTILDFLKSDGFANRNFMQLIHDDSLTFKEDIQKAQVSGQGDSLHEHIANLAGSPAIKKGILQTVKVVDELVKVMGRHKPENIVIEMARENQTTQKGQKNSRERMKRIEEGIKELGSQILKEHPVENTQLQNEKLYLYYLQNGRDMYVDQELDINRLSDYDVDHIVPQSFLKDDSIDNKVLTRSDKARGKSDNVPSEEVVKKMKNYWRQLLNAKLITQRKFDNLTKAERGGLSELDKAGFIKRQLVETRQITKHVAQILDSRMNTKYDENDKLIREVKVITLKSKLVSDFRKDFQFYKVREINNYHHAHDAYLNAVVGTALIKKYPKLESEFVYGDYKVYDVRKMIAKSEQEIGKATAKYFFYSNIMNFFKTEITLANGEIRKRPLIETNGETGEIVWDKGRDFATVRKVLSMPQVNIVKKTEVQTGGFSKESILPKRNSDKLIARKKDWDPKKYGGFDSPTVAYSVLVVAKVEKGKSKKLKSVKELLGITIMERSSFEKNPIDFLEAKGYKEVKKDLIIKLPKYSLFELENGRKRMLASAGELQKGNELALPSKYVNFLYLASHYEKLKGSPEDNEQKQLFVEQHKHYLDEIIEQISEFSKRVILADANLDKVLSAYNKHRDKPIREQAENIIHLFTLTNLGAPAAFKYFDTTIDRKRYTSTKEVLDATLIHQSITGLYETRIDLSQLGGDGGGSSPAPGGTLNIEDEYRLHETSKEPDVPLGSTWLSDFPQAWAETGGMGLAVRQAPLIIPLKATSTPVSIKQYPMSQEARLGIKPHIQRLLDQGILVPCQSPWNTPLLPVKKPGTNDYRPVQDLREVNKRVEDIHPTVPNPYNLLSGLPPSHQWYTVLDLKDAFFCLRLHPTSQPLFAFEWRDPEMGISGQLTWTRLPQGFKNSPTLFNEALHRDLADFRIQHPDLILLQYVDDLLLAATSEQDCQRGTRALLQTLGNLGYRASAKKAQICQKQVKYLGYLLKEGQRWLTEARKETVMGQPTPKTPRQLREFLGTAGFCRLWIPGFAEMAAPLYPLTKPGTLFNWGPDQQKAYQEIKQALLTAPALGLPDLTKPFELFVDEKQGYAKGVLTQKLGPWRRPVAYLSKKLDPVAAGWPPCLRMVAAIAVLTKDAGKLTMGQPLVILAPHAVEALVKQPPDRWLSNARMTHYQAMLLDTDRVQFGPVVALNPATLLPLPEKEAPHDCLEILAETHGTRPDLTDQPIPDADYTWYTDGSSFLQEGQRRAGAAVTTETEVIWARALPAGTSAQRAELIALTQALKMAEGKKLNVYTDSRYAFATAHVHGEIYRRRGWLTSEGREIKNKNEILALLKALFLPKRLSIIHCPGHQKGNSAEARGNRMADQAAREAAMKAVLETSTLLAGKRTADGSEFEKRTADGSEFESPKKKAKVE

SEQ ID NO: 6755 - protein, 2093 aa, synthetic construct
MPAAKRVKLDGGDKKYSIGLDIGTNSVGWAVITDEYKVPSKKFKVLGNTDRHSIKKNLIGALLFDSGETAEATRLKRTARRRYTRRKNRICYLQEIFSNEMAKVDDSFFHRLEESFLVEEDKKHERHPIFGNIVDEVAYHEKYPTIYHLRKKLVDSTDKADLRLIYLALAHMIKFRGHFLIEGDLNPDNSDVDKLFIQLVQTYNQLFEENPINASGVDAKAILSARLSKSRRLENLIAQLPGEKKNGLFGNLIALSLGLTPNFKSNFDLAEDAKLQLSKDTYDDDLDNLLAQIGDQYADLFLAAKNLSDAILLSDILRVNTEITKAPLSASMIKRYDEHHQDLTLLKALVRQQLPEKYKEIFFDQSKNGYAGYIDGGASQEEFYKFIKPILEKMDGTEELLVKLNREDLLRKQRTFDNGSIPHQIHLGELHAILRRQEDFYPFLKDNREKIEKILTFRIPYYVGPLARGNSRFAWMTRKSEETITPWNFEEVVDKGASAQSFIERMTNFDKNLPNEKVLPKHSLLYEYFTVYNELTKVKYVTEGMRKPAFLSGEQKKAIVDLLFKTNRKVTVKQLKEDYFKKIECFDSVEISGVEDRFNASLGTYHDLLKIIKDKDFLDNEENEDILEDIVLTLTLFEDREMIEERLKTYAHLFDDKVMKQLKRRRYTGWGRLSRKLINGIRDKQSGKTILDFLKSDGFANRNFMQLIHDDSLTFKEDIQKAQVSGQGDSLHEHIANLAGSPAIKKGILQTVKVVDELVKVMGRHKPENIVIEMARENQTTQKGQKNSRERMKRIEEGIKELGSQILKEHPVENTQLQNEKLYLYYLQNGRDMYVDQELDINRLSDYDVDHIVPQSFLKDDSIDNKVLTRSDKARGKSDNVPSEEVVKKMKNYWRQLLNAKLITQRKFDNLTKAERGGLSELDKAGFIKRQLVETRQITKHVAQILDSRMNTKYDENDKLIREVKVITLKSKLVSDFRKDFQFYKVREINNYHHAHDAYLNAVVGTALIKKYPKLESEFVYGDYKVYDVRKMIAKSEQEIGKATAKYFFYSNIMNFFKTEITLANGEIRKRPLIETNGETGEIVWDKGRDFATVRKVLSMPQVNIVKKTEVQTGGFSKESILPKRNSDKLIARKKDWDPKKYGGFDSPTVAYSVLVVAKVEKGKSKKLKSVKELLGITIMERSSFEKNPIDFLEAKGYKEVKKDLIIKLPKYSLFELENGRKRMLASAGELQKGNELALPSKYVNFLYLASHYEKLKGSPEDNEQKQLFVEQHKHYLDEIIEQISEFSKRVILADANLDKVLSAYNKHRDKPIREQAENIIHLFTLTNLGAPAAFKYFDTTIDRKRYTSTKEVLDATLIHQSITGLYETRIDLSQLGGDGGPAPGSSGGTAPLEEEYRLFLEAPIQNVTLLEQWKREIPKVWAEINPPGLASTQAPIHVQLLSTALPVRVRQYPITLEAKRSLRETIRKFRAAGILRPVHSPWNTPLLPVRKSGTSEYRMVQDLREVNKRVETIHPTVPNPYTLLSLLPPDRIWYSVLDLKDAFFCIPLAPESQLIFAFEWADAEEGESGQLTWTRLPQGFKNSPTLFNEALNRDLQGFRLDHPSVSLLQYVDDLLIAADTQAACLSATRDLLMTLAELGYRVSGKKAQLCQEEVTYLGFKIHKGSRSLSNSRTQAILQIPVPKTKRQVREFLGTIGYCRLWIPGFAELAQPLYAATRPGNDPLVWGEKEEEAFQSLKLALTQPPALALPSLDKPFQLFVEETSGAAKGVLTQALGPWKRPVAYLSKRLDPVAAGWPRCLRAIAAAALLTREASKLTFGQDIEITSSHNLESLLRSPPDKWLTNARITQYQVLLLDPPRVRFKQTAALNPATLLPETDDTLPIHHCLDTLDSLTSTRPDLTDQPLAQAEATLFTDGSSYIRDGKRYAGAAVVTLDSVIWAEPLPIGTSAQKAELIALTKALEWSKDKSVNIYTDSRYAFATLHVHGMIYRERGWLTAGGKAIKNAPEILALLTAVWLPKRVAVMHCKGHQKDDAPTSTGNRRADEVAREVAIRPLSTQATISAGKRTADGSEFEKRTADGSEFESPKKKAKVE

SEQ ID NO: 6756 - protein, 2093 aa, synthetic construct
MPAAKRVKLDGGDKKYSIGLDIGTNSVGWAVITDEYKVPSKKFKVLGNTDRHSIKKNLIGALLFDSGETAEATRLKRTARRRYTRRKNRICYLQEIFSNEMAKVDDSFFHRLEESFLVEEDKKHERHPIFGNIVDEVAYHEKYPTIYHLRKKLVDSTDKADLRLIYLALAHMIKFRGHFLIEGDLNPDNSDVDKLFIQLVQTYNQLFEENPINASGVDAKAILSARLSKSRRLENLIAQLPGEKKNGLFGNLIALSLGLTPNFKSNFDLAEDAKLQLSKDTYDDDLDNLLAQIGDQYADLFLAAKNLSDAILLSDILRVNTEITKAPLSASMIKRYDEHHQDLTLLKALVRQQLPEKYKEIFFDQSKNGYAGYIDGGASQEEFYKFIKPILEKMDGTEELLVKLNREDLLRKQRTFDNGSIPHQIHLGELHAILRRQEDFYPFLKDNREKIEKILTFRIPYYVGPLARGNSRFAWMTRKSEETITPWNFEEVVDKGASAQSFIERMTNFDKNLPNEKVLPKHSLLYEYFTVYNELTKVKYVTEGMRKPAFLSGEQKKAIVDLLFKTNRKVTVKQLKEDYFKKIECFDSVEISGVEDRFNASLGTYHDLLKIIKDKDFLDNEENEDILEDIVLTLTLFEDREMIEERLKTYAHLFDDKVMKQLKRRRYTGWGRLSRKLINGIRDKQSGKTILDFLKSDGFANRNFMQLIHDDSLTFKEDIQKAQVSGQGDSLHEHIANLAGSPAIKKGILQTVKVVDELVKVMGRHKPENIVIEMARENQTTQKGQKNSRERMKRIEEGIKELGSQILKEHPVENTQLQNEKLYLYYLQNGRDMYVDQELDINRLSDYDVDHIVPQSFLKDDSIDNKVLTRSDKARGKSDNVPSEEVVKKMKNYWRQLLNAKLITQRKFDNLTKAERGGLSELDKAGFIKRQLVETRQITKHVAQILDSRMNTKYDENDKLIREVKVITLKSKLVSDFRKDFQFYKVREINNYHHAHDAYLNAVVGTALIKKYPKLESEFVYGDYKVYDVRKMIAKSEQEIGKATAKYFFYSNIMNFFKTEITLANGEIRKRPLIETNGETGEIVWDKGRDFATVRKVLSMPQVNIVKKTEVQTGGFSKESILPKRNSDKLIARKKDWDPKKYGGFDSPTVAYSVLVVAKVEKGKSKKLKSVKELLGITIMERSSFEKNPIDFLEAKGYKEVKKDLIIKLPKYSLFELENGRKRMLASAGELQKGNELALPSKYVNFLYLASHYEKLKGSPEDNEQKQLFVEQHKHYLDEIIEQISEFSKRVILADANLDKVLSAYNKHRDKPIREQAENIIHLFTLTNLGAPAAFKYFDTTIDRKRYTSTKEVLDATLIHQSITGLYETRIDLSQLGGDGGPAPGSSGGTAPLEEEYRLFLEAPIQNVTLLEQWKREIPKVWAEINPPGLASTQAPIHVQLLSTALPVRVRQYPITLEAKRSLRETIRKFRAAGILRPVHSPWNTPLLPVRKSGTSEYRMVQDLREVNKRVETIHPTVPNPYTLLSLLPPDRIWYSVLDLKDAFFCIPLAPESQLIFAFEWADAEEGESGQLTWTRLPQGFKNSPTLFNEALNRDLQGFRLDHPSVSLLQYVDDLLIAADTQAACLSATRDLLMTLAELGYRVSGKKAQLCQEEVTYLGFKIHKGSRSLSNSRTQAILQIPVPKTKRQVREFLGKIGYCRLFIPGFAELAQPLYAATRPGNDPLVWGEKEEEAFQSLKLALTQPPALALPSLDKPFQLFVEETSGAAKGVLTQALGPWKRPVAYLSKRLDPVAAGWPRCLRAIAAAALLTREASKLTFGQDIEITSSHNLESLLRSPPDKWLTNARITQYQVLLLDPPRVRFKQTAALNPATLLPETDDTLPIHHCLDTLDSLTSTRPDLTDQPLAQAEATLFTDGSSYIRDGKRYAGAAVVTLDSVIWAEPLPIGTSAQKAELIALTKALEWSKDKSVNIYTDSRYAFATLHVHGMIYRERGWLTAGGKAIKNAPEILALLTAVWLPKRVAVMHCKGHQKDDAPTSTGNRRADEVAREVAIRPLSTQATISAGKRTADGSEFEKRTADGSEFESPKKKAKVE

SEQ ID NO: 6757 - protein, 2090 aa, synthetic construct
MPAAKRVKLDGGDKKYSIGLDIGTNSVGWAVITDEYKVPSKKFKVLGNTDRHSIKKNLIGALLFDSGETAEATRLKRTARRRYTRRKNRICYLQEIFSNEMAKVDDSFFHRLEESFLVEEDKKHERHPIFGNIVDEVAYHEKYPTIYHLRKKLVDSTDKADLRLIYLALAHMIKFRGHFLIEGDLNPDNSDVDKLFIQLVQTYNQLFEENPINASGVDAKAILSARLSKSRRLENLIAQLPGEKKNGLFGNLIALSLGLTPNFKSNFDLAEDAKLQLSKDTYDDDLDNLLAQIGDQYADLFLAAKNLSDAILLSDILRVNTEITKAPLSASMIKRYDEHHQDLTLLKALVRQQLPEKYKEIFFDQSKNGYAGYIDGGASQEEFYKFIKPILEKMDGTEELLVKLNREDLLRKQRTFDNGSIPHQIHLGELHAILRRQEDFYPFLKDNREKIEKILTFRIPYYVGPLARGNSRFAWMTRKSEETITPWNFEEVVDKGASAQSFIERMTNFDKNLPNEKVLPKHSLLYEYFTVYNELTKVKYVTEGMRKPAFLSGEQKKAIVDLLFKTNRKVTVKQLKEDYFKKIECFDSVEISGVEDRFNASLGTYHDLLKIIKDKDFLDNEENEDILEDIVLTLTLFEDREMIEERLKTYAHLFDDKVMKQLKRRRYTGWGRLSRKLINGIRDKQSGKTILDFLKSDGFANRNFMQLIHDDSLTFKEDIQKAQVSGQGDSLHEHIANLAGSPAIKKGILQTVKVVDELVKVMGRHKPENIVIEMARENQTTQKGQKNSRERMKRIEEGIKELGSQILKEHPVENTQLQNEKLYLYYLQNGRDMYVDQELDINRLSDYDVDHIVPQSFLKDDSIDNKVLTRSDKARGKSDNVPSEEVVKKMKNYWRQLLNAKLITQRKFDNLTKAERGGLSELDKAGFIKRQLVETRQITKHVAQILDSRMNTKYDENDKLIREVKVITLKSKLVSDFRKDFQFYKVREINNYHHAHDAYLNAVVGTALIKKYPKLESEFVYGDYKVYDVRKMIAKSEQEIGKATAKYFFYSNIMNFFKTEITLANGEIRKRPLIETNGETGEIVWDKGRDFATVRKVLSMPQVNIVKKTEVQTGGFSKESILPKRNSDKLIARKKDWDPKKYGGFDSPTVAYSVLVVAKVEKGKSKKLKSVKELLGITIMERSSFEKNPIDFLEAKGYKEVKKDLIIKLPKYSLFELENGRKRMLASAGELQKGNELALPSKYVNFLYLASHYEKLKGSPEDNEQKQLFVEQHKHYLDEIIEQISEFSKRVILADANLDKVLSAYNKHRDKPIREQAENIIHLFTLTNLGAPAAFKYFDTTIDRKRYTSTKEVLDATLIHQSITGLYETRIDLSQLGGDGGPAPGSSGGTLQLEEEYRLFEPESTQKQEMDIWLKNFPQAWAETGGMGTAHCQAPVLIQLKATATPISIRQYPMPHEAYQGIKPHIRRMLDQGILKPCQSPWNTPLLPVKKPGTEDYRPVQDLREVNKRVEDIHPTVPNPYNLLSTLPPSHPWYTVLDLKDAFFCLRLHSESQLLFAFEWRDPEIGLSGQLTWTRLPQGFKNSPTLFNEALHSDLADFRVRYPALVLLQYVDDLLLAAATRTECLEGTKALLETLGNKGYRASAKKAQICLQEVTYLGYSLKDGQRWLTKARKEAILSIPVPKNSRQVREFLGTAGYCRLWIPGFAELAAPLYPLTRPGTLFQWGTEQQLAFEDIKKALLSSPALGLPDITKPFELFIDENSGFAKGVLVQKLGPWKRPVAYLSKKLDTVASGWPPCLRMVAAIAILVKDAGKLTLGQPLTILTSHPVEALVRQPPNKWLSNARMTHYQAMLLDAERVHFGPTVSLNPATLLPLPSGGNHHDCLQILAETHGTRPDLTDQPLPDADLTWYTDGSSFIRNGEREAGAAVTTESEVIWAAPLPPGTSAQRAELIALTQALKMAEGKKLTVYTDSRYAFATTHVHGEIYRRRGWLTSEGKEIKNKNEILALLEALFLPKRLSIIHCPGHQKGDSPQAKGNRLADDTAKKAATETHSSLTVLPAGKRTADGSEFEKRTADGSEFESPKKKAKVE

SEQ ID NO: 6758 - protein, 2213 aa, synthetic construct
MPAAKRVKLDGGDKKYSIGLDIGTNSVGWAVITDEYKVPSKKFKVLGNTDRHSIKKNLIGALLFDSGETAEATRLKRTARRRYTRRKNRICYLQEIFSNEMAKVDDSFFHRLEESFLVEEDKKHERHPIFGNIVDEVAYHEKYPTIYHLRKKLVDSTDKADLRLIYLALAHMIKFRGHFLIEGDLNPDNSDVDKLFIQLVQTYNQLFEENPINASGVDAKAILSARLSKSRRLENLIAQLPGEKKNGLFGNLIALSLGLTPNFKSNFDLAEDAKLQLSKDTYDDDLDNLLAQIGDQYADLFLAAKNLSDAILLSDILRVNTEITKAPLSASMIKRYDEHHQDLTLLKALVRQQLPEKYKEIFFDQSKNGYAGYIDGGASQEEFYKFIKPILEKMDGTEELLVKLNREDLLRKQRTFDNGSIPHQIHLGELHAILRRQEDFYPFLKDNREKIEKILTFRIPYYVGPLARGNSRFAWMTRKSEETITPWNFEEVVDKGASAQSFIERMTNFDKNLPNEKVLPKHSLLYEYFTVYNELTKVKYVTEGMRKPAFLSGEQKKAIVDLLFKTNRKVTVKQLKEDYFKKIECFDSVEISGVEDRFNASLGTYHDLLKIIKDKDFLDNEENEDILEDIVLTLTLFEDREMIEERLKTYAHLFDDKVMKQLKRRRYTGWGRLSRKLINGIRDKQSGKTILDFLKSDGFANRNFMQLIHDDSLTFKEDIQKAQVSGQGDSLHEHIANLAGSPAIKKGILQTVKVVDELVKVMGRHKPENIVIEMARENQTTQKGQKNSRERMKRIEEGIKELGSQILKEHPVENTQLQNEKLYLYYLQNGRDMYVDQELDINRLSDYDVDHIVPQSFLKDDSIDNKVLTRSDKARGKSDNVPSEEVVKKMKNYWRQLLNAKLITQRKFDNLTKAERGGLSELDKAGFIKRQLVETRQITKHVAQILDSRMNTKYDENDKLIREVKVITLKSKLVSDFRKDFQFYKVREINNYHHAHDAYLNAVVGTALIKKYPKLESEFVYGDYKVYDVRKMIAKSEQEIGKATAKYFFYSNIMNFFKTEITLANGEIRKRPLIETNGETGEIVWDKGRDFATVRKVLSMPQVNIVKKTEVQTGGFSKESILPKRNSDKLIARKKDWDPKKYGGFDSPTVAYSVLVVAKVEKGKSKKLKSVKELLGITIMERSSFEKNPIDFLEAKGYKEVKKDLIIKLPKYSLFELENGRKRMLASAGELQKGNELALPSKYVNFLYLASHYEKLKGSPEDNEQKQLFVEQHKHYLDEIIEQISEFSKRVILADANLDKVLSAYNKHRDKPIREQAENIIHLFTLTNLGAPAAFKYFDTTIDRKRYTSTKEVLDATLIHQSITGLYETRIDLSQLGGDGGPAPGSSGGTLGDQGSRGSDPLPEPRVTLTVEGIPTEFLVNTGAEHSVLTKPMGKMGSKRTVVAGATGSKVYPWTTKRLLKIGQKQVTHSFLVIPECPAPLLGRDLLTKLKAQIQFSTEGPQVTWEDRPAMCLVLNLEEEYRLHEKPVPPSIDPSWLQLFPMVWAEKAGMGLANQVPPVVVELKSDASPVAVRQYPMSKEAREGIRPHIQRFLDLGILVPCQSPWNTPLLPVKKPGTNDYRPVQDLREVNKRVQDIHPTVPNPYNLLSSLPPSHTWYSVLDLKDAFFCLKLHPNSQPLFAFEWRDPEKGNTGQLTWTRLPQGFKNSPTLFNEALHRDLASFRALNPQVVMLQYVDDLLVAAPTYRDCKEGTRRLLQELSKLGYRVSAKKAQLCREEVTYLGYLLKGGKRWLTPARKATVMKIPTPTTPRQVREFLGTAGFCRLWIPGFASLAAPLYPLTRPKVPFTWTEAHQEAFGRIKEALLSAPALALPDLTKPFALYVDEKEGVARGVLTQTLGPWRRPVAYLSKKLDPVASGWPTCLKAIAAVALLLKDADKLTLGQNVLVIAPHNLESIVRQPPDRWMTNARMTHYQSLLLNERVSFAPPAILNPATLLPVESDDTPIHICSEILAEETGTRPDLRDQPLPGVPAWYTDGSSFIMDGRRQAGAAIVDNKRTVWASNLPEGTSAQKAELIALTQALRLAEGKSINIYTDSRYAFATAHVHGAIYKQRGWLTSAGKDIKNKEEILALLEAIHLPKRVAIIHCPGHQRGTDPVATGNRKADEAAKQAAQSTRILTETTKNAGKRTADGSEFEKRTADGSEFESPKKKAKVE

SEQ ID NO: 6759 - protein, 2091 aa, synthetic construct
MPAAKRVKLDGGDKKYSIGLDIGTNSVGWAVITDEYKVPSKKFKVLGNTDRHSIKKNLIGALLFDSGETAEATRLKRTARRRYTRRKNRICYLQEIFSNEMAKVDDSFFHRLEESFLVEEDKKHERHPIFGNIVDEVAYHEKYPTIYHLRKKLVDSTDKADLRLIYLALAHMIKFRGHFLIEGDLNPDNSDVDKLFIQLVQTYNQLFEENPINASGVDAKAILSARLSKSRRLENLIAQLPGEKKNGLFGNLIALSLGLTPNFKSNFDLAEDAKLQLSKDTYDDDLDNLLAQIGDQYADLFLAAKNLSDAILLSDILRVNTEITKAPLSASMIKRYDEHHQDLTLLKALVRQQLPEKYKEIFFDQSKNGYAGYIDGGASQEEFYKFIKPILEKMDGTEELLVKLNREDLLRKQRTFDNGSIPHQIHLGELHAILRRQEDFYPFLKDNREKIEKILTFRIPYYVGPLARGNSRFAWMTRKSEETITPWNFEEVVDKGASAQSFIERMTNFDKNLPNEKVLPKHSLLYEYFTVYNELTKVKYVTEGMRKPAFLSGEQKKAIVDLLFKTNRKVTVKQLKEDYFKKIECFDSVEISGVEDRFNASLGTYHDLLKIIKDKDFLDNEENEDILEDIVLTLTLFEDREMIEERLKTYAHLFDDKVMKQLKRRRYTGWGRLSRKLINGIRDKQSGKTILDFLKSDGFANRNFMQLIHDDSLTFKEDIQKAQVSGQGDSLHEHIANLAGSPAIKKGILQTVKVVDELVKVMGRHKPENIVIEMARENQTTQKGQKNSRERMKRIEEGIKELGSQILKEHPVENTQLQNEKLYLYYLQNGRDMYVDQELDINRLSDYDVDHIVPQSFLKDDSIDNKVLTRSDKARGKSDNVPSEEVVKKMKNYWRQLLNAKLITQRKFDNLTKAERGGLSELDKAGFIKRQLVETRQITKHVAQILDSRMNTKYDENDKLIREVKVITLKSKLVSDFRKDFQFYKVREINNYHHAHDAYLNAVVGTALIKKYPKLESEFVYGDYKVYDVRKMIAKSEQEIGKATAKYFFYSNIMNFFKTEITLANGEIRKRPLIETNGETGEIVWDKGRDFATVRKVLSMPQVNIVKKTEVQTGGFSKESILPKRNSDKLIARKKDWDPKKYGGFDSPTVAYSVLVVAKVEKGKSKKLKSVKELLGITIMERSSFEKNPIDFLEAKGYKEVKKDLIIKLPKYSLFELENGRKRMLASAGELQKGNELALPSKYVNFLYLASHYEKLKGSPEDNEQKQLFVEQHKHYLDEIIEQISEFSKRVILADANLDKVLSAYNKHRDKPIREQAENIIHLFTLTNLGAPAAFKYFDTTIDRKRYTSTKEVLDATLIHQSITGLYETRIDLSQLGGDGGPAPGSSGGTLNLEDEYRLYETSAEPEVSPGSTWLSDFPQAWAETGGMGLAVRQAPLIIPLKATSTPVSIKQYPMSQEAKLGIKPHIQRLLDQGILVPCQSPWNTPLLPVKKPGTNDYRPVQDLREVNKRVEDIHPTVPNPYNLLSGLPPSHRWYTVLDLKDAFFCLRLHPTSQPLFAFEWRDPGMGISGQLTWTRLPQGFKNSPTLFNEALHRDLADFRIQHPDLILLQYVDDILLAATSELDCQQGTRALLLTLGNLGYRASAKKAQLCQKQVKYLGYLLKEGQRWLTEARKETVMGQPTPKTPRQLREFLGTAGFCRLWIPGFAEMAAPLYPLTKPGTLFNWGPDQQKAYQEIKQALLTAPALGLPDLTKPFELFVDEKQGYAKGVLTQKLGPWRRPVAYLSKKLDPVAAGWPPCLRMVAAIAVLRKDAGKLTMGQPLVILAPHAVEALVKQPPDRWLSNARMTHYQAMLLDTDRVQFGPVVALNPATLLPLPEEGAPHDCLEILAETHGTRPDLTDQPIPDADHTWYTDGSSFLQEGQRKAGAAVTTETEVIWARALPAGTSAQRAELIALTQALKMAEGKRLNVYTDSRYAFATAHIHGEIYRRRGWLTSEGREIKNKSEILALLKALFLPKRLSIIHCLGHQKGDSAEARGNRLADQAAREAAIKTPPDTSTLLAGKRTADGSEFEKRTADGSEFESPKKKAKVE

SEQ ID NO: 6760 - protein, 2091 aa, synthetic construct; identical to SEQ ID NO: 4513

SEQ ID NO: 6761 - protein, 2091 aa, synthetic construct; identical to SEQ ID NO: 4513

SEQ ID NO: 6762 - protein, 2082 aa, synthetic construct
MPAAKRVKLDGGDKKYSIGLDIGTNSVGWAVITDEYKVPSKKFKVLGNTDRHSIKKNLIGALLFDSGETAEATRLKRTARRRYTRRKNRICYLQEIFSNEMAKVDDSFFHRLEESFLVEEDKKHERHPIFGNIVDEVAYHEKYPTIYHLRKKLVDSTDKADLRLIYLALAHMIKFRGHFLIEGDLNPDNSDVDKLFIQLVQTYNQLFEENPINASGVDAKAILSARLSKSRRLENLIAQLPGEKKNGLFGNLIALSLGLTPNFKSNFDLAEDAKLQLSKDTYDDDLDNLLAQIGDQYADLFLAAKNLSDAILLSDILRVNTEITKAPLSASMIKRYDEHHQDLTLLKALVRQQLPEKYKEIFFDQSKNGYAGYIDGGASQEEFYKFIKPILEKMDGTEELLVKLNREDLLRKQRTFDNGSIPHQIHLGELHAILRRQEDFYPFLKDNREKIEKILTFRIPYYVGPLARGNSRFAWMTRKSEETITPWNFEEVVDKGASAQSFIERMTNFDKNLPNEKVLPKHSLLYEYFTVYNELTKVKYVTEGMRKPAFLSGEQKKAIVDLLFKTNRKVTVKQLKEDYFKKIECFDSVEISGVEDRFNASLGTYHDLLKIIKDKDFLDNEENEDILEDIVLTLTLFEDREMIEERLKTYAHLFDDKVMKQLKRRRYTGWGRLSRKLINGIRDKQSGKTILDFLKSDGFANRNFMQLIHDDSLTFKEDIQKAQVSGQGDSLHEHIANLAGSPAIKKGILQTVKVVDELVKVMGRHKPENIVIEMARENQTTQKGQKNSRERMKRIEEGIKELGSQILKEHPVENTQLQNEKLYLYYLQNGRDMYVDQELDINRLSDYDVDHIVPQSFLKDDSIDNKVLTRSDKARGKSDNVPSEEVVKKMKNYWRQLLNAKLITQRKFDNLTKAERGGLSELDKAGFIKRQLVETRQITKHVAQILDSRMNTKYDENDKLIREVKVITLKSKLVSDFRKDFQFYKVREINNYHHAHDAYLNAVVGTALIKKYPKLESEFVYGDYKVYDVRKMIAKSEQEIGKATAKYFFYSNIMNFFKTEITLANGEIRKRPLIETNGETGEIVWDKGRDFATVRKVLSMPQVNIVKKTEVQTGGFSKESILPKRNSDKLIARKKDWDPKKYGGFDSPTVAYSVLVVAKVEKGKSKKLKSVKELLGITIMERSSFEKNPIDFLEAKGYKEVKKDLIIKLPKYSLFELENGRKRMLASAGELQKGNELALPSKYVNFLYLASHYEKLKGSPEDNEQKQLFVEQHKHYLDEIIEQISEFSKRVILADANLDKVLSAYNKHRDKPIREQAENIIHLFTLTNLGAPAAFKYFDTTIDRKRYTSTKEVLDATLIHQSITGLYETRIDLSQLGGDGGPAPGSSGGIPWLMKKPLQLTTLVPLQEYEERLLKQTMLTGSYKEKLQSLFLKYDALWQHWENQVGHRRIKPHHIATGTVNPRPQKQYPINPKAKASIQTVINDLLKQGVLIQQNSIMNTPVYPVPKPDGKWRMVLDYREVNKTIPLIAAQNQHSAGILSSIFRGKYKTTLDLSNGFWAHSITPESYWLTAFTWLGQQYCWTRLPQGFLNSPALFNADVVDLLKEVPNVQVYVDDIYISHDDPREHLEQLEKVFSLLLNAGYVVSLKKSEIAQHEVEFLGFNITKEGRGLTETFKQKLLNITPPRDLKQLQSILGKLNFARNFIPNFSELVKPLYNIIATAPGKYITWTTDNSQQLQNIISMLNSAENLEERNPEVRLIMKVNTSPSAGYIRFYNEFAKRPIMYLNYVYTKAEVKFTNTEKLLTTIHKGLIKALDLGMGQEILVYSPIVSMTKIQKTPLPERKALPIRWITWMSYLEDPRIQFHYDKTLPELQQVPTVTDDIIAKIKHPSEFSMVFYTDGSAIKHPNVNKSHNAGMGIAQVQFKPEFTVINTWSIPLGDHTAQLAEVAAVEFACKKALKIDGPVLIVTDSFYVAESVNKELPYWQSNGFFNNKKKPLKHVSKWKSIADCIQLKPDIIIIHEKGHQPTASTFHTEGNNLADKLATQGSYVVNAGKRTADGSEFEKRTADGSEFESPKKKAKVE

SEQ ID NO: 6763 - protein, 2012 aa, synthetic construct
MPAAKRVKLDGGDKKYSIGLDIGTNSVGWAVITDEYKVPSKKFKVLGNTDRHSIKKNLIGALLFDSGETAEATRLKRTARRRYTRRKNRICYLQEIFSNEMAKVDDSFFHRLEESFLVEEDKKHERHPIFGNIVDEVAYHEKYPTIYHLRKKLVDSTDKADLRLIYLALAHMIKFRGHFLIEGDLNPDNSDVDKLFIQLVQTYNQLFEENPINASGVDAKAILSARLSKSRRLENLIAQLPGEKKNGLFGNLIALSLGLTPNFKSNFDLAEDAKLQLSKDTYDDDLDNLLAQIGDQYADLFLAAKNLSDAILLSDILRVNTEITKAPLSASMIKRYDEHHQDLTLLKALVRQQLPEKYKEIFFDQSKNGYAGYIDGGASQEEFYKFIKPILEKMDGTEELLVKLNREDLLRKQRTFDNGSIPHQIHLGELHAILRRQEDFYPFLKDNREKIEKILTFRIPYYVGPLARGNSRFAWMTRKSEETITPWNFEEVVDKGASAQSFIERMTNFDKNLPNEKVLPKHSLLYEYFTVYNELTKVKYVTEGMRKPAFLSGEQKKAIVDLLFKTNRKVTVKQLKEDYFKKIECFDSVEISGVEDRFNASLGTYHDLLKIIKDKDFLDNEENEDILEDIVLTLTLFEDREMIEERLKTYAHLFDDKVMKQLKRRRYTGWGRLSRKLINGIRDKQSGKTILDFLKSDGFANRNFMQLIHDDSLTFKEDIQKAQVSGQGDSLHEHIANLAGSPAIKKGILQTVKVVDELVKVMGRHKPENIVIEMARENQTTQKGQKNSRERMKRIEEGIKELGSQILKEHPVENTQLQNEKLYLYYLQNGRDMYVDQELDINRLSDYDVDHIVPQSFLKDDSIDNKVLTRSDKARGKSDNVPSEEVVKKMKNYWRQLLNAKLITQRKFDNLTKAERGGLSELDKAGFIKRQLVETRQITKHVAQILDSRMNTKYDENDKLIREVKVITLKSKLVSDFRKDFQFYKVREINNYHHAHDAYLNAVVGTALIKKYPKLESEFVYGDYKVYDVRKMIAKSEQEIGKATAKYFFYSNIMNFFKTEITLANGEIRKRPLIETNGETGEIVWDKGRDFATVRKVLSMPQVNIVKKTEVQTGGFSKESILPKRNSDKLIARKKDWDPKKYGGFDSPTVAYSVLVVAKVEKGKSKKLKSVKELLGITIMERSSFEKNPIDFLEAKGYKEVKKDLIIKLPKYSLFELENGRKRMLASAGELQKGNELALPSKYVNFLYLASHYEKLKGSPEDNEQKQLFVEQHKHYLDEIIEQISEFSKRVILADANLDKVLSAYNKHRDKPIREQAENIIHLFTLTNLGAPAAFKYFDTTIDRKRYTSTKEVLDATLIHQSITGLYETRIDLSQLGGDGGPAPGSSGGPRSRAIDIPVPHADKISWKITDPVWVDQWPLTYEKTLAAIALVQEQLAAGHIEPTNSPWNTPIFIIKKKSGSWRLLQDLRAVNKVMVPMGALQPGLPSPVAIPLNYHKIVIDLKDCFFTIPLHPEDRPYFAFSVPQINFQSPMPRYQWKVLPQGMANSPTLCQKFVAAAIAPVRSQWPEAYILHYMDDILLACDSAEAAKACYAHIISCLTSYGLKIAPDKVQVSEPFSYLGFELHHQQVFTPRVCLKTDHLKTLNDFQKLLGDIQWLRPYLKLPTSALVPLNNILKPDPNPLSVRALTPEAKQSLALINKAIQNQSVQQISYNLPLVLLLLPTPHTPTAVFWQPNGTDPTKNGSPLLWLHLPASPSKVLLTYPSLLAMLIIKGRYTGRQLFGRDPHSIIIPYTQDQLTWLLQTSDEWAIALSSFTGDIDNHYPSDPVIQFAKLHQFIFPKITKCAPIPQATLVFTDGSSNGIAAYVIDNQPISIKSPYLSAQLVELYAILQVFTVLAHQPFNLYTDSAYIAQSVPLLETVPFIKSSTNATPLFSKLQQLILNRQHPFFIGHLRAHLNLPGPLAEGNALADAATQIFPIISDAGKRTADGSEFEKRTADGSEFESPKKKAKVE

SEQ ID NO: 6764 - protein, 2091 aa, synthetic construct
MPAAKRVKLDGGDKKYSIGLDIGTNSVGWAVITDEYKVPSKKFKVLGNTDRHSIKKNLIGALLFDSGETAEATRLKRTARRRYTRRKNRICYLQEIFSNEMAKVDDSFFHRLEESFLVEEDKKHERHPIFGNIVDEVAYHEKYPTIYHLRKKLVDSTDKADLRLIYLALAHMIKFRGHFLIEGDLNPDNSDVDKLFIQLVQTYNQLFEENPINASGVDAKAILSARLSKSRRLENLIAQLPGEKKNGLFGNLIALSLGLTPNFKSNFDLAEDAKLQLSKDTYDDDLDNLLAQIGDQYADLFLAAKNLSDAILLSDILRVNTEITKAPLSASMIKRYDEHHQDLTLLKALVRQQLPEKYKEIFFDQSKNGYAGYIDGGASQEEFYKFIKPILEKMDGTEELLVKLNREDLLRKQRTFDNGSIPHQIHLGELHAILRRQEDFYPFLKDNREKIEKILTFRIPYYVGPLARGNSRFAWMTRKSEETITPWNFEEVVDKGASAQSFIERMTNFDKNLPNEKVLPKHSLLYEYFTVYNELTKVKYVTEGMRKPAFLSGEQKKAIVDLLFKTNRKVTVKQLKEDYFKKIECFDSVEISGVEDRFNASLGTYHDLLKIIKDKDFLDNEENEDILEDIVLTLTLFEDREMIEERLKTYAHLFDDKVMKQLKRRRYTGWGRLSRKLINGIRDKQSGKTILDFLKSDGFANRNFMQLIHDDSLTFKEDIQKAQVSGQGDSLHEHIANLAGSPAIKKGILQTVKVVDELVKVMGRHKPENIVIEMARENQTTQKGQKNSRERMKRIEEGIKELGSQILKEHPVENTQLQNEKLYLYYLQNGRDMYVDQELDINRLSDYDVDHIVPQSFLKDDSIDNKVLTRSDKARGKSDNVPSEEVVKKMKNYWRQLLNAKLITQRKFDNLTKAERGGLSELDKAGFIKRQLVETRQITKHVAQILDSRMNTKYDENDKLIREVKVITLKSKLVSDFRKDFQFYKVREINNYHHAHDAYLNAVVGTALIKKYPKLESEFVYGDYKVYDVRKMIAKSEQEIGKATAKYFFYSNIMNFFKTEITLANGEIRKRPLIETNGETGEIVWDKGRDFATVRKVLSMPQVNIVKKTEVQTGGFSKESILPKRNSDKLIARKKDWDPKKYGGFDSPTVAYSVLVVAKVEKGKSKKLKSVKELLGITIMERSSFEKNPIDFLEAKGYKEVKKDLIIKLPKYSLFELENGRKRMLASAGELQKGNELALPSKYVNFLYLASHYEKLKGSPEDNEQKQLFVEQHKHYLDEIIEQISEFSKRVILADANLDKVLSAYNKHRDKPIREQAENIIHLFTLTNLGAPAAFKYFDTTIDRKRYTSTKEVLDATLIHQSITGLYETRIDLSQLGGDGGPAPGSSGGTLNIEDEYRLHETSKEPDVPLGSTWLSDFPQAWAETGGMGLAVRQAPLIIPLKATSTPVSIKQYPMSQEARLGIKPHIQRLLDQGILVPCQSPWNTPLLPVKKPGTNDYRPVQDLREVNKRVEDIHPTVPNPYNLLSGLPPSHQWYTVLDLKDAFFCLRLHPTSQPLFAFEWRDPEMGISGQLTWTRLPQGFKNSPTLFNEALHRDLADFRIQHPDLILLQYVDDLLLAATSEQDCQRGTRALLQTLGNLGYRASAKKAQICQKQVKYLGYLLKEGQRWLTEARKETVMGQPTPKTPRQLREFLGKAGFCRLFIPGFAEMAAPLYPLTKPGTLFNWGPDQQKAYQEIKQALLTAPALGLPDLTKPFELFVDEKQGYAKGVLTQKLGPWRRPVAYLSKKLDPVAAGWPPCLRMVAAIAVLTKDAGKLTMGQPLVILAPHAVEALVKQPPDRWLSNARMTHYQAMLLDTDRVQFGPVVALNPATLLPLPEKEAPHDCLEILAETHGTRPDLTDQPIPDADYTWYTDGSSFLQEGQRRAGAAVTTETEVIWARALPAGTSAQRAELIALTQALKMAEGKKLNVYTDSRYAFATAHVHGEIYRRRGWLTSEGREIKNKNEILALLKALFLPKRLSIIHCPGHQKGNSAEARGNRMADQAAREAAMKAVLETSTLLAGKRTADGSEFEKRTADGSEFESPKKKAKVE

SEQ ID NO: 6765 - protein, 2095 aa, synthetic construct
MPAAKRVKLDGGDKKYSIGLDIGTNSVGWAVITDEYKVPSKKFKVLGNTDRHSIKKNLIGALLFDSGETAEATRLKRTARRRYTRRKNRICYLQEIFSNEMAKVDDSFFHRLEESFLVEEDKKHERHPIFGNIVDEVAYHEKYPTIYHLRKKLVDSTDKADLRLIYLALAHMIKFRGHFLIEGDLNPDNSDVDKLFIQLVQTYNQLFEENPINASGVDAKAILSARLSKSRRLENLIAQLPGEKKNGLFGNLIALSLGLTPNFKSNFDLAEDAKLQLSKDTYDDDLDNLLAQIGDQYADLFLAAKNLSDAILLSDILRVNTEITKAPLSASMIKRYDEHHQDLTLLKALVRQQLPEKYKEIFFDQSKNGYAGYIDGGASQEEFYKFIKPILEKMDGTEELLVKLNREDLLRKQRTFDNGSIPHQIHLGELHAILRRQEDFYPFLKDNREKIEKILTFRIPYYVGPLARGNSRFAWMTRKSEETITPWNFEEVVDKGASAQSFIERMTNFDKNLPNEKVLPKHSLLYEYFTVYNELTKVKYVTEGMRKPAFLSGEQKKAIVDLLFKTNRKVTVKQLKEDYFKKIECFDSVEISGVEDRFNASLGTYHDLLKIIKDKDFLDNEENEDILEDIVLTLTLFEDREMIEERLKTYAHLFDDKVMKQLKRRRYTGWGRLSRKLINGIRDKQSGKTILDFLKSDGFANRNFMQLIHDDSLTFKEDIQKAQVSGQGDSLHEHIANLAGSPAIKKGILQTVKVVDELVKVMGRHKPENIVIEMARENQTTQKGQKNSRERMKRIEEGIKELGSQILKEHPVENTQLQNEKLYLYYLQNGRDMYVDQELDINRLSDYDVDHIVPQSFLKDDSIDNKVLTRSDKARGKSDNVPSEEVVKKMKNYWRQLLNAKLITQRKFDNLTKAERGGLSELDKAGFIKRQLVETRQITKHVAQILDSRMNTKYDENDKLIREVKVITLKSKLVSDFRKDFQFYKVREINNYHHAHDAYLNAVVGTALIKKYPKLESEFVYGDYKVYDVRKMIAKSEQEIGKATAKYFFYSNIMNFFKTEITLANGEIRKRPLIETNGETGEIVWDKGRDFATVRKVLSMPQVNIVKKTEVQTGGFSKESILPKRNSDKLIARKKDWDPKKYGGFDSPTVAYSVLVVAKVEKGKSKKLKSVKELLGITIMERSSFEKNPIDFLEAKGYKEVKKDLIIKLPKYSLFELENGRKRMLASAGELQKGNELALPSKYVNFLYLASHYEKLKGSPEDNEQKQLFVEQHKHYLDEIIEQISEFSKRVILADANLDKVLSAYNKHRDKPIREQAENIIHLFTLTNLGAPAAFKYFDTTIDRKRYTSTKEVLDATLIHQSITGLYETRIDLSQLGGDGGEAAAKPAPGGTAPLEEEYRLFLEAPIQNVTLLEQWKREIPKVWAEINPPGLASTQAPIHVQLLSTALPVRVRQYPITLEAKRSLRETIRKFRAAGILRPVHSPWNTPLLPVRKSGTSEYRMVQDLREVNKRVETIHPTVPNPYTLLSLLPPDRIWYSVLDLKDAFFCIPLAPESQLIFAFEWADAEEGESGQLTWTRLPQGFKNSPTLFNEALNRDLQGFRLDHPSVSLLQYVDDLLIAADTQAACLSATRDLLMTLAELGYRVSGKKAQLCQEEVTYLGFKIHKGSRSLSNSRTQAILQIPVPKTKRQVREFLGKIGYCRLFIPGFAELAQPLYAATRPGNDPLVWGEKEEEAFQSLKLALTQPPALALPSLDKPFQLFVEETSGAAKGVLTQALGPWKRPVAYLSKRLDPVAAGWPRCLRAIAAAALLTREASKLTFGQDIEITSSHNLESLLRSPPDKWLTNARITQYQVLLLDPPRVRFKQTAALNPATLLPETDDTLPIHHCLDTLDSLTSTRPDLTDQPLAQAEATLFTDGSSYIRDGKRYAGAAVVTLDSVIWAEPLPIGTSAQKAELIALTKALEWSKDKSVNIYTDSRYAFATLHVHGMIYRERGWLTAGGKAIKNAPEILALLTAVWLPKRVAVMHCKGHQKDDAPTSTGNRRADEVAREVAIRPLSTQATISAGKRTADGSEFEKRTADGSEFESPKKKAKVE

SEQ ID NO: 6766 - protein, 2084 aa, synthetic construct
MPAAKRVKLDGGDKKYSIGLDIGTNSVGWAVITDEYKVPSKKFKVLGNTDRHSIKKNLIGALLFDSGETAEATRLKRTARRRYTRRKNRICYLQEIFSNEMAKVDDSFFHRLEESFLVEEDKKHERHPIFGNIVDEVAYHEKYPTIYHLRKKLVDSTDKADLRLIYLALAHMIKFRGHFLIEGDLNPDNSDVDKLFIQLVQTYNQLFEENPINASGVDAKAILSARLSKSRRLENLIAQLPGEKKNGLFGNLIALSLGLTPNFKSNFDLAEDAKLQLSKDTYDDDLDNLLAQIGDQYADLFLAAKNLSDAILLSDILRVNTEITKAPLSASMIKRYDEHHQDLTLLKALVRQQLPEKYKEIFFDQSKNGYAGYIDGGASQEEFYKFIKPILEKMDGTEELLVKLNREDLLRKQRTFDNGSIPHQIHLGELHAILRRQEDFYPFLKDNREKIEKILTFRIPYYVGPLARGNSRFAWMTRKSEETITPWNFEEVVDKGASAQSFIERMTNFDKNLPNEKVLPKHSLLYEYFTVYNELTKVKYVTEGMRKPAFLSGEQKKAIVDLLFKTNRKVTVKQLKEDYFKKIECFDSVEISGVEDRFNASLGTYHDLLKIIKDKDFLDNEENEDILEDIVLTLTLFEDREMIEERLKTYAHLFDDKVMKQLKRRRYTGWGRLSRKLINGIRDKQSGKTILDFLKSDGFANRNFMQLIHDDSLTFKEDIQKAQVSGQGDSLHEHIANLAGSPAIKKGILQTVKVVDELVKVMGRHKPENIVIEMARENQTTQKGQKNSRERMKRIEEGIKELGSQILKEHPVENTQLQNEKLYLYYLQNGRDMYVDQELDINRLSDYDVDHIVPQSFLKDDSIDNKVLTRSDKARGKSDNVPSEEVVKKMKNYWRQLLNAKLITQRKFDNLTKAERGGLSELDKAGFIKRQLVETRQITKHVAQILDSRMNTKYDENDKLIREVKVITLKSKLVSDFRKDFQFYKVREINNYHHAHDAYLNAVVGTALIKKYPKLESEFVYGDYKVYDVRKMIAKSEQEIGKATAKYFFYSNIMNFFKTEITLANGEIRKRPLIETNGETGEIVWDKGRDFATVRKVLSMPQVNIVKKTEVQTGGFSKESILPKRNSDKLIARKKDWDPKKYGGFDSPTVAYSVLVVAKVEKGKSKKLKSVKELLGITIMERSSFEKNPIDFLEAKGYKEVKKDLIIKLPKYSLFELENGRKRMLASAGELQKGNELALPSKYVNFLYLASHYEKLKGSPEDNEQKQLFVEQHKHYLDEIIEQISEFSKRVILADANLDKVLSAYNKHRDKPIREQAENIIHLFTLTNLGAPAAFKYFDTTIDRKRYTSTKEVLDATLIHQSITGLYETRIDLSQLGGDGGEAAAKPAPGGVPWILKKPLELTIKLDLEEQQGTLLNNSILSKKGKEELKQLFEKYSALWQSWENQVGHRRIRPHKIATGTVKPTPQKQYHINPKAKPDIQIVINDLLKQGVLIQKESTMNTPVYPVPKPNGRWRMVLDYRAVNKVTPLIAVQNQHSYGILGSLFKGRYKTTIDLSNGFWAHPIVPEDYWITAFTWQGKQYCWTVLPQGFLNSPGLFNGDVVDLLQGIPNVEVYVDDVYISHDSEKEHLEYLDILFNRLKEAGYIISLKKSNIANSIVDFLGFQITNEGRGLTDTFKEKLENITAPTTLKQLQSILGLLNFARNFIPDFTELIAPLYALIPKSPKNYVPWQIEHSTTLETLITKLNGAEYLQGRKGDKTLIMKVNASYTTGYIRYYNEGEKKPISYVSIVFSKTELKFTELEKLLTTVHKGLLKALDLSMGQNIHVYSPIVSMQNIQKTPQTAKKALASRWLSWLSYLEDPRIRFFYDPQMPALKDLPAVDTGKDNKKHPSNFQHIFYTDGSAITSPTKEGHLNAGMGIVYFINKDGNLQKQQEWSISLGNHTAQFAEIAAFEFALKKCLPLGGNILVVTDSNYVAKAYNEELDVWASNGFVNNRKKPLKHISKWKSVADLKRLRPDVVVTHEPGHQKLDSSPHAYGNNLADQLATQASFKVHAGKRTADGSEFEKRTADGSEFESPKKKAKVE

SEQ ID NO: 6767 - protein, 2084 aa, synthetic construct
MPAAKRVKLDGGDKKYSIGLDIGTNSVGWAVITDEYKVPSKKFKVLGNTDRHSIKKNLIGALLFDSGETAEATRLKRTARRRYTRRKNRICYLQEIFSNEMAKVDDSFFHRLEESFLVEEDKKHERHPIFGNIVDEVAYHEKYPTIYHLRKKLVDSTDKADLRLIYLALAHMIKFRGHFLIEGDLNPDNSDVDKLFIQLVQTYNQLFEENPINASGVDAKAILSARLSKSRRLENLIAQLPGEKKNGLFGNLIALSLGLTPNFKSNFDLAEDAKLQLSKDTYDDDLDNLLAQIGDQYADLFLAAKNLSDAILLSDILRVNTEITKAPLSASMIKRYDEHHQDLTLLKALVRQQLPEKYKEIFFDQSKNGYAGYIDGGASQEEFYKFIKPILEKMDGTEELLVKLNREDLLRKQRTFDNGSIPHQIHLGELHAILRRQEDFYPFLKDNREKIEKILTFRIPYYVGPLARGNSRFAWMTRKSEETITPWNFEEVVDKGASAQSFIERMTNFDKNLPNEKVLPKHSLLYEYFTVYNELTKVKYVTEGMRKPAFLSGEQKKAIVDLLFKTNRKVTVKQLKEDYFKKIECFDSVEISGVEDRFNASLGTYHDLLKIIKDKDFLDNEENEDILEDIVLTLTLFEDREMIEERLKTYAHLFDDKVMKQLKRRRYTGWGRLSRKLINGIRDKQSGKTILDFLKSDGFANRNFMQLIHDDSLTFKEDIQKAQVSGQGDSLHEHIANLAGSPAIKKGILQTVKVVDELVKVMGRHKPENIVIEMARENQTTQKGQKNSRERMKRIEEGIKELGSQILKEHPVENTQLQNEKLYLYYLQNGRDMYVDQELDINRLSDYDVDHIVPQSFLKDDSIDNKVLTRSDKARGKSDNVPSEEVVKKMKNYWRQLLNAKLITQRKFDNLTKAERGGLSELDKAGFIKRQLVETRQITKHVAQILDSRMNTKYDENDKLIREVKVITLKSKLVSDFRKDFQFYKVREINNYHHAHDAYLNAVVGTALIKKYPKLESEFVYGDYKVYDVRKMIAKSEQEIGKATAKYFFYSNIMNFFKTEITLANGEIRKRPLIETNGETGEIVWDKGRDFATVRKVLSMPQVNIVKKTEVQTGGFSKESILPKRNSDKLIARKKDWDPKKYGGFDSPTVAYSVLVVAKVEKGKSKKLKSVKELLGITIMERSSFEKNPIDFLEAKGYKEVKKDLIIKLPKYSLFELENGRKRMLASAGELQKGNELALPSKYVNFLYLASHYEKLKGSPEDNEQKQLFVEQHKHYLDEIIEQISEFSKRVILADANLDKVLSAYNKHRDKPIREQAENIIHLFTLTNLGAPAAFKYFDTTIDRKRYTSTKEVLDATLIHQSITGLYETRIDLSQLGGDGGEAAAKPAPGGVPWLTQQPLQLTILVPLQEYQEKILSKTALPEDQKQQLKTLFVKYDNLWQHWENQVGHRKIRPHNIATGDYPPRPQKQYPINPKAKPSIQIVIDDLLKQGVLTPQNSTMNTPVYPVPKPDGRWRMVLDYREVNKTIPLTAAQNQHSAGILATIVRQKYKTTLDLANGFWAHPITPESYWLTAFTWQGKQYCWTRLPQGFLNSPALFNADVVDLLKEIPNVQVYVDDIYLSHDDPKEHVQQLEKVFQILLQAGYVVSLKKSEIGQKTVEFLGFNITKEGRGLTDTFKTKLLNITPPKDLKQLQSILGKLNFARNFIPNFAELVQPLYNLIAPAKGKYIEWSEENTKQLNMVIEALNTASNLEERLPEQRLVIKVNTSPSAGYVRYYNETGKKPIMYLNYVFSKAELKFSMLEKLLTTMHKALIKAMDLAMGQEILVYSPIVSMTKIQKTPLPERKALPIRWITWMTYLEDPRIQFHYDKTLPELKHIPDVYTSSQSPVKHPSQYEGVFYTDGSAIKSPDPTKSNNAGMGIVHATYKPEYQVLNQWSIPLGNHTAQMAEIAAVEFACKKALKIPGPVLVITDSFYVAESANKELPYWKSNGFVNNKKKPLKHISKWKSIAECLSMKPDITIQHEKGISLQIPVFILKGNALADKLATQGSYVVNAGKRTADGSEFEKRTADGSEFESPKKKAKVE

SEQ ID NO: 6768 - protein, 2173 aa, synthetic construct
MPAAKRVKLDGGDKKYSIGLDIGTNSVGWAVITDEYKVPSKKFKVLGNTDRHSIKKNLIGALLFDSGETAEATRLKRTARRRYTRRKNRICYLQEIFSNEMAKVDDSFFHRLEESFLVEEDKKHERHPIFGNIVDEVAYHEKYPTIYHLRKKLVDSTDKADLRLIYLALAHMIKFRGHFLIEGDLNPDNSDVDKLFIQLVQTYNQLFEENPINASGVDAKAILSARLSKSRRLENLIAQLPGEKKNGLFGNLIALSLGLTPNFKSNFDLAEDAKLQLSKDTYDDDLDNLLAQIGDQYADLFLAAKNLSDAILLSDILRVNTEITKAPLSASMIKRYDEHHQDLTLLKALVRQQLPEKYKEIFFDQSKNGYAGYIDGGASQEEFYKFIKPILEKMDGTEELLVKLNREDLLRKQRTFDNGSIPHQIHLGELHAILRRQEDFYPFLKDNREKIEKILTFRIPYYVGPLARGNSRFAWMTRKSEETITPWNFEEVVDKGASAQSFIERMTNFDKNLPNEKVLPKHSLLYEYFTVYNELTKVKYVTEGMRKPAFLSGEQKKAIVDLLFKTNRKVTVKQLKEDYFKKIECFDSVEISGVEDRFNASLGTYHDLLKIIKDKDFLDNEENEDILEDIVLTLTLFEDREMIEERLKTYAHLFDDKVMKQLKRRRYTGWGRLSRKLINGIRDKQSGKTILDFLKSDGFANRNFMQLIHDDSLTFKEDIQKAQVSGQGDSLHEHIANLAGSPAIKKGILQTVKVVDELVKVMGRHKPENIVIEMARENQTTQKGQKNSRERMKRIEEGIKELGSQILKEHPVENTQLQNEKLYLYYLQNGRDMYVDQELDINRLSDYDVDHIVPQSFLKDDSIDNKVLTRSDKARGKSDNVPSEEVVKKMKNYWRQLLNAKLITQRKFDNLTKAERGGLSELDKAGFIKRQLVETRQITKHVAQILDSRMNTKYDENDKLIREVKVITLKSKLVSDFRKDFQFYKVREINNYHHAHDAYLNAVVGTALIKKYPKLESEFVYGDYKVYDVRKMIAKSEQEIGKATAKYFFYSNIMNFFKTEITLANGEIRKRPLIETNGETGEIVWDKGRDFATVRKVLSMPQVNIVKKTEVQTGGFSKESILPKRNSDKLIARKKDWDPKKYGGFDSPTVAYSVLVVAKVEKGKSKKLKSVKELLGITIMERSSFEKNPIDFLEAKGYKEVKKDLIIKLPKYSLFELENGRKRMLASAGELQKGNELALPSKYVNFLYLASHYEKLKGSPEDNEQKQLFVEQHKHYLDEIIEQISEFSKRVILADANLDKVLSAYNKHRDKPIREQAENIIHLFTLTNLGAPAAFKYFDTTIDRKRYTSTKEVLDATLIHQSITGLYETRIDLSQLGGDGGEAAAKPAPGGMNPLQLLQPLPAEIKGTKLLAHWNSGATITCIPESFLEDEQPIKKTLIKTIHGEKQQNVYYVTFKVKGRKVEAEVIASPYEYILLSPTDVPWLTQQPLQLTILVPLQEYQEKILSKTALPEDQKQQLKTLFVKYDNLWQHWENQVGHRKIRPHNIATGDYPPRPQKQYPINPKAKPSIQIVIDDLLKQGVLTPQNSTMNTPVYPVPKPDGRWRMVLDYREVNKTIPLTAAQNQHSAGILATIVRQKYKTTLDLANGFWAHPITPESYWLTAFTWQGKQYCWTRLPQGFLNSPALFNADVVDLLKEIPNVQVYVDDIYLSHDDPKEHVQQLEKVFQILLQAGYVVSLKKSEIGQKTVEFLGFNITKEGRGLTDTFKTKLLNITPPKDLKQLQSILGKLNFARNFIPNFAELVQPLYNLIAPAKGKYIEWSEENTKQLNMVIEALNTASNLEERLPEQRLVIKVNTSPSAGYVRYYNETGKKPIMYLNYVFSKAELKFSMLEKLLTTMHKALIKAMDLAMGQEILVYSPIVSMTKIQKTPLPERKALPIRWITWMTYLEDPRIQFHYDKTLPELKHIPDVYTSSQSPVKHPSQYEGVFYTDGSAIKSPDPTKSNNAGMGIVHATYKPEYQVLNQWSIPLGNHTAQMAEIAAVEFACKKALKIPGPVLVITDSFYVAESANKELPYWKSNGFVNNKKKPLKHISKWKSIAECLSMKPDITIQHEKGISLQIPVFILKGNALADKLATQGSYVVNAGKRTADGSEFEKRTADGSEFESPKKKAKVE

SEQ ID NO: 6769 - protein, 2091 aa, synthetic construct
MPAAKRVKLDGGDKKYSIGLDIGTNSVGWAVITDEYKVPSKKFKVLGNTDRHSIKKNLIGALLFDSGETAEATRLKRTARRRYTRRKNRICYLQEIFSNEMAKVDDSFFHRLEESFLVEEDKKHERHPIFGNIVDEVAYHEKYPTIYHLRKKLVDSTDKADLRLIYLALAHMIKFRGHFLIEGDLNPDNSDVDKLFIQLVQTYNQLFEENPINASGVDAKAILSARLSKSRRLENLIAQLPGEKKNGLFGNLIALSLGLTPNFKSNFDLAEDAKLQLSKDTYDDDLDNLLAQIGDQYADLFLAAKNLSDAILLSDILRVNTEITKAPLSASMIKRYDEHHQDLTLLKALVRQQLPEKYKEIFFDQSKNGYAGYIDGGASQEEFYKFIKPILEKMDGTEELLVKLNREDLLRKQRTFDNGSIPHQIHLGELHAILRRQEDFYPFLKDNREKIEKILTFRIPYYVGPLARGNSRFAWMTRKSEETITPWNFEEVVDKGASAQSFIERMTNFDKNLPNEKVLPKHSLLYEYFTVYNELTKVKYVTEGMRKPAFLSGEQKKAIVDLLFKTNRKVTVKQLKEDYFKKIECFDSVEISGVEDRFNASLGTYHDLLKIIKDKDFLDNEENEDILEDIVLTLTLFEDREMIEERLKTYAHLFDDKVMKQLKRRRYTGWGRLSRKLINGIRDKQSGKTILDFLKSDGFANRNFMQLIHDDSLTFKEDIQKAQVSGQGDSLHEHIANLAGSPAIKKGILQTVKVVDELVKVMGRHKPENIVIEMARENQTTQKGQKNSRERMKRIEEGIKELGSQILKEHPVENTQLQNEKLYLYYLQNGRDMYVDQELDINRLSDYDVDHIVPQSFLKDDSIDNKVLTRSDKARGKSDNVPSEEVVKKMKNYWRQLLNAKLITQRKFDNLTKAERGGLSELDKAGFIKRQLVETRQITKHVAQILDSRMNTKYDENDKLIREVKVITLKSKLVSDFRKDFQFYKVREINNYHHAHDAYLNAVVGTALIKKYPKLESEFVYGDYKVYDVRKMIAKSEQEIGKATAKYFFYSNIMNFFKTEITLANGEIRKRPLIETNGETGEIVWDKGRDFATVRKVLSMPQVNIVKKTEVQTGGFSKESILPKRNSDKLIARKKDWDPKKYGGFDSPTVAYSVLVVAKVEKGKSKKLKSVKELLGITIMERSSFEKNPIDFLEAKGYKEVKKDLIIKLPKYSLFELENGRKRMLASAGELQKGNELALPSKYVNFLYLASHYEKLKGSPEDNEQKQLFVEQHKHYLDEIIEQISEFSKRVILADANLDKVLSAYNKHRDKPIREQAENIIHLFTLTNLGAPAAFKYFDTTIDRKRYTSTKEVLDATLIHQSITGLYETRIDLSQLGGDGGEAAAKPAPGGVLNLEEEYRLHEKPVPSSIDPSWLQLFPTVWAERAGMGLANQVPPVVVELRSGASPVAVRQYPMSKEAREGIRPHIQKFLDLGVLVPCRSPWNTPLLPVKKPGTNDYRPVQDLREINKRVQDIHPTVPNPYNLLSSLPPSYTWYSVLDLKDAFFCLRLHPNSQPLFAFEWKDPEKGNTGQLTWTRLPQGFKNSPTLFNEALHRDLAPFRALNPQVVLLQYVDDLLVAAPTYEDCKKGTQKLLQELSKLGYRVSAKKAQLCQREVTYLGYLLKEGKRWLTPARKATVMKIPVPTTPRQVREFLGKAGFCRLFIPGFASLAAPLYPLTKPSIPFIWTEEHQQAFDHIKKALLSAPALALPDLTKPFTLYIDERAGVARGVLTQTLGPWRRPVAYLSKKLDPVASGWPTCLKAVAAVALLLKDADKLTLGQNVTVIASHSLESIVRQPPDRWMTNARMTHYQSLLLNERVSFAPPAVLNPATLLPVESEATPVHRCSEILAEETGTRRDLEDQPLPGVPTWYTDGSSFITEGKRRAGAPIVDGKRTVWASSLPEGTSAQKAELVALTQALRLAEGKNINIYTDSRYAFATAHIHGAIYKQRGWLTSAGKDIKNKEEILALLEAIHLPRRVAIIHCPGHQRGSNPVATGNRRADEAAKQAALSTRVLAGTTKPAGKRTADGSEFEKRTADGSEFESPKKKAKVE

SEQ ID NO: 6770 - protein, 2124 aa, synthetic construct
MPAAKRVKLDGGDKKYSIGLDIGTNSVGWAVITDEYKVPSKKFKVLGNTDRHSIKKNLIGALLFDSGETAEATRLKRTARRRYTRRKNRICYLQEIFSNEMAKVDDSFFHRLEESFLVEEDKKHERHPIFGNIVDEVAYHEKYPTIYHLRKKLVDSTDKADLRLIYLALAHMIKFRGHFLIEGDLNPDNSDVDKLFIQLVQTYNQLFEENPINASGVDAKAILSARLSKSRRLENLIAQLPGEKKNGLFGNLIALSLGLTPNFKSNFDLAEDAKLQLSKDTYDDDLDNLLAQIGDQYADLFLAAKNLSDAILLSDILRVNTEITKAPLSASMIKRYDEHHQDLTLLKALVRQQLPEKYKEIFFDQSKNGYAGYIDGGASQEEFYKFIKPILEKMDGTEELLVKLNREDLLRKQRTFDNGSIPHQIHLGELHAILRRQEDFYPFLKDNREKIEKILTFRIPYYVGPLARGNSRFAWMTRKSEETITPWNFEEVVDKGASAQSFIERMTNFDKNLPNEKVLPKHSLLYEYFTVYNELTKVKYVTEGMRKPAFLSGEQKKAIVDLLFKTNRKVTVKQLKEDYFKKIECFDSVEISGVEDRFNASLGTYHDLLKIIKDKDFLDNEENEDILEDIVLTLTLFEDREMIEERLKTYAHLFDDKVMKQLKRRRYTGWGRLSRKLINGIRDKQSGKTILDFLKSDGFANRNFMQLIHDDSLTFKEDIQKAQVSGQGDSLHEHIANLAGSPAIKKGILQTVKVVDELVKVMGRHKPENIVIEMARENQTTQKGQKNSRERMKRIEEGIKELGSQILKEHPVENTQLQNEKLYLYYLQNGRDMYVDQELDINRLSDYDVDHIVPQSFLKDDSIDNKVLTRSDKARGKSDNVPSEEVVKKMKNYWRQLLNAKLITQRKFDNLTKAERGGLSELDKAGFIKRQLVETRQITKHVAQILDSRMNTKYDENDKLIREVKVITLKSKLVSDFRKDFQFYKVREINNYHHAHDAYLNAVVGTALIKKYPKLESEFVYGDYKVYDVRKMIAKSEQEIGKATAKYFFYSNIMNFFKTEITLANGEIRKRPLIETNGETGEIVWDKGRDFATVRKVLSMPQVNIVKKTEVQTGGFSKESILPKRNSDKLIARKKDWDPKKYGGFDSPTVAYSVLVVAKVEKGKSKKLKSVKELLGITIMERSSFEKNPIDFLEAKGYKEVKKDLIIKLPKYSLFELENGRKRMLASAGELQKGNELALPSKYVNFLYLASHYEKLKGSPEDNEQKQLFVEQHKHYLDEIIEQISEFSKRVILADANLDKVLSAYNKHRDKPIREQAENIIHLFTLTNLGAPAAFKYFDTTIDRKRYTSTKEVLDATLIHQSITGLYETRIDLSQLGGDGGEAAAKPAPGGLLGRDLLTKLKAQIQFSTEGPQVTWEDRPAMCLVLNLEEEYRLHEKPVPPSIDPSWLQLFPMVWAEKAGMGLANQVPPVVVELKSDASPVAVRQYPMSKEAREGIRPHIQRFLDLGILVPCQSPWNTPLLPVKKPGTNDYRPVQDLREVNKRVQDIHPTVPNPYNLLSSLPPSHTWYSVLDLKDAFFCLKLHPNSQPLFAFEWRDPEKGNTGQLTWTRLPQGFKNSPTLFNEALHRDLASFRALNPQVVMLQYVDDLLVAAPTYRDCKEGTRRLLQELSKLGYRVSAKKAQLCREEVTYLGYLLKGGKRWLTPARKATVMKIPTPTTPRQVREFLGTAGFCRLWIPGFASLAAPLYPLTRPKVPFTWTEAHQEAFGRIKEALLSAPALALPDLTKPFALYVDEKEGVARGVLTQTLGPWRRPVAYLSKKLDPVASGWPTCLKAIAAVALLLKDADKLTLGQNVLVIAPHNLESIVRQPPDRWMTNARMTHYQSLLLNERVSFAPPAILNPATLLPVESDDTPIHICSEILAEETGTRPDLRDQPLPGVPAWYTDGSSFIMDGRRQAGAAIVDNKRTVWASNLPEGTSAQKAELIALTQALRLAEGKSINIYTDSRYAFATAHVHGAIYKQRGWLTSAGKDIKNKEEILALLEAIHLPKRVAIIHCPGHQRGTDPVATGNRKADEAAKQAAQSTRILTETTKNAGKRTADGSEFEKRTADGSEFESPKKKAKVE

SEQ ID NO: 6771 - protein, 2124 aa, synthetic construct
MPAAKRVKLDGGDKKYSIGLDIGTNSVGWAVITDEYKVPSKKFKVLGNTDRHSIKKNLIGALLFDSGETAEATRLKRTARRRYTRRKNRICYLQEIFSNEMAKVDDSFFHRLEESFLVEEDKKHERHPIFGNIVDEVAYHEKYPTIYHLRKKLVDSTDKADLRLIYLALAHMIKFRGHFLIEGDLNPDNSDVDKLFIQLVQTYNQLFEENPINASGVDAKAILSARLSKSRRLENLIAQLPGEKKNGLFGNLIALSLGLTPNFKSNFDLAEDAKLQLSKDTYDDDLDNLLAQIGDQYADLFLAAKNLSDAILLSDILRVNTEITKAPLSASMIKRYDEHHQDLTLLKALVRQQLPEKYKEIFFDQSKNGYAGYIDGGASQEEFYKFIKPILEKMDGTEELLVKLNREDLLRKQRTFDNGSIPHQIHLGELHAILRRQEDFYPFLKDNREKIEKILTFRIPYYVGPLARGNSRFAWMTRKSEETITPWNFEEVVDKGASAQSFIERMTNFDKNLPNEKVLPKHSLLYEYFTVYNELTKVKYVTEGMRKPAFLSGEQKKAIVDLLFKTNRKVTVKQLKEDYFKKIECFDSVEISGVEDRFNASLGTYHDLLKIIKDKDFLDNEENEDILEDIVLTLTLFEDREMIEERLKTYAHLFDDKVMKQLKRRRYTGWGRLSRKLINGIRDKQSGKTILDFLKSDGFANRNFMQLIHDDSLTFKEDIQKAQVSGQGDSLHEHIANLAGSPAIKKGILQTVKVVDELVKVMGRHKPENIVIEMARENQTTQKGQKNSRERMKRIEEGIKELGSQILKEHPVENTQLQNEKLYLYYLQNGRDMYVDQELDINRLSDYDVDHIVPQSFLKDDSIDNKVLTRSDKARGKSDNVPSEEVVKKMKNYWRQLLNAKLITQRKFDNLTKAERGGLSELDKAGFIKRQLVETRQITKHVAQILDSRMNTKYDENDKLIREVKVITLKSKLVSDFRKDFQFYKVREINNYHHAHDAYLNAVVGTALIKKYPKLESEFVYGDYKVYDVRKMIAKSEQEIGKATAKYFFYSNIMNFFKTEITLANGEIRKRPLIETNGETGEIVWDKGRDFATVRKVLSMPQVNIVKKTEVQTGGFSKESILPKRNSDKLIARKKDWDPKKYGGFDSPTVAYSVLVVAKVEKGKSKKLKSVKELLGITIMERSSFEKNPIDFLEAKGYKEVKKDLIIKLPKYSLFELENGRKRMLASAGELQKGNELALPSKYVNFLYLASHYEKLKGSPEDNEQKQLFVEQHKHYLDEIIEQISEFSKRVILADANLDKVLSAYNKHRDKPIREQAENIIHLFTLTNLGAPAAFKYFDTTIDRKRYTSTKEVLDATLIHQSITGLYETRIDLSQLGGDGGEAAAKPAPGGLLGRDLLTKLKAQIQFSTEGPQVTWEDRPAMCLVLNLEEEYRLHEKPVPPSIDPSWLQLFPMVWAEKAGMGLANQVPPVVVELKSDASPVAVRQYPMSKEAREGIRPHIQRFLDLGILVPCQSPWNTPLLPVKKPGTNDYRPVQDLREVNKRVQDIHPTVPNPYNLLSSLPPSHTWYSVLDLKDAFFCLKLHPNSQPLFAFEWRDPEKGNTGQLTWTRLPQGFKNSPTLFNEALHRDLASFRALNPQVVMLQYVDDLLVAAPTYRDCKEGTRRLLQELSKLGYRVSAKKAQLCREEVTYLGYLLKGGKRWLTPARKATVMKIPTPTTPRQVREFLGKAGFCRLFIPGFASLAAPLYPLTRPKVPFTWTEAHQEAFGRIKEALLSAPALALPDLTKPFALYVDEKEGVARGVLTQTLGPWRRPVAYLSKKLDPVASGWPTCLKAIAAVALLLKDADKLTLGQNVLVIAPHNLESIVRQPPDRWMTNARMTHYQSLLLNERVSFAPPAILNPATLLPVESDDTPIHICSEILAEETGTRPDLRDQPLPGVPAWYTDGSSFIMDGRRQAGAAIVDNKRTVWASNLPEGTSAQKAELIALTQALRLAEGKSINIYTDSRYAFATAHVHGAIYKQRGWLTSAGKDIKNKEEILALLEAIHLPKRVAIIHCPGHQRGTDPVATGNRKADEAAKQAAQSTRILTETTKNAGKRTADGSEFEKRTADGSEFESPKKKAKVE

SEQ ID NO: 6772 - protein, 2215 aa, synthetic construct
MPAAKRVKLDGGDKKYSIGLDIGTNSVGWAVITDEYKVPSKKFKVLGNTDRHSIKKNLIGALLFDSGETAEATRLKRTARRRYTRRKNRICYLQEIFSNEMAKVDDSFFHRLEESFLVEEDKKHERHPIFGNIVDEVAYHEKYPTIYHLRKKLVDSTDKADLRLIYLALAHMIKFRGHFLIEGDLNPDNSDVDKLFIQLVQTYNQLFEENPINASGVDAKAILSARLSKSRRLENLIAQLPGEKKNGLFGNLIALSLGLTPNFKSNFDLAEDAKLQLSKDTYDDDLDNLLAQIGDQYADLFLAAKNLSDAILLSDILRVNTEITKAPLSASMIKRYDEHHQDLTLLKALVRQQLPEKYKEIFFDQSKNGYAGYIDGGASQEEFYKFIKPILEKMDGTEELLVKLNREDLLRKQRTFDNGSIPHQIHLGELHAILRRQEDFYPFLKDNREKIEKILTFRIPYYVGPLARGNSRFAWMTRKSEETITPWNFEEVVDKGASAQSFIERMTNFDKNLPNEKVLPKHSLLYEYFTVYNELTKVKYVTEGMRKPAFLSGEQKKAIVDLLFKTNRKVTVKQLKEDYFKKIECFDSVEISGVEDRFNASLGTYHDLLKIIKDKDFLDNEENEDILEDIVLTLTLFEDREMIEERLKTYAHLFDDKVMKQLKRRRYTGWGRLSRKLINGIRDKQSGKTILDFLKSDGFANRNFMQLIHDDSLTFKEDIQKAQVSGQGDSLHEHIANLAGSPAIKKGILQTVKVVDELVKVMGRHKPENIVIEMARENQTTQKGQKNSRERMKRIEEGIKELGSQILKEHPVENTQLQNEKLYLYYLQNGRDMYVDQELDINRLSDYDVDHIVPQSFLKDDSIDNKVLTRSDKARGKSDNVPSEEVVKKMKNYWRQLLNAKLITQRKFDNLTKAERGGLSELDKAGFIKRQLVETRQITKHVAQILDSRMNTKYDENDKLIREVKVITLKSKLVSDFRKDFQFYKVREINNYHHAHDAYLNAVVGTALIKKYPKLESEFVYGDYKVYDVRKMIAKSEQEIGKATAKYFFYSNIMNFFKTEITLANGEIRKRPLIETNGETGEIVWDKGRDFATVRKVLSMPQVNIVKKTEVQTGGFSKESILPKRNSDKLIARKKDWDPKKYGGFDSPTVAYSVLVVAKVEKGKSKKLKSVKELLGITIMERSSFEKNPIDFLEAKGYKEVKKDLIIKLPKYSLFELENGRKRMLASAGELQKGNELALPSKYVNFLYLASHYEKLKGSPEDNEQKQLFVEQHKHYLDEIIEQISEFSKRVILADANLDKVLSAYNKHRDKPIREQAENIIHLFTLTNLGAPAAFKYFDTTIDRKRYTSTKEVLDATLIHQSITGLYETRIDLSQLGGDGGEAAAKPAPGGTLGDQGSRGSDPLPEPRVTLTVEGIPTEFLVNTGAEHSVLTKPMGKMGSKRTVVAGATGSKVYPWTTKRLLKIGQKQVTHSFLVIPECPAPLLGRDLLTKLKAQIQFSTEGPQVTWEDRPAMCLVLNLEEEYRLHEKPVPPSIDPSWLQLFPMVWAEKAGMGLANQVPPVVVELKSDASPVAVRQYPMSKEAREGIRPHIQRFLDLGILVPCQSPWNTPLLPVKKPGTNDYRPVQDLREVNKRVQDIHPTVPNPYNLLSSLPPSHTWYSVLDLKDAFFCLKLHPNSQPLFAFEWRDPEKGNTGQLTWTRLPQGFKNSPTLFNEALHRDLASFRALNPQVVMLQYVDDLLVAAPTYRDCKEGTRRLLQELSKLGYRVSAKKAQLCREEVTYLGYLLKGGKRWLTPARKATVMKIPTPTTPRQVREFLGTAGFCRLWIPGFASLAAPLYPLTRPKVPFTWTEAHQEAFGRIKEALLSAPALALPDLTKPFALYVDEKEGVARGVLTQTLGPWRRPVAYLSKKLDPVASGWPTCLKAIAAVALLLKDADKLTLGQNVLVIAPHNLESIVRQPPDRWMTNARMTHYQSLLLNERVSFAPPAILNPATLLPVESDDTPIHICSEILAEETGTRPDLRDQPLPGVPAWYTDGSSFIMDGRRQAGAAIVDNKRTVWASNLPEGTSAQKAELIALTQALRLAEGKSINIYTDSRYAFATAHVHGAIYKQRGWLTSAGKDIKNKEEILALLEAIHLPKRVAIIHCPGHQRGTDPVATGNRKADEAAKQAAQSTRILTETTKNAGKRTADGSEFEKRTADGSEFESPKKKAKVE

SEQ ID NO: 6773 - protein, 2093 aa, synthetic construct
MPAAKRVKLDGGDKKYSIGLDIGTNSVGWAVITDEYKVPSKKFKVLGNTDRHSIKKNLIGALLFDSGETAEATRLKRTARRRYTRRKNRICYLQEIFSNEMAKVDDSFFHRLEESFLVEEDKKHERHPIFGNIVDEVAYHEKYPTIYHLRKKLVDSTDKADLRLIYLALAHMIKFRGHFLIEGDLNPDNSDVDKLFIQLVQTYNQLFEENPINASGVDAKAILSARLSKSRRLENLIAQLPGEKKNGLFGNLIALSLGLTPNFKSNFDLAEDAKLQLSKDTYDDDLDNLLAQIGDQYADLFLAAKNLSDAILLSDILRVNTEITKAPLSASMIKRYDEHHQDLTLLKALVRQQLPEKYKEIFFDQSKNGYAGYIDGGASQEEFYKFIKPILEKMDGTEELLVKLNREDLLRKQRTFDNGSIPHQIHLGELHAILRRQEDFYPFLKDNREKIEKILTFRIPYYVGPLARGNSRFAWMTRKSEETITPWNFEEVVDKGASAQSFIERMTNFDKNLPNEKVLPKHSLLYEYFTVYNELTKVKYVTEGMRKPAFLSGEQKKAIVDLLFKTNRKVTVKQLKEDYFKKIECFDSVEISGVEDRFNASLGTYHDLLKIIKDKDFLDNEENEDILEDIVLTLTLFEDREMIEERLKTYAHLFDDKVMKQLKRRRYTGWGRLSRKLINGIRDKQSGKTILDFLKSDGFANRNFMQLIHDDSLTFKEDIQKAQVSGQGDSLHEHIANLAGSPAIKKGILQTVKVVDELVKVMGRHKPENIVIEMARENQTTQKGQKNSRERMKRIEEGIKELGSQILKEHPVENTQLQNEKLYLYYLQNGRDMYVDQELDINRLSDYDVDHIVPQSFLKDDSIDNKVLTRSDKARGKSDNVPSEEVVKKMKNYWRQLLNAKLITQRKFDNLTKAERGGLSELDKAGFIKRQLVETRQITKHVAQILDSRMNTKYDENDKLIREVKVITLKSKLVSDFRKDFQFYKVREINNYHHAHDAYLNAVVGTALIKKYPKLESEFVYGDYKVYDVRKMIAKSEQEIGKATAKYFFYSNIMNFFKTEITLANGEIRKRPLIETNGETGEIVWDKGRDFATVRKVLSMPQVNIVKKTEVQTGGFSKESILPKRNSDKLIARKKDWDPKKYGGFDSPTVAYSVLVVAKVEKGKSKKLKSVKELLGITIMERSSFEKNPIDFLEAKGYKEVKKDLIIKLPKYSLFELENGRKRMLASAGELQKGNELALPSKYVNFLYLASHYEKLKGSPEDNEQKQLFVEQHKHYLDEIIEQISEFSKRVILADANLDKVLSAYNKHRDKPIREQAENIIHLFTLTNLGAPAAFKYFDTTIDRKRYTSTKEVLDATLIHQSITGLYETRIDLSQLGGDGGEAAAKPAPGGTLNLEDEYRLYETSAEPEVSPGSTWLSDFPQAWAETGGMGLAVRQAPLIIPLKATSTPVSIKQYPMSQEAKLGIKPHIQRLLDQGILVPCQSPWNTPLLPVKKPGTNDYRPVQDLREVNKRVEDIHPTVPNPYNLLSGLPPSHRWYTVLDLKDAFFCLRLHPTSQPLFAFEWRDPGMGISGQLTWTRLPQGFKNSPTLFNEALHRDLADFRIQHPDLILLQYVDDILLAATSELDCQQGTRALLLTLGNLGYRASAKKAQLCQKQVKYLGYLLKEGQRWLTEARKETVMGQPTPKTPRQLREFLGKAGFCRLFIPGFAEMAAPLYPLTKPGTLFNWGPDQQKAYQEIKQALLTAPALGLPDLTKPFELFVDEKQGYAKGVLTQKLGPWRRPVAYLSKKLDPVAAGWPPCLRMVAAIAVLRKDAGKLTMGQPLVILAPHAVEALVKQPPDRWLSNARMTHYQAMLLDTDRVQFGPVVALNPATLLPLPEEGAPHDCLEILAETHGTRPDLTDQPIPDADHTWYTDGSSFLQEGQRKAGAAVTTETEVIWARALPAGTSAQRAELIALTQALKMAEGKRLNVYTDSRYAFATAHIHGEIYRRRGWLTSEGREIKNKSEILALLKALFLPKRLSIIHCLGHQKGDSAEARGNRLADQAAREAAIKTPPDTSTLLAGKRTADGSEFEKRTADGSEFESPKKKAKVE

SEQ ID NO: 6774 - protein, 2093 aa, synthetic construct
MPAAKRVKLDGGDKKYSIGLDIGTNSVGWAVITDEYKVPSKKFKVLGNTDRHSIKKNLIGALLFDSGETAEATRLKRTARRRYTRRKNRICYLQEIFSNEMAKVDDSFFHRLEESFLVEEDKKHERHPIFGNIVDEVAYHEKYPTIYHLRKKLVDSTDKADLRLIYLALAHMIKFRGHFLIEGDLNPDNSDVDKLFIQLVQTYNQLFEENPINASGVDAKAILSARLSKSRRLENLIAQLPGEKKNGLFGNLIALSLGLTPNFKSNFDLAEDAKLQLSKDTYDDDLDNLLAQIGDQYADLFLAAKNLSDAILLSDILRVNTEITKAPLSASMIKRYDEHHQDLTLLKALVRQQLPEKYKEIFFDQSKNGYAGYIDGGASQEEFYKFIKPILEKMDGTEELLVKLNREDLLRKQRTFDNGSIPHQIHLGELHAILRRQEDFYPFLKDNREKIEKILTFRIPYYVGPLARGNSRFAWMTRKSEETITPWNFEEVVDKGASAQSFIERMTNFDKNLPNEKVLPKHSLLYEYFTVYNELTKVKYVTEGMRKPAFLSGEQKKAIVDLLFKTNRKVTVKQLKEDYFKKIECFDSVEISGVEDRFNASLGTYHDLLKIIKDKDFLDNEENEDILEDIVLTLTLFEDREMIEERLKTYAHLFDDKVMKQLKRRRYTGWGRLSRKLINGIRDKQSGKTILDFLKSDGFANRNFMQLIHDDSLTFKEDIQKAQVSGQGDSLHEHIANLAGSPAIKKGILQTVKVVDELVKVMGRHKPENIVIEMARENQTTQKGQKNSRERMKRIEEGIKELGSQILKEHPVENTQLQNEKLYLYYLQNGRDMYVDQELDINRLSDYDVDHIVPQSFLKDDSIDNKVLTRSDKARGKSDNVPSEEVVKKMKNYWRQLLNAKLITQRKFDNLTKAERGGLSELDKAGFIKRQLVETRQITKHVAQILDSRMNTKYDENDKLIREVKVITLKSKLVSDFRKDFQFYKVREINNYHHAHDAYLNAVVGTALIKKYPKLESEFVYGDYKVYDVRKMIAKSEQEIGKATAKYFFYSNIMNFFKTEITLANGEIRKRPLIETNGETGEIVWDKGRDFATVRKVLSMPQVNIVKKTEVQTGGFSKESILPKRNSDKLIARKKDWDPKKYGGFDSPTVAYSVLVVAKVEKGKSKKLKSVKELLGITIMERSSFEKNPIDFLEAKGYKEVKKDLIIKLPKYSLFELENGRKRMLASAGELQKGNELALPSKYVNFLYLASHYEKLKGSPEDNEQKQLFVEQHKHYLDEIIEQISEFSKRVILADANLDKVLSAYNKHRDKPIREQAENIIHLFTLTNLGAPAAFKYFDTTIDRKRYTSTKEVLDATLIHQSITGLYETRIDLSQLGGDGGEAAAKPAPGGTLGIEDEYRLHETSTEPDVSLGSTWLSDFPQAWAETGGMGLAVRQAPLIIPLKATSTPVSIQQYPMSHEARLGIKPHIQRLLDQGILVPCQSPWNTPLLPVKKPGTNDYRPVQDLREVNKRVEDIHPTVPNPYNLLSGLPPSHQWYTVLDLKDAFFCLRLHPTSQPLFAFEWRDPGMGISGQLTWTRLPQGFKNSPTLFNEALHRDLADFRIQHPDLILLQYVDDILLAATSELDCQQGTRALLQTLGDLGYRASAKKAQICQKQVKYLGYLLREGQRWLTEARKETVMGQPVPKTPRQLREFLGTAGFCRLWIPGFAEMAAPLYPLTKPGTLFSWGPDQQKAYQEIKQALLTAPALGLPDLTKPFELFVDEKQGYAKGVLTQKLGPWRRPVAYLSKKLDPVAAGWPPCLRMVAAIAVLTKDAGKLTMGQPLVILAPHAVEALVKQPPDRWLSNARMTHYQAMLLDTDRVQFGPVVALNPATLLPLPEEGAPHDCLEILAETHGTRPDLTDQPIPDADHTWYTDGSSFLQEGQRKAGAAVTTETEVIWAGALPAGTSAQRAELIALTQALKMAEGKRLNVYTDSRYAFATAHIHGEIYRRRGWLTSEGREIKNKSEILALLKALFLPKRLSIIHCLGHQKGDSAEARGNRLADQAAREAAIKTPPDTSTLLAGKRTADGSEFEKRTADGSEFESPKKKAKVE

SEQ ID NO: 6775 - protein, 2093 aa, synthetic construct
MPAAKRVKLDGGDKKYSIGLDIGTNSVGWAVITDEYKVPSKKFKVLGNTDRHSIKKNLIGALLFDSGETAEATRLKRTARRRYTRRKNRICYLQEIFSNEMAKVDDSFFHRLEESFLVEEDKKHERHPIFGNIVDEVAYHEKYPTIYHLRKKLVDSTDKADLRLIYLALAHMIKFRGHFLIEGDLNPDNSDVDKLFIQLVQTYNQLFEENPINASGVDAKAILSARLSKSRRLENLIAQLPGEKKNGLFGNLIALSLGLTPNFKSNFDLAEDAKLQLSKDTYDDDLDNLLAQIGDQYADLFLAAKNLSDAILLSDILRVNTEITKAPLSASMIKRYDEHHQDLTLLKALVRQQLPEKYKEIFFDQSKNGYAGYIDGGASQEEFYKFIKPILEKMDGTEELLVKLNREDLLRKQRTFDNGSIPHQIHLGELHAILRRQEDFYPFLKDNREKIEKILTFRIPYYVGPLARGNSRFAWMTRKSEETITPWNFEEVVDKGASAQSFIERMTNFDKNLPNEKVLPKHSLLYEYFTVYNELTKVKYVTEGMRKPAFLSGEQKKAIVDLLFKTNRKVTVKQLKEDYFKKIECFDSVEISGVEDRFNASLGTYHDLLKIIKDKDFLDNEENEDILEDIVLTLTLFEDREMIEERLKTYAHLFDDKVMKQLKRRRYTGWGRLSRKLINGIRDKQSGKTILDFLKSDGFANRNFMQLIHDDSLTFKEDIQKAQVSGQGDSLHEHIANLAGSPAIKKGILQTVKVVDELVKVMGRHKPENIVIEMARENQTTQKGQKNSRERMKRIEEGIKELGSQILKEHPVENTQLQNEKLYLYYLQNGRDMYVDQELDINRLSDYDVDHIVPQSFLKDDSIDNKVLTRSDKARGKSDNVPSEEVVKKMKNYWRQLLNAKLITQRKFDNLTKAERGGLSELDKAGFIKRQLVETRQITKHVAQILDSRMNTKYDENDKLIREVKVITLKSKLVSDFRKDFQFYKVREINNYHHAHDAYLNAVVGTALIKKYPKLESEFVYGDYKVYDVRKMIAKSEQEIGKATAKYFFYSNIMNFFKTEITLANGEIRKRPLIETNGETGEIVWDKGRDFATVRKVLSMPQVNIVKKTEVQTGGFSKESILPKRNSDKLIARKKDWDPKKYGGFDSPTVAYSVLVVAKVEKGKSKKLKSVKELLGITIMERSSFEKNPIDFLEAKGYKEVKKDLIIKLPKYSLFELENGRKRMLASAGELQKGNELALPSKYVNFLYLASHYEKLKGSPEDNEQKQLFVEQHKHYLDEIIEQISEFSKRVILADANLDKVLSAYNKHRDKPIREQAENIIHLFTLTNLGAPAAFKYFDTTIDRKRYTSTKEVLDATLIHQSITGLYETRIDLSQLGGDGGEAAAKPAPGGTLNIEDEYRLHETSKEPDVSLGSTWLSDFPQAWAETGGMGLAVRQAPLIIPLKATSTPVSIKQYPMSQEARLGIKPHIQRLLDQGILVPCQSPWNTPLLPVKKPGTNDYRPVQDLREVNKRVEDIHPTVPNPYNLLSGLPPSHQWYTVLDLKDAFFCLRLHPTSQPLFAFEWRDPEMGISGQLTWTRLPQGFKNSPTLFNEALHRDLAGFRIQHPDLILLQYVDDLLLAATSELDCQQGTRALLQTLGDLGYRASAKKAQICQKQVKYLGYLLKEGQRWLTEARKETVMGQPIPKTPRQLREFLGTAGFCRLWIPGFAEMAAPLYPLTKPGTLFNWGPDQQKAFQEIKQALLTAPALGLPDLTKPFELFVDEKQGYAKGVLTQKLGPWRRPVAYLSKKLDPVAAGWPPCLRMVAAIAVLTKDAGKLTMGQPLVILAPHAVEALVKQPPDRWLSNARMTHYQALLLDTDRVQFGPVVALNPATLLPLPEEGLQHDCLDILAEAHGTRSDLMDQPLPDADHTWYTDGSSFLQEGQRKAGAAVTTETEVIWARALPAGTSAQRAELIALTQALKMAEGKKLNVYTDSRYAFATAHIHGEIYRRRGWLTSEGKEIKNKDEILALLKALFLPKRLSIIHCPGHQKGNSAEARGNRMADQAAREVATRETPETSTLLAGKRTADGSEFEKRTADGSEFESPKKKAKVE

SEQ ID NO: 6776 - protein, 2093 aa, synthetic construct
MPAAKRVKLDGGDKKYSIGLDIGTNSVGWAVITDEYKVPSKKFKVLGNTDRHSIKKNLIGALLFDSGETAEATRLKRTARRRYTRRKNRICYLQEIFSNEMAKVDDSFFHRLEESFLVEEDKKHERHPIFGNIVDEVAYHEKYPTIYHLRKKLVDSTDKADLRLIYLALAHMIKFRGHFLIEGDLNPDNSDVDKLFIQLVQTYNQLFEENPINASGVDAKAILSARLSKSRRLENLIAQLPGEKKNGLFGNLIALSLGLTPNFKSNFDLAEDAKLQLSKDTYDDDLDNLLAQIGDQYADLFLAAKNLSDAILLSDILRVNTEITKAPLSASMIKRYDEHHQDLTLLKALVRQQLPEKYKEIFFDQSKNGYAGYIDGGASQEEFYKFIKPILEKMDGTEELLVKLNREDLLRKQRTFDNGSIPHQIHLGELHAILRRQEDFYPFLKDNREKIEKILTFRIPYYVGPLARGNSRFAWMTRKSEETITPWNFEEVVDKGASAQSFIERMTNFDKNLPNEKVLPKHSLLYEYFTVYNELTKVKYVTEGMRKPAFLSGEQKKAIVDLLFKTNRKVTVKQLKEDYFKKIECFDSVEISGVEDRFNASLGTYHDLLKIIKDKDFLDNEENEDILEDIVLTLTLFEDREMIEERLKTYAHLFDDKVMKQLKRRRYTGWGRLSRKLINGIRDKQSGKTILDFLKSDGFANRNFMQLIHDDSLTFKEDIQKAQVSGQGDSLHEHIANLAGSPAIKKGILQTVKVVDELVKVMGRHKPENIVIEMARENQTTQKGQKNSRERMKRIEEGIKELGSQILKEHPVENTQLQNEKLYLYYLQNGRDMYVDQELDINRLSDYDVDHIVPQSFLKDDSIDNKVLTRSDKARGKSDNVPSEEVVKKMKNYWRQLLNAKLITQRKFDNLTKAERGGLSELDKAGFIKRQLVETRQITKHVAQILDSRMNTKYDENDKLIREVKVITLKSKLVSDFRKDFQFYKVREINNYHHAHDAYLNAVVGTALIKKYPKLESEFVYGDYKVYDVRKMIAKSEQEIGKATAKYFFYSNIMNFFKTEITLANGEIRKRPLIETNGETGEIVWDKGRDFATVRKVLSMPQVNIVKKTEVQTGGFSKESILPKRNSDKLIARKKDWDPKKYGGFDSPTVAYSVLVVAKVEKGKSKKLKSVKELLGITIMERSSFEKNPIDFLEAKGYKEVKKDLIIKLPKYSLFELENGRKRMLASAGELQKGNELALPSKYVNFLYLASHYEKLKGSPEDNEQKQLFVEQHKHYLDEIIEQISEFSKRVILADANLDKVLSAYNKHRDKPIREQAENIIHLFTLTNLGAPAAFKYFDTTIDRKRYTSTKEVLDATLIHQSITGLYETRIDLSQLGGDGGEAAAKPAPGGTLNIEDEYRLHETSKGPDVPLGSTWLSDFPQAWAETGGMGLAVRQAPLIIPLKATSTPVSIKQYPMSQEARLGIKPHIQRLLDQGILVPCQSPWNTPLLPVKKPGTNDYRPVQDLREVNKRVEDIHPTVPNPYNLLSGLPPSHQWYTVLDLKDAFFCLRLHPTSQSLFAFEWRDPEMGISGQLTWTRLPQGFKNSPTLFNEALHRDLADFRIQHPDLILLQYVDDLLLAATSELDCQQGTRALLQTLGDLGYRASAKKAQICQKQVKYLGYLLKEGQRWLTEARKETVMGQPTPKTPRQLREFLGTAGFCRLWIPGFAEMAAPLYPLTKPGTLFEWGPDQQKAYQEIKQALLTAPALGLPDLTKPFELFVDEKQGYAKGVLTQKLGPWRRPVAYLSKKLDPVAAGWPPCLRMVAAIAVLTKDAGKLTMGQPLVILAPHAVEALVKQPPDRWLSNARMTHYQALLLDTDRVQFGPIVALNPATLLPLPEEGLQHDCLDILAEAHGTRPDLTDQPLPDADHTWYTDGSSFLQEGQRKAGAAVTTETEVVWAKALPAGTSAQRAELIALTQALKMAEGKKLNVYTDSRYAFATAHIHGEIYRRRGWLTSEGKEIKNKDEILALLKALFLPKRLSIIHCPGHQKGNRAEARGNRMADQAAREVATRETPETSTLLAGKRTADGSEFEKRTADGSEFESPKKKAKVE

SEQ ID NO: 6777 - protein, 2113 aa, synthetic construct
MPAAKRVKLDGGDKKYSIGLDIGTNSVGWAVITDEYKVPSKKFKVLGNTDRHSIKKNLIGALLFDSGETAEATRLKRTARRRYTRRKNRICYLQEIFSNEMAKVDDSFFHRLEESFLVEEDKKHERHPIFGNIVDEVAYHEKYPTIYHLRKKLVDSTDKADLRLIYLALAHMIKFRGHFLIEGDLNPDNSDVDKLFIQLVQTYNQLFEENPINASGVDAKAILSARLSKSRRLENLIAQLPGEKKNGLFGNLIALSLGLTPNFKSNFDLAEDAKLQLSKDTYDDDLDNLLAQIGDQYADLFLAAKNLSDAILLSDILRVNTEITKAPLSASMIKRYDEHHQDLTLLKALVRQQLPEKYKEIFFDQSKNGYAGYIDGGASQEEFYKFIKPILEKMDGTEELLVKLNREDLLRKQRTFDNGSIPHQIHLGELHAILRRQEDFYPFLKDNREKIEKILTFRIPYYVGPLARGNSRFAWMTRKSEETITPWNFEEVVDKGASAQSFIERMTNFDKNLPNEKVLPKHSLLYEYFTVYNELTKVKYVTEGMRKPAFLSGEQKKAIVDLLFKTNRKVTVKQLKEDYFKKIECFDSVEISGVEDRFNASLGTYHDLLKIIKDKDFLDNEENEDILEDIVLTLTLFEDREMIEERLKTYAHLFDDKVMKQLKRRRYTGWGRLSRKLINGIRDKQSGKTILDFLKSDGFANRNFMQLIHDDSLTFKEDIQKAQVSGQGDSLHEHIANLAGSPAIKKGILQTVKVVDELVKVMGRHKPENIVIEMARENQTTQKGQKNSRERMKRIEEGIKELGSQILKEHPVENTQLQNEKLYLYYLQNGRDMYVDQELDINRLSDYDVDHIVPQSFLKDDSIDNKVLTRSDKARGKSDNVPSEEVVKKMKNYWRQLLNAKLITQRKFDNLTKAERGGLSELDKAGFIKRQLVETRQITKHVAQILDSRMNTKYDENDKLIREVKVITLKSKLVSDFRKDFQFYKVREINNYHHAHDAYLNAVVGTALIKKYPKLESEFVYGDYKVYDVRKMIAKSEQEIGKATAKYFFYSNIMNFFKTEITLANGEIRKRPLIETNGETGEIVWDKGRDFATVRKVLSMPQVNIVKKTEVQTGGFSKESILPKRNSDKLIARKKDWDPKKYGGFDSPTVAYSVLVVAKVEKGKSKKLKSVKELLGITIMERSSFEKNPIDFLEAKGYKEVKKDLIIKLPKYSLFELENGRKRMLASAGELQKGNELALPSKYVNFLYLASHYEKLKGSPEDNEQKQLFVEQHKHYLDEIIEQISEFSKRVILADANLDKVLSAYNKHRDKPIREQAENIIHLFTLTNLGAPAAFKYFDTTIDRKRYTSTKEVLDATLIHQSITGLYETRIDLSQLGGDGGEAAAKPAPGGTLNIEDEYRLHETSKEPDVSLGSTWLSDFPQAWAETGGMGLAVRQAPLIIPLKATSTPVSIKQYPMSQEARLGIKPHIQRLLDQGILVPCQSPWNTPLLPVKKPGTNDYRPVQDLREVNKRVEDIHPTVPNPYNLLSGLPPSHQWYTVLDLKDAFFCLRLHPTSQPLFAFEWRDPEMGISGQLTWTRLPQGFKNSPTLFNEALHRDLADFRIQHPDLILLQYVDDLLLAATSELDCQQGTRALLQTLGNLGYRASAKKAQICQKQVKYLGYLLKEGQRWLTEARKETVMGQPTPKTPRQLREFLGKAGFCRLFIPGFAEMAAPLYPLTKPGTLFNWGPDQQKAYQEIKQALLTAPALGLPDLTKPFELFVDEKQGYAKGVLTQKLGPWRRPVAYLSKKLDPVAAGWPPCLRMVAAIAVLTKDAGKLTMGQPLVILAPHAVEALVKQPPDRWLSNARMTHYQALLLDTDRVQFGPVVALNPATLLPLPEEGLQHNCLDILAEAHGTRPDLTDQPLPDADHTWYTDGSSLLQEGQRKAGAAVTTETEVIWAKALPAGTSAQRAELIALTQALKMAEGKKLNVYTDSRYAFATAHIHGEIYRRRGWLTSEGKEIKNKDEILALLKALFLPKRLSIIHCPGHQKGHSAEARGNRMADQAARKAAITETPDTSTLLIENSSPSGGSKRTADGSEFEAGKRTADGSEFEKRTADGSEFESPKKKAKVE

SEQ ID NO: 6778 - protein, 2113 aa, synthetic construct; identical to SEQ ID NO: 6777

SEQ ID NO: 6779 - protein, 2021 aa, synthetic construct
MPAAKRVKLDGGDKKYSIGLDIGTNSVGWAVITDEYKVPSKKFKVLGNTDRHSIKKNLIGALLFDSGETAEATRLKRTARRRYTRRKNRICYLQEIFSNEMAKVDDSFFHRLEESFLVEEDKKHERHPIFGNIVDEVAYHEKYPTIYHLRKKLVDSTDKADLRLIYLALAHMIKFRGHFLIEGDLNPDNSDVDKLFIQLVQTYNQLFEENPINASGVDAKAILSARLSKSRRLENLIAQLPGEKKNGLFGNLIALSLGLTPNFKSNFDLAEDAKLQLSKDTYDDDLDNLLAQIGDQYADLFLAAKNLSDAILLSDILRVNTEITKAPLSASMIKRYDEHHQDLTLLKALVRQQLPEKYKEIFFDQSKNGYAGYIDGGASQEEFYKFIKPILEKMDGTEELLVKLNREDLLRKQRTFDNGSIPHQIHLGELHAILRRQEDFYPFLKDNREKIEKILTFRIPYYVGPLARGNSRFAWMTRKSEETITPWNFEEVVDKGASAQSFIERMTNFDKNLPNEKVLPKHSLLYEYFTVYNELTKVKYVTEGMRKPAFLSGEQKKAIVDLLFKTNRKVTVKQLKEDYFKKIECFDSVEISGVEDRFNASLGTYHDLLKIIKDKDFLDNEENEDILEDIVLTLTLFEDREMIEERLKTYAHLFDDKVMKQLKRRRYTGWGRLSRKLINGIRDKQSGKTILDFLKSDGFANRNFMQLIHDDSLTFKEDIQKAQVSGQGDSLHEHIANLAGSPAIKKGILQTVKVVDELVKVMGRHKPENIVIEMARENQTTQKGQKNSRERMKRIEEGIKELGSQILKEHPVENTQLQNEKLYLYYLQNGRDMYVDQELDINRLSDYDVDHIVPQSFLKDDSIDNKVLTRSDKARGKSDNVPSEEVVKKMKNYWRQLLNAKLITQRKFDNLTKAERGGLSELDKAGFIKRQLVETRQITKHVAQILDSRMNTKYDENDKLIREVKVITLKSKLVSDFRKDFQFYKVREINNYHHAHDAYLNAVVGTALIKKYPKLESEFVYGDYKVYDVRKMIAKSEQEIGKATAKYFFYSNIMNFFKTEITLANGEIRKRPLIETNGETGEIVWDKGRDFATVRKVLSMPQVNIVKKTEVQTGGFSKESILPKRNSDKLIARKKDWDPKKYGGFDSPTVAYSVLVVAKVEKGKSKKLKSVKELLGITIMERSSFEKNPIDFLEAKGYKEVKKDLIIKLPKYSLFELENGRKRMLASAGELQKGNELALPSKYVNFLYLASHYEKLKGSPEDNEQKQLFVEQHKHYLDEIIEQISEFSKRVILADANLDKVLSAYNKHRDKPIREQAENIIHLFTLTNLGAPAAFKYFDTTIDRKRYTSTKEVLDATLIHQSITGLYETRIDLSQLGGDGGEAAAKPAPGGGRDIMKDIKVRLMTDSPDDSQDLMIGAIESNLFADQISWKSDQPVWLNQWPLKQEKLQALQQLVTEQLQLGHLEESNSPWNTPVFVIKKKSGKWRLLQDLRAVNATMHDMGALQPGLPSPVAVPKGWEIIIIDLQDCFFNIKLHPEDCKRFAFSVPSPNFKRPYQRFQWKVLPQGMKNSPTLCQKFVDKAILTVRDKYQDSYIVHYMDDILLAHPSRSIVDEILTSMIQALNKHGLVVSTEKIQKYDNLKYLGTHIQGDSVSYQKLQIRTDKLRTLNDFQKLLGNINWIRPFLKLTTGELKPLFEILNGDSNPISTRKLTPEACKALQLMNERLSTARVKRLDLSQPWSLCILKTEYTPTACLWQDGVVEWIHLPHISPKVITPYDIFCTQLIIKGRHRSKELFSKDPDYIVVPYTKVQFDLLLQEKEDWPISLLGFLGEVHFHLPKDPLLTFTLQTAIIFPHMTSTTPLEKGIVIFTDGSANGRSVTYIQGREPIIKENTQNTAQQAEIVAVITAFEEVSQPFNLYTDSKYVTGLFPEIETATLSPRTKIYTELKHLQRLIHKRQEKFYIGHIRGHTGLPGPLAQGNAYADSLTRILTAGKRTADGSEFEKRTADGSEFESPKKKAKVE

SEQ ID NO: 6780 - protein, 2084 aa, synthetic construct
MPAAKRVKLDGGDKKYSIGLDIGTNSVGWAVITDEYKVPSKKFKVLGNTDRHSIKKNLIGALLFDSGETAEATRLKRTARRRYTRRKNRICYLQEIFSNEMAKVDDSFFHRLEESFLVEEDKKHERHPIFGNIVDEVAYHEKYPTIYHLRKKLVDSTDKADLRLIYLALAHMIKFRGHFLIEGDLNPDNSDVDKLFIQLVQTYNQLFEENPINASGVDAKAILSARLSKSRRLENLIAQLPGEKKNGLFGNLIALSLGLTPNFKSNFDLAEDAKLQLSKDTYDDDLDNLLAQIGDQYADLFLAAKNLSDAILLSDILRVNTEITKAPLSASMIKRYDEHHQDLTLLKALVRQQLPEKYKEIFFDQSKNGYAGYIDGGASQEEFYKFIKPILEKMDGTEELLVKLNREDLLRKQRTFDNGSIPHQIHLGELHAILRRQEDFYPFLKDNREKIEKILTFRIPYYVGPLARGNSRFAWMTRKSEETITPWNFEEVVDKGASAQSFIERMTNFDKNLPNEKVLPKHSLLYEYFTVYNELTKVKYVTEGMRKPAFLSGEQKKAIVDLLFKTNRKVTVKQLKEDYFKKIECFDSVEISGVEDRFNASLGTYHDLLKIIKDKDFLDNEENEDILEDIVLTLTLFEDREMIEERLKTYAHLFDDKVMKQLKRRRYTGWGRLSRKLINGIRDKQSGKTILDFLKSDGFANRNFMQLIHDDSLTFKEDIQKAQVSGQGDSLHEHIANLAGSPAIKKGILQTVKVVDELVKVMGRHKPENIVIEMARENQTTQKGQKNSRERMKRIEEGIKELGSQILKEHPVENTQLQNEKLYLYYLQNGRDMYVDQELDINRLSDYDVDHIVPQSFLKDDSIDNKVLTRSDKARGKSDNVPSEEVVKKMKNYWRQLLNAKLITQRKFDNLTKAERGGLSELDKAGFIKRQLVETRQITKHVAQILDSRMNTKYDENDKLIREVKVITLKSKLVSDFRKDFQFYKVREINNYHHAHDAYLNAVVGTALIKKYPKLESEFVYGDYKVYDVRKMIAKSEQEIGKATAKYFFYSNIMNFFKTEITLANGEIRKRPLIETNGETGEIVWDKGRDFATVRKVLSMPQVNIVKKTEVQTGGFSKESILPKRNSDKLIARKKDWDPKKYGGFDSPTVAYSVLVVAKVEKGKSKKLKSVKELLGITIMERSSFEKNPIDFLEAKGYKEVKKDLIIKLPKYSLFELENGRKRMLASAGELQKGNELALPSKYVNFLYLASHYEKLKGSPEDNEQKQLFVEQHKHYLDEIIEQISEFSKRVILADANLDKVLSAYNKHRDKPIREQAENIIHLFTLTNLGAPAAFKYFDTTIDRKRYTSTKEVLDATLIHQSITGLYETRIDLSQLGGDGGEAAAKPAPGGIPWLMKKPLQLTTLVPLQEYEERLLKQTMLTGSYKEKLQSLFLKYDALWQHWENQVGHRRIKPHHIATGTVNPRPQKQYPINPKAKASIQTVINDLLKQGVLIQQNSIMNTPVYPVPKPDGKWRMVLDYREVNKTIPLIAAQNQHSAGILSSIFRGKYKTTLDLSNGFWAHSITPESYWLTAFTWLGQQYCWTRLPQGFLNSPALFNADVVDLLKEVPNVQVYVDDIYISHDDPREHLEQLEKVFSLLLNAGYVVSLKKSEIAQHEVEFLGFNITKEGRGLTETFKQKLLNITPPRDLKQLQSILGKLNFARNFIPNFSELVKPLYNIIATAPGKYITWTTDNSQQLQNIISMLNSAENLEERNPEVRLIMKVNTSPSAGYIRFYNEFAKRPIMYLNYVYTKAEVKFTNTEKLLTTIHKGLIKALDLGMGQEILVYSPIVSMTKIQKTPLPERKALPIRWITWMSYLEDPRIQFHYDKTLPELQQVPTVTDDIIAKIKHPSEFSMVFYTDGSAIKHPNVNKSHNAGMGIAQVQFKPEFTVINTWSIPLGDHTAQLAEVAAVEFACKKALKIDGPVLIVTDSFYVAESVNKELPYWQSNGFFNNKKKPLKHVSKWKSIADCIQLKPDIIIIHEKGHQPTASTFHTEGNNLADKLATQGSYVVNAGKRTADGSEFEKRTADGSEFESPKKKAKVE

SEQ ID NO: 6781 - protein, 2173 aa, synthetic construct
MPAAKRVKLDGGDKKYSIGLDIGTNSVGWAVITDEYKVPSKKFKVLGNTDRHSIKKNLIGALLFDSGETAEATRLKRTARRRYTRRKNRICYLQEIFSNEMAKVDDSFFHRLEESFLVEEDKKHERHPIFGNIVDEVAYHEKYPTIYHLRKKLVDSTDKADLRLIYLALAHMIKFRGHFLIEGDLNPDNSDVDKLFIQLVQTYNQLFEENPINASGVDAKAILSARLSKSRRLENLIAQLPGEKKNGLFGNLIALSLGLTPNFKSNFDLAEDAKLQLSKDTYDDDLDNLLAQIGDQYADLFLAAKNLSDAILLSDILRVNTEITKAPLSASMIKRYDEHHQDLTLLKALVRQQLPEKYKEIFFDQSKNGYAGYIDGGASQEEFYKFIKPILEKMDGTEELLVKLNREDLLRKQRTFDNGSIPHQIHLGELHAILRRQEDFYPFLKDNREKIEKILTFRIPYYVGPLARGNSRFAWMTRKSEETITPWNFEEVVDKGASAQSFIERMTNFDKNLPNEKVLPKHSLLYEYFTVYNELTKVKYVTEGMRKPAFLSGEQKKAIVDLLFKTNRKVTVKQLKEDYFKKIECFDSVEISGVEDRFNASLGTYHDLLKIIKDKDFLDNEENEDILEDIVLTLTLFEDREMIEERLKTYAHLFDDKVMKQLKRRRYTGWGRLSRKLINGIRDKQSGKTILDFLKSDGFANRNFMQLIHDDSLTFKEDIQKAQVSGQGDSLHEHIANLAGSPAIKKGILQTVKVVDELVKVMGRHKPENIVIEMARENQTTQKGQKNSRERMKRIEEGIKELGSQILKEHPVENTQLQNEKLYLYYLQNGRDMYVDQELDINRLSDYDVDHIVPQSFLKDDSIDNKVLTRSDKARGKSDNVPSEEVVKKMKNYWRQLLNAKLITQRKFDNLTKAERGGLSELDKAGFIKRQLVETRQITKHVAQILDSRMNTKYDENDKLIREVKVITLKSKLVSDFRKDFQFYKVREINNYHHAHDAYLNAVVGTALIKKYPKLESEFVYGDYKVYDVRKMIAKSEQEIGKATAKYFFYSNIMNFFKTEITLANGEIRKRPLIETNGETGEIVWDKGRDFATVRKVLSMPQVNIVKKTEVQTGGFSKESILPKRNSDKLIARKKDWDPKKYGGFDSPTVAYSVLVVAKVEKGKSKKLKSVKELLGITIMERSSFEKNPIDFLEAKGYKEVKKDLIIKLPKYSLFELENGRKRMLASAGELQKGNELALPSKYVNFLYLASHYEKLKGSPEDNEQKQLFVEQHKHYLDEIIEQISEFSKRVILADANLDKVLSAYNKHRDKPIREQAENIIHLFTLTNLGAPAAFKYFDTTIDRKRYTSTKEVLDATLIHQSITGLYETRIDLSQLGGDGGEAAAKPAPGGMDPLQLLQPLEAEIKGTKLKAHWNSGATITCVPQAFLEEEVPIKNIWIKTIHGEKEQPVYYLTFKIQGRKVEAEVISSPYDYILVSPSDIPWLMKKPLQLTTLVPLQEYEERLLKQTMLTGSYKEKLQSLFLKYDALWQHWENQVGHRRIKPHHIATGTVNPRPQKQYPINPKAKASIQTVINDLLKQGVLIQQNSIMNTPVYPVPKPDGKWRMVLDYREVNKTIPLIAAQNQHSAGILSSIFRGKYKTTLDLSNGFWAHSITPESYWLTAFTWLGQQYCWTRLPQGFLNSPALFNADVVDLLKEVPNVQVYVDDIYISHDDPREHLEQLEKVFSLLLNAGYVVSLKKSEIAQHEVEFLGFNITKEGRGLTETFKQKLLNITPPRDLKQLQSILGKLNFARNFIPNFSELVKPLYNIIATAPGKYITWTTDNSQQLQNIISMLNSAENLEERNPEVRLIMKVNTSPSAGYIRFYNEFAKRPIMYLNYVYTKAEVKFTNTEKLLTTIHKGLIKALDLGMGQEILVYSPIVSMTKIQKTPLPERKALPIRWITWMSYLEDPRIQFHYDKTLPELQQVPTVTDDIIAKIKHPSEFSMVFYTDGSAIKHPNVNKSHNAGMGIAQVQFKPEFTVINTWSIPLGDHTAQLAEVAAVEFACKKALKIDGPVLIVTDSFYVAESVNKELPYWQSNGFFNNKKKPLKHVSKWKSIADCIQLKPDIIIIHEKGHQPTASTFHTEGNNLADKLATQGSYVVNAGKRTADGSEFEKRTADGSEFESPKKKAKVE

SEQ ID NO: 6782 - protein, 2091 aa, synthetic construct
MPAAKRVKLDGGDKKYSIGLDIGTNSVGWAVITDEYKVPSKKFKVLGNTDRHSIKKNLIGALLFDSGETAEATRLKRTARRRYTRRKNRICYLQEIFSNEMAKVDDSFFHRLEESFLVEEDKKHERHPIFGNIVDEVAYHEKYPTIYHLRKKLVDSTDKADLRLIYLALAHMIKFRGHFLIEGDLNPDNSDVDKLFIQLVQTYNQLFEENPINASGVDAKAILSARLSKSRRLENLIAQLPGEKKNGLFGNLIALSLGLTPNFKSNFDLAEDAKLQLSKDTYDDDLDNLLAQIGDQYADLFLAAKNLSDAILLSDILRVNTEITKAPLSASMIKRYDEHHQDLTLLKALVRQQLPEKYKEIFFDQSKNGYAGYIDGGASQEEFYKFIKPILEKMDGTEELLVKLNREDLLRKQRTFDNGSIPHQIHLGELHAILRRQEDFYPFLKDNREKIEKILTFRIPYYVGPLARGNSRFAWMTRKSEETITPWNFEEVVDKGASAQSFIERMTNFDKNLPNEKVLPKHSLLYEYFTVYNELTKVKYVTEGMRKPAFLSGEQKKAIVDLLFKTNRKVTVKQLKEDYFKKIECFDSVEISGVEDRFNASLGTYHDLLKIIKDKDFLDNEENEDILEDIVLTLTLFEDREMIEERLKTYAHLFDDKVMKQLKRRRYTGWGRLSRKLINGIRDKQSGKTILDFLKSDGFANRNFMQLIHDDSLTFKEDIQKAQVSGQGDSLHEHIANLAGSPAIKKGILQTVKVVDELVKVMGRHKPENIVIEMARENQTTQKGQKNSRERMKRIEEGIKELGSQILKEHPVENTQLQNEKLYLYYLQNGRDMYVDQELDINRLSDYDVDHIVPQSFLKDDSIDNKVLTRSDKARGKSDNVPSEEVVKKMKNYWRQLLNAKLITQRKFDNLTKAERGGLSELDKAGFIKRQLVETRQITKHVAQILDSRMNTKYDENDKLIREVKVITLKSKLVSDFRKDFQFYKVREINNYHHAHDAYLNAVVGTALIKKYPKLESEFVYGDYKVYDVRKMIAKSEQEIGKATAKYFFYSNIMNFFKTEITLANGEIRKRPLIETNGETGEIVWDKGRDFATVRKVLSMPQVNIVKKTEVQTGGFSKESILPKRNSDKLIARKKDWDPKKYGGFDSPTVAYSVLVVAKVEKGKSKKLKSVKELLGITIMERSSFEKNPIDFLEAKGYKEVKKDLIIKLPKYSLFELENGRKRMLASAGELQKGNELALPSKYVNFLYLASHYEKLKGSPEDNEQKQLFVEQHKHYLDEIIEQISEFSKRVILADANLDKVLSAYNKHRDKPIREQAENIIHLFTLTNLGAPAAFKYFDTTIDRKRYTSTKEVLDATLIHQSITGLYETRIDLSQLGGDGGEAAAKPAPGGVLNLEEEYRLHEKPVPSSIDPSWLQLFPTVWAERAGMGLANQVPPVVVELRSGASPVAVRQYPMSKEAREGIRPHIQRFLDLGVLVPCQSPWNTPLLPVKKPGTNDYRPVQDLREINKRVQDIHPTVPNPYNLLSSLPPSHTWYSVLDLKDAFFCLKLHPNSQPLFAFEWRDPEKGNTGQLTWTRLPQGFKNSPTLFNEALHRDLAPFRALNPQVVLLQYVDDLLVAAPTYRDCKEGTQKLLQELSKLGYRVSAKKAQLCQKEVTYLGYLLKEGKRWLTPARKATVMKIPPPTTPRQVREFLGTAGFCRLWIPGFASLAAPLYPLTKPSIPFIWTEEHQKAFDRIKEALLSAPALALPDLTKPFTLYVDERAGVARGVLTQTLGPWRRPVAYLSKKLDPVASGWPTCLKAVAAVALLLKDADKLTLGQNVTVIASHSLESIVRQPPDRWMTNARMTHYQSLLLNERVSFAPPAVLNPATLLPVESEATPVHRCSEILAEETGTRRDLKDQPLPGVPAWYTDGSSFIAEGKRRAGAAIVDGKRTVWASSLPEGTSAQKAELVALTQALRLAEGKDINIYTDSRYAFATAHIHGAIYKQRGWLTSAGKDIKNKEEILALLEAIHLPKRVAIIHCPGHQKGNDPVATGNRRADEAAKQAALSTRVLAETTKPAGKRTADGSEFEKRTADGSEFESPKKKAKVE

SEQ ID NO: 6783 - protein, 2091 aa, synthetic construct; identical to SEQ ID NO: 4515

SEQ ID NO: 6784 - protein, 2095 aa, synthetic construct
MPAAKRVKLDGGDKKYSIGLDIGTNSVGWAVITDEYKVPSKKFKVLGNTDRHSIKKNLIGALLFDSGETAEATRLKRTARRRYTRRKNRICYLQEIFSNEMAKVDDSFFHRLEESFLVEEDKKHERHPIFGNIVDEVAYHEKYPTIYHLRKKLVDSTDKADLRLIYLALAHMIKFRGHFLIEGDLNPDNSDVDKLFIQLVQTYNQLFEENPINASGVDAKAILSARLSKSRRLENLIAQLPGEKKNGLFGNLIALSLGLTPNFKSNFDLAEDAKLQLSKDTYDDDLDNLLAQIGDQYADLFLAAKNLSDAILLSDILRVNTEITKAPLSASMIKRYDEHHQDLTLLKALVRQQLPEKYKEIFFDQSKNGYAGYIDGGASQEEFYKFIKPILEKMDGTEELLVKLNREDLLRKQRTFDNGSIPHQIHLGELHAILRRQEDFYPFLKDNREKIEKILTFRIPYYVGPLARGNSRFAWMTRKSEETITPWNFEEVVDKGASAQSFIERMTNFDKNLPNEKVLPKHSLLYEYFTVYNELTKVKYVTEGMRKPAFLSGEQKKAIVDLLFKTNRKVTVKQLKEDYFKKIECFDSVEISGVEDRFNASLGTYHDLLKIIKDKDFLDNEENEDILEDIVLTLTLFEDREMIEERLKTYAHLFDDKVMKQLKRRRYTGWGRLSRKLINGIRDKQSGKTILDFLKSDGFANRNFMQLIHDDSLTFKEDIQKAQVSGQGDSLHEHIANLAGSPAIKKGILQTVKVVDELVKVMGRHKPENIVIEMARENQTTQKGQKNSRERMKRIEEGIKELGSQILKEHPVENTQLQNEKLYLYYLQNGRDMYVDQELDINRLSDYDVDHIVPQSFLKDDSIDNKVLTRSDKARGKSDNVPSEEVVKKMKNYWRQLLNAKLITQRKFDNLTKAERGGLSELDKAGFIKRQLVETRQITKHVAQILDSRMNTKYDENDKLIREVKVITLKSKLVSDFRKDFQFYKVREINNYHHAHDAYLNAVVGTALIKKYPKLESEFVYGDYKVYDVRKMIAKSEQEIGKATAKYFFYSNIMNFFKTEITLANGEIRKRPLIETNGETGEIVWDKGRDFATVRKVLSMPQVNIVKKTEVQTGGFSKESILPKRNSDKLIARKKDWDPKKYGGFDSPTVAYSVLVVAKVEKGKSKKLKSVKELLGITIMERSSFEKNPIDFLEAKGYKEVKKDLIIKLPKYSLFELENGRKRMLASAGELQKGNELALPSKYVNFLYLASHYEKLKGSPEDNEQKQLFVEQHKHYLDEIIEQISEFSKRVILADANLDKVLSAYNKHRDKPIREQAENIIHLFTLTNLGAPAAFKYFDTTIDRKRYTSTKEVLDATLIHQSITGLYETRIDLSQLGGDGGPAPEAAAKGGTAPLEEEYRLFLEAPIQNVTLLEQWKREIPKVWAEINPPGLASTQAPIHVQLLSTALPVRVRQYPITLEAKRSLRETIRKFRAAGILRPVHSPWNTPLLPVRKSGTSEYRMVQDLREVNKRVETIHPTVPNPYTLLSLLPPDRIWYSVLDLKDAFFCIPLAPESQLIFAFEWADAEEGESGQLTWTRLPQGFKNSPTLFNEALNRDLQGFRLDHPSVSLLQYVDDLLIAADTQAACLSATRDLLMTLAELGYRVSGKKAQLCQEEVTYLGFKIHKGSRSLSNSRTQAILQIPVPKTKRQVREFLGTIGYCRLWIPGFAELAQPLYAATRPGNDPLVWGEKEEEAFQSLKLALTQPPALALPSLDKPFQLFVEETSGAAKGVLTQALGPWKRPVAYLSKRLDPVAAGWPRCLRAIAAAALLTREASKLTFGQDIEITSSHNLESLLRSPPDKWLTNARITQYQVLLLDPPRVRFKQTAALNPATLLPETDDTLPIHHCLDTLDSLTSTRPDLTDQPLAQAEATLFTDGSSYIRDGKRYAGAAVVTLDSVIWAEPLPIGTSAQKAELIALTKALEWSKDKSVNIYTDSRYAFATLHVHGMIYRERGWLTAGGKAIKNAPEILALLTAVWLPKRVAVMHCKGHQKDDAPTSTGNRRADEVAREVAIRPLSTQATISAGKRTADGSEFEKRTADGSEFESPKKKAKVE

SEQ ID NO: 6785 - protein, 2092 aa, synthetic construct
MPAAKRVKLDGGDKKYSIGLDIGTNSVGWAVITDEYKVPSKKFKVLGNTDRHSIKKNLIGALLFDSGETAEATRLKRTARRRYTRRKNRICYLQEIFSNEMAKVDDSFFHRLEESFLVEEDKKHERHPIFGNIVDEVAYHEKYPTIYHLRKKLVDSTDKADLRLIYLALAHMIKFRGHFLIEGDLNPDNSDVDKLFIQLVQTYNQLFEENPINASGVDAKAILSARLSKSRRLENLIAQLPGEKKNGLFGNLIALSLGLTPNFKSNFDLAEDAKLQLSKDTYDDDLDNLLAQIGDQYADLFLAAKNLSDAILLSDILRVNTEITKAPLSASMIKRYDEHHQDLTLLKALVRQQLPEKYKEIFFDQSKNGYAGYIDGGASQEEFYKFIKPILEKMDGTEELLVKLNREDLLRKQRTFDNGSIPHQIHLGELHAILRRQEDFYPFLKDNREKIEKILTFRIPYYVGPLARGNSRFAWMTRKSEETITPWNFEEVVDKGASAQSFIERMTNFDKNLPNEKVLPKHSLLYEYFTVYNELTKVKYVTEGMRKPAFLSGEQKKAIVDLLFKTNRKVTVKQLKEDYFKKIECFDSVEISGVEDRFNASLGTYHDLLKIIKDKDFLDNEENEDILEDIVLTLTLFEDREMIEERLKTYAHLFDDKVMKQLKRRRYTGWGRLSRKLINGIRDKQSGKTILDFLKSDGFANRNFMQLIHDDSLTFKEDIQKAQVSGQGDSLHEHIANLAGSPAIKKGILQTVKVVDELVKVMGRHKPENIVIEMARENQTTQKGQKNSRERMKRIEEGIKELGSQILKEHPVENTQLQNEKLYLYYLQNGRDMYVDQELDINRLSDYDVDHIVPQSFLKDDSIDNKVLTRSDKARGKSDNVPSEEVVKKMKNYWRQLLNAKLITQRKFDNLTKAERGGLSELDKAGFIKRQLVETRQITKHVAQILDSRMNTKYDENDKLIREVKVITLKSKLVSDFRKDFQFYKVREINNYHHAHDAYLNAVVGTALIKKYPKLESEFVYGDYKVYDVRKMIAKSEQEIGKATAKYFFYSNIMNFFKTEITLANGEIRKRPLIETNGETGEIVWDKGRDFATVRKVLSMPQVNIVKKTEVQTGGFSKESILPKRNSDKLIARKKDWDPKKYGGFDSPTVAYSVLVVAKVEKGKSKKLKSVKELLGITIMERSSFEKNPIDFLEAKGYKEVKKDLIIKLPKYSLFELENGRKRMLASAGELQKGNELALPSKYVNFLYLASHYEKLKGSPEDNEQKQLFVEQHKHYLDEIIEQISEFSKRVILADANLDKVLSAYNKHRDKPIREQAENIIHLFTLTNLGAPAAFKYFDTTIDRKRYTSTKEVLDATLIHQSITGLYETRIDLSQLGGDGGPAPEAAAKGGTLQLEEEYRLFEPESTQKQEMDIWLKNFPQAWAETGGMGTAHCQAPVLIQLKATATPISIRQYPMPHEAYQGIKPHIRRMLDQGILKPCQSPWNTPLLPVKKPGTEDYRPVQDLREVNKRVEDIHPTVPNPYNLLSTLPPSHPWYTVLDLKDAFFCLRLHSESQLLFAFEWRDPEIGLSGQLTWTRLPQGFKNSPTLFNEALHSDLADFRVRYPALVLLQYVDDLLLAAATRTECLEGTKALLETLGNKGYRASAKKAQICLQEVTYLGYSLKDGQRWLTKARKEAILSIPVPKNSRQVREFLGTAGYCRLWIPGFAELAAPLYPLTRPGTLFQWGTEQQLAFEDIKKALLSSPALGLPDITKPFELFIDENSGFAKGVLVQKLGPWKRPVAYLSKKLDTVASGWPPCLRMVAAIAILVKDAGKLTLGQPLTILTSHPVEALVRQPPNKWLSNARMTHYQAMLLDAERVHFGPTVSLNPATLLPLPSGGNHHDCLQILAETHGTRPDLTDQPLPDADLTWYTDGSSFIRNGEREAGAAVTTESEVIWAAPLPPGTSAQRAELIALTQALKMAEGKKLTVYTDSRYAFATTHVHGEIYRRRGWLTSEGKEIKNKNEILALLEALFLPKRLSIIHCPGHQKGDSPQAKGNRLADDTAKKAATETHSSLTVLPAGKRTADGSEFEKRTADGSEFESPKKKAKVE

SEQ ID NO: 6786 - protein, 2124 aa, synthetic construct
MPAAKRVKLDGGDKKYSIGLDIGTNSVGWAVITDEYKVPSKKFKVLGNTDRHSIKKNLIGALLFDSGETAEATRLKRTARRRYTRRKNRICYLQEIFSNEMAKVDDSFFHRLEESFLVEEDKKHERHPIFGNIVDEVAYHEKYPTIYHLRKKLVDSTDKADLRLIYLALAHMIKFRGHFLIEGDLNPDNSDVDKLFIQLVQTYNQLFEENPINASGVDAKAILSARLSKSRRLENLIAQLPGEKKNGLFGNLIALSLGLTPNFKSNFDLAEDAKLQLSKDTYDDDLDNLLAQIGDQYADLFLAAKNLSDAILLSDILRVNTEITKAPLSASMIKRYDEHHQDLTLLKALVRQQLPEKYKEIFFDQSKNGYAGYIDGGASQEEFYKFIKPILEKMDGTEELLVKLNREDLLRKQRTFDNGSIPHQIHLGELHAILRRQEDFYPFLKDNREKIEKILTFRIPYYVGPLARGNSRFAWMTRKSEETITPWNFEEVVDKGASAQSFIERMTNFDKNLPNEKVLPKHSLLYEYFTVYNELTKVKYVTEGMRKPAFLSGEQKKAIVDLLFKTNRKVTVKQLKEDYFKKIECFDSVEISGVEDRFNASLGTYHDLLKIIKDKDFLDNEENEDILEDIVLTLTLFEDREMIEERLKTYAHLFDDKVMKQLKRRRYTGWGRLSRKLINGIRDKQSGKTILDFLKSDGFANRNFMQLIHDDSLTFKEDIQKAQVSGQGDSLHEHIANLAGSPAIKKGILQTVKVVDELVKVMGRHKPENIVIEMARENQTTQKGQKNSRERMKRIEEGIKELGSQILKEHPVENTQLQNEKLYLYYLQNGRDMYVDQELDINRLSDYDVDHIVPQSFLKDDSIDNKVLTRSDKARGKSDNVPSEEVVKKMKNYWRQLLNAKLITQRKFDNLTKAERGGLSELDKAGFIKRQLVETRQITKHVAQILDSRMNTKYDENDKLIREVKVITLKSKLVSDFRKDFQFYKVREINNYHHAHDAYLNAVVGTALIKKYPKLESEFVYGDYKVYDVRKMIAKSEQEIGKATAKYFFYSNIMNFFKTEITLANGEIRKRPLIETNGETGEIVWDKGRDFATVRKVLSMPQVNIVKKTEVQTGGFSKESILPKRNSDKLIARKKDWDPKKYGGFDSPTVAYSVLVVAKVEKGKSKKLKSVKELLGITIMERSSFEKNPIDFLEAKGYKEVKKDLIIKLPKYSLFELENGRKRMLASAGELQKGNELALPSKYVNFLYLASHYEKLKGSPEDNEQKQLFVEQHKHYLDEIIEQISEFSKRVILADANLDKVLSAYNKHRDKPIREQAENIIHLFTLTNLGAPAAFKYFDTTIDRKRYTSTKEVLDATLIHQSITGLYETRIDLSQLGGDGGPAPEAAAKGGLLGRDLLTKLKAQIQFSTEGPQVTWEDRPAMCLVLNLEEEYRLHEKPVPPSIDPSWLQLFPMVWAEKAGMGLANQVPPVVVELKSDASPVAVRQYPMSKEAREGIRPHIQRFLDLGILVPCQSPWNTPLLPVKKPGTNDYRPVQDLREVNKRVQDIHPTVPNPYNLLSSLPPSHTWYSVLDLKDAFFCLKLHPNSQPLFAFEWRDPEKGNTGQLTWTRLPQGFKNSPTLFNEALHRDLASFRALNPQVVMLQYVDDLLVAAPTYRDCKEGTRRLLQELSKLGYRVSAKKAQLCREEVTYLGYLLKGGKRWLTPARKATVMKIPTPTTPRQVREFLGTAGFCRLWIPGFASLAAPLYPLTRPKVPFTWTEAHQEAFGRIKEALLSAPALALPDLTKPFALYVDEKEGVARGVLTQTLGPWRRPVAYLSKKLDPVASGWPTCLKAIAAVALLLKDADKLTLGQNVLVIAPHNLESIVRQPPDRWMTNARMTHYQSLLLNERVSFAPPAILNPATLLPVESDDTPIHICSEILAEETGTRPDLRDQPLPGVPAWYTDGSSFIMDGRRQAGAAIVDNKRTVWASNLPEGTSAQKAELIALTQALRLAEGKSINIYTDSRYAFATAHVHGAIYKQRGWLTSAGKDIKNKEEILALLEAIHLPKRVAIIHCPGHQRGTDPVATGNRKADEAAKQAAQSTRILTETTKNAGKRTADGSEFEKRTADGSEFESPKKKAKVE

SEQ ID NO: 6787 - protein, 2215 aa, synthetic construct
MPAAKRVKLDGGDKKYSIGLDIGTNSVGWAVITDEYKVPSKKFKVLGNTDRHSIKKNLIGALLFDSGETAEATRLKRTARRRYTRRKNRICYLQEIFSNEMAKVDDSFFHRLEESFLVEEDKKHERHPIFGNIVDEVAYHEKYPTIYHLRKKLVDSTDKADLRLIYLALAHMIKFRGHFLIEGDLNPDNSDVDKLFIQLVQTYNQLFEENPINASGVDAKAILSARLSKSRRLENLIAQLPGEKKNGLFGNLIALSLGLTPNFKSNFDLAEDAKLQLSKDTYDDDLDNLLAQIGDQYADLFLAAKNLSDAILLSDILRVNTEITKAPLSASMIKRYDEHHQDLTLLKALVRQQLPEKYKEIFFDQSKNGYAGYIDGGASQEEFYKFIKPILEKMDGTEELLVKLNREDLLRKQRTFDNGSIPHQIHLGELHAILRRQEDFYPFLKDNREKIEKILTFRIPYYVGPLARGNSRFAWMTRKSEETITPWNFEEVVDKGASAQSFIERMTNFDKNLPNEKVLPKHSLLYEYFTVYNELTKVKYVTEGMRKPAFLSGEQKKAIVDLLFKTNRKVTVKQLKEDYFKKIECFDSVEISGVEDRFNASLGTYHDLLKIIKDKDFLDNEENEDILEDIVLTLTLFEDREMIEERLKTYAHLFDDKVMKQLKRRRYTGWGRLSRKLINGIRDKQSGKTILDFLKSDGFANRNFMQLIHDDSLTFKEDIQKAQVSGQGDSLHEHIANLAGSPAIKKGILQTVKVVDELVKVMGRHKPENIVIEMARENQTTQKGQKNSRERMKRIEEGIKELGSQILKEHPVENTQLQNEKLYLYYLQNGRDMYVDQELDINRLSDYDVDHIVPQSFLKDDSIDNKVLTRSDKARGKSDNVPSEEVVKKMKNYWRQLLNAKLITQRKFDNLTKAERGGLSELDKAGFIKRQLVETRQITKHVAQILDSRMNTKYDENDKLIREVKVITLKSKLVSDFRKDFQFYKVREINNYHHAHDAYLNAVVGTALIKKYPKLESEFVYGDYKVYDVRKMIAKSEQEIGKATAKYFFYSNIMNFFKTEITLANGEIRKRPLIETNGETGEIVWDKGRDFATVRKVLSMPQVNIVKKTEVQTGGFSKESILPKRNSDKLIARKKDWDPKKYGGFDSPTVAYSVLVVAKVEKGKSKKLKSVKELLGITIMERSSFEKNPIDFLEAKGYKEVKKDLIIKLPKYSLFELENGRKRMLASAGELQKGNELALPSKYVNFLYLASHYEKLKGSPEDNEQKQLFVEQHKHYLDEIIEQISEFSKRVILADANLDKVLSAYNKHRDKPIREQAENIIHLFTLTNLGAPAAFKYFDTTIDRKRYTSTKEVLDATLIHQSITGLYETRIDLSQLGGDGGPAPEAAAKGGTLGDQGSRGSDPLPEPRVTLTVEGIPTEFLVNTGAEHSVLTKPMGKMGSKRTVVAGATGSKVYPWTTKRLLKIGQKQVTHSFLVIPECPAPLLGRDLLTKLKAQIQFSTEGPQVTWEDRPAMCLVLNLEEEYRLHEKPVPPSIDPSWLQLFPMVWAEKAGMGLANQVPPVVVELKSDASPVAVRQYPMSKEAREGIRPHIQRFLDLGILVPCQSPWNTPLLPVKKPGTNDYRPVQDLREVNKRVQDIHPTVPNPYNLLSSLPPSHTWYSVLDLKDAFFCLKLHPNSQPLFAFEWRDPEKGNTGQLTWTRLPQGFKNSPTLFNEALHRDLASFRALNPQVVMLQYVDDLLVAAPTYRDCKEGTRRLLQELSKLGYRVSAKKAQLCREEVTYLGYLLKGGKRWLTPARKATVMKIPTPTTPRQVREFLGKAGFCRLFIPGFASLAAPLYPLTRPKVPFTWTEAHQEAFGRIKEALLSAPALALPDLTKPFALYVDEKEGVARGVLTQTLGPWRRPVAYLSKKLDPVASGWPTCLKAIAAVALLLKDADKLTLGQNVLVIAPHNLESIVRQPPDRWMTNARMTHYQSLLLNERVSFAPPAILNPATLLPVESDDTPIHICSEILAEETGTRPDLRDQPLPGVPAWYTDGSSFIMDGRRQAGAAIVDNKRTVWASNLPEGTSAQKAELIALTQALRLAEGKSINIYTDSRYAFATAHVHGAIYKQRGWLTSAGKDIKNKEEILALLEAIHLPKRVAIIHCPGHQRGTDPVATGNRKADEAAKQAAQSTRILTETTKNAGKRTADGSEFEKRTADGSEFESPKKKAKVE

SEQ ID NO: 6788 - protein, 2093 aa, synthetic construct; identical to SEQ ID NO: 4516

SEQ ID NO: 6789 - protein, 2093 aa, synthetic construct
MPAAKRVKLDGGDKKYSIGLDIGTNSVGWAVITDEYKVPSKKFKVLGNTDRHSIKKNLIGALLFDSGETAEATRLKRTARRRYTRRKNRICYLQEIFSNEMAKVDDSFFHRLEESFLVEEDKKHERHPIFGNIVDEVAYHEKYPTIYHLRKKLVDSTDKADLRLIYLALAHMIKFRGHFLIEGDLNPDNSDVDKLFIQLVQTYNQLFEENPINASGVDAKAILSARLSKSRRLENLIAQLPGEKKNGLFGNLIALSLGLTPNFKSNFDLAEDAKLQLSKDTYDDDLDNLLAQIGDQYADLFLAAKNLSDAILLSDILRVNTEITKAPLSASMIKRYDEHHQDLTLLKALVRQQLPEKYKEIFFDQSKNGYAGYIDGGASQEEFYKFIKPILEKMDGTEELLVKLNREDLLRKQRTFDNGSIPHQIHLGELHAILRRQEDFYPFLKDNREKIEKILTFRIPYYVGPLARGNSRFAWMTRKSEETITPWNFEEVVDKGASAQSFIERMTNFDKNLPNEKVLPKHSLLYEYFTVYNELTKVKYVTEGMRKPAFLSGEQKKAIVDLLFKTNRKVTVKQLKEDYFKKIECFDSVEISGVEDRFNASLGTYHDLLKIIKDKDFLDNEENEDILEDIVLTLTLFEDREMIEERLKTYAHLFDDKVMKQLKRRRYTGWGRLSRKLINGIRDKQSGKTILDFLKSDGFANRNFMQLIHDDSLTFKEDIQKAQVSGQGDSLHEHIANLAGSPAIKKGILQTVKVVDELVKVMGRHKPENIVIEMARENQTTQKGQKNSRERMKRIEEGIKELGSQILKEHPVENTQLQNEKLYLYYLQNGRDMYVDQELDINRLSDYDVDHIVPQSFLKDDSIDNKVLTRSDKARGKSDNVPSEEVVKKMKNYWRQLLNAKLITQRKFDNLTKAERGGLSELDKAGFIKRQLVETRQITKHVAQILDSRMNTKYDENDKLIREVKVITLKSKLVSDFRKDFQFYKVREINNYHHAHDAYLNAVVGTALIKKYPKLESEFVYGDYKVYDVRKMIAKSEQEIGKATAKYFFYSNIMNFFKTEITLANGEIRKRPLIETNGETGEIVWDKGRDFATVRKVLSMPQVNIVKKTEVQTGGFSKESILPKRNSDKLIARKKDWDPKKYGGFDSPTVAYSVLVVAKVEKGKSKKLKSVKELLGITIMERSSFEKNPIDFLEAKGYKEVKKDLIIKLPKYSLFELENGRKRMLASAGELQKGNELALPSKYVNFLYLASHYEKLKGSPEDNEQKQLFVEQHKHYLDEIIEQISEFSKRVILADANLDKVLSAYNKHRDKPIREQAENIIHLFTLTNLGAPAAFKYFDTTIDRKRYTSTKEVLDATLIHQSITGLYETRIDLSQLGGDGGPAPEAAAKGGTLNIEDEYRLHETSKEPDVSLGSTWLSDFPQAWAETGGMGLAVRQAPLIIPLKATSTPVSIKQYPMSQEARLGIKPHIQRLLDQGILVPCQSPWNTPLLPVKKPGTNDYRPVQDLREVNKRVEDIHPTVPNPYNLLSGLPPSHQWYTVLDLKDAFFCLRLHPTSQPLFAFEWRDPEMGISGQLTWTRLPQGFKNSPTLFNEALHRDLAGFRIQHPDLILLQYVDDLLLAATSELDCQQGTRALLQTLGDLGYRASAKKAQICQKQVKYLGYLLKEGQRWLTEARKETVMGQPIPKTPRQLREFLGTAGFCRLWIPGFAEMAAPLYPLTKPGTLFNWGPDQQKAFQEIKQALLTAPALGLPDLTKPFELFVDEKQGYAKGVLTQKLGPWRRPVAYLSKKLDPVAAGWPPCLRMVAAIAVLTKDAGKLTMGQPLVILAPHAVEALVKQPPDRWLSNARMTHYQALLLDTDRVQFGPVVALNPATLLPLPEEGLQHDCLDILAEAHGTRSDLMDQPLPDADHTWYTDGSSFLQEGQRKAGAAVTTETEVIWARALPAGTSAQRAELIALTQALKMAEGKKLNVYTDSRYAFATAHIHGEIYRRRGWLTSEGKEIKNKDEILALLKALFLPKRLSIIHCPGHQKGNSAEARGNRMADQAAREVATRETPETSTLLAGKRTADGSEFEKRTADGSEFESPKKKAKVE

SEQ ID NO: 6790 - protein, 2113 aa, synthetic construct
MPAAKRVKLDGGDKKYSIGLDIGTNSVGWAVITDEYKVPSKKFKVLGNTDRHSIKKNLIGALLFDSGETAEATRLKRTARRRYTRRKNRICYLQEIFSNEMAKVDDSFFHRLEESFLVEEDKKHERHPIFGNIVDEVAYHEKYPTIYHLRKKLVDSTDKADLRLIYLALAHMIKFRGHFLIEGDLNPDNSDVDKLFIQLVQTYNQLFEENPINASGVDAKAILSARLSKSRRLENLIAQLPGEKKNGLFGNLIALSLGLTPNFKSNFDLAEDAKLQLSKDTYDDDLDNLLAQIGDQYADLFLAAKNLSDAILLSDILRVNTEITKAPLSASMIKRYDEHHQDLTLLKALVRQQLPEKYKEIFFDQSKNGYAGYIDGGASQEEFYKFIKPILEKMDGTEELLVKLNREDLLRKQRTFDNGSIPHQIHLGELHAILRRQEDFYPFLKDNREKIEKILTFRIPYYVGPLARGNSRFAWMTRKSEETITPWNFEEVVDKGASAQSFIERMTNFDKNLPNEKVLPKHSLLYEYFTVYNELTKVKYVTEGMRKPAFLSGEQKKAIVDLLFKTNRKVTVKQLKEDYFKKIECFDSVEISGVEDRFNASLGTYHDLLKIIKDKDFLDNEENEDILEDIVLTLTLFEDREMIEERLKTYAHLFDDKVMKQLKRRRYTGWGRLSRKLINGIRDKQSGKTILDFLKSDGFANRNFMQLIHDDSLTFKEDIQKAQVSGQGDSLHEHIANLAGSPAIKKGILQTVKVVDELVKVMGRHKPENIVIEMARENQTTQKGQKNSRERMKRIEEGIKELGSQILKEHPVENTQLQNEKLYLYYLQNGRDMYVDQELDINRLSDYDVDHIVPQSFLKDDSIDNKVLTRSDKARGKSDNVPSEEVVKKMKNYWRQLLNAKLITQRKFDNLTKAERGGLSELDKAGFIKRQLVETRQITKHVAQILDSRMNTKYDENDKLIREVKVITLKSKLVSDFRKDFQFYKVREINNYHHAHDAYLNAVVGTALIKKYPKLESEFVYGDYKVYDVRKMIAKSEQEIGKATAKYFFYSNIMNFFKTEITLANGEIRKRPLIETNGETGEIVWDKGRDFATVRKVLSMPQVNIVKKTEVQTGGFSKESILPKRNSDKLIARKKDWDPKKYGGFDSPTVAYSVLVVAKVEKGKSKKLKSVKELLGITIMERSSFEKNPIDFLEAKGYKEVKKDLIIKLPKYSLFELENGRKRMLASAGELQKGNELALPSKYVNFLYLASHYEKLKGSPEDNEQKQLFVEQHKHYLDEIIEQISEFSKRVILADANLDKVLSAYNKHRDKPIREQAENIIHLFTLTNLGAPAAFKYFDTTIDRKRYTSTKEVLDATLIHQSITGLYETRIDLSQLGGDGGPAPEAAAKGGVQEISDSRPMLHIYLNGRRFLGLLDTGADKTCIAGRDWPANWPIHQTESSLQGLGMACGVARSSQPLRWQHEDKSGIIHPFVIPTLPFTLWGRDIMKDIKVRLMTDSPDDSQDLMIGAIESNLFADQISWKSDQPVWLNQWPLKQEKLQALQQLVTEQLQLGHLEESNSPWNTPVFVIKKKSGKWRLLQDLRAVNATMHDMGALQPGLPSPVAVPKGWEIIIIDLQDCFFNIKLHPEDCKRFAFSVPSPNFKRPYQRFQWKVLPQGMKNSPTLCQKFVDKAILTVRDKYQDSYIVHYMDDILLAHPSRSIVDEILTSMIQALNKHGLVVSTEKIQKYDNLKYLGTHIQGDSVSYQKLQIRTDKLRTLNDFQKLLGNINWIRPFLKLTTGELKPLFEILNPDSNPISTRKLTPEACKALQLMNERLSTARVKRLDLSQPWSLCILKTEYTPTACLWQDGVVEWIHLPHISPKVITPYDIFCTQLIIKGRHRSKELFSKDPDYIVVPYTKVQFDLLLQEKEDWPISLLGFLGEVHFHLPKDPLLTFTLQTAIIFPHMTSTTPLEKGIVIFTDGSANGRSVTYIQGREPIIKENTQNTAQQAEIVAVITAFEEVSQPFNLYTDSKYVTGLFPEIETATLSPRTKIYTELKHLQRLIHKRQEKFYIGHIRGHTGLPGPLAQGNAYADSLTRILTAAGKRTADGSEFEKRTADGSEFESPKKKAKVE

SEQ ID NO: 6791 - protein, 2085 aa, synthetic construct
MPAAKRVKLDGGDKKYSIGLDIGTNSVGWAVITDEYKVPSKKFKVLGNTDRHSIKKNLIGALLFDSGETAEATRLKRTARRRYTRRKNRICYLQEIFSNEMAKVDDSFFHRLEESFLVEEDKKHERHPIFGNIVDEVAYHEKYPTIYHLRKKLVDSTDKADLRLIYLALAHMIKFRGHFLIEGDLNPDNSDVDKLFIQLVQTYNQLFEENPINASGVDAKAILSARLSKSRRLENLIAQLPGEKKNGLFGNLIALSLGLTPNFKSNFDLAEDAKLQLSKDTYDDDLDNLLAQIGDQYADLFLAAKNLSDAILLSDILRVNTEITKAPLSASMIKRYDEHHQDLTLLKALVRQQLPEKYKEIFFDQSKNGYAGYIDGGASQEEFYKFIKPILEKMDGTEELLVKLNREDLLRKQRTFDNGSIPHQIHLGELHAILRRQEDFYPFLKDNREKIEKILTFRIPYYVGPLARGNSRFAWMTRKSEETITPWNFEEVVDKGASAQSFIERMTNFDKNLPNEKVLPKHSLLYEYFTVYNELTKVKYVTEGMRKPAFLSGEQKKAIVDLLFKTNRKVTVKQLKEDYFKKIECFDSVEISGVEDRFNASLGTYHDLLKIIKDKDFLDNEENEDILEDIVLTLTLFEDREMIEERLKTYAHLFDDKVMKQLKRRRYTGWGRLSRKLINGIRDKQSGKTILDFLKSDGFANRNFMQLIHDDSLTFKEDIQKAQVSGQGDSLHEHIANLAGSPAIKKGILQTVKVVDELVKVMGRHKPENIVIEMARENQTTQKGQKNSRERMKRIEEGIKELGSQILKEHPVENTQLQNEKLYLYYLQNGRDMYVDQELDINRLSDYDVDHIVPQSFLKDDSIDNKVLTRSDKARGKSDNVPSEEVVKKMKNYWRQLLNAKLITQRKFDNLTKAERGGLSELDKAGFIKRQLVETRQITKHVAQILDSRMNTKYDENDKLIREVKVITLKSKLVSDFRKDFQFYKVREINNYHHAHDAYLNAVVGTALIKKYPKLESEFVYGDYKVYDVRKMIAKSEQEIGKATAKYFFYSNIMNFFKTEITLANGEIRKRPLIETNGETGEIVWDKGRDFATVRKVLSMPQVNIVKKTEVQTGGFSKESILPKRNSDKLIARKKDWDPKKYGGFDSPTVAYSVLVVAKVEKGKSKKLKSVKELLGITIMERSSFEKNPIDFLEAKGYKEVKKDLIIKLPKYSLFELENGRKRMLASAGELQKGNELALPSKYVNFLYLASHYEKLKGSPEDNEQKQLFVEQHKHYLDEIIEQISEFSKRVILADANLDKVLSAYNKHRDKPIREQAENIIHLFTLTNLGAPAAFKYFDTTIDRKRYTSTKEVLDATLIHQSITGLYETRIDLSQLGGDGGPAPEAAAKGGLDDEYRLYSPLVKPDQNIQFWLEQFPQAWAETAGMGLAKQVPPQVIQLKASATPVSVRQYPLSKEAQEGIRPHVQRLIQQGILVPVQSPWNTPLLPVRKPGTNDYRPVQDLREVNKRVQDIHPTVPNPYNLLCALPPQRSWYTVLDLKDAFFCLRLHPTSQPLFAFEWRDPGTGRTGQLTWTRLPQGFKNSPTIFNEALHRDLANFRIQHPQVTLLQYVDDLLLAGATKQDCLEGTKALLLELSDLGYRASAKKAQICRREVTYLGYSLRDGQRWLTEARKKTVVQIPAPTTAKQVREFLGKAGFCRLFIPGFATLAAPLYPLTKPKGEFSWAPEHQKAFDAIKKALLSAPALALPDVTKPFTLYVDERKGVARGVLTQTLGPWRRPVAYLSKKLDPVASGWPVCLKAIAAVAILVKDADKLTLGQNITVIAPHALENIVRQPPDRWMTNARMTHYQSLLLTERVTFAPPAALNPATLLPEETDEPVTHDCHQLLIEETGVRKDLTDIPLTGEVLTWFTDGSSYVVEGKRMAGAAVVDGTRTIWASSLPEGTSAQKAELMALTQALRLAEGKSINIYTDSRYAFATAHVHGAIYKQRGWLTSAGREIKNKEEILSLLEALHLPKRLAIIHCPGHQKAKDPISRGNQMADRVAKQAAQGVNLLPAGKRTADGSEFEKRTADGSEFESPKKKAKVE

SEQ ID NO: 6792 - protein, 2087 aa, synthetic construct
MPAAKRVKLDGGDKKYSIGLDIGTNSVGWAVITDEYKVPSKKFKVLGNTDRHSIKKNLIGALLFDSGETAEATRLKRTARRRYTRRKNRICYLQEIFSNEMAKVDDSFFHRLEESFLVEEDKKHERHPIFGNIVDEVAYHEKYPTIYHLRKKLVDSTDKADLRLIYLALAHMIKFRGHFLIEGDLNPDNSDVDKLFIQLVQTYNQLFEENPINASGVDAKAILSARLSKSRRLENLIAQLPGEKKNGLFGNLIALSLGLTPNFKSNFDLAEDAKLQLSKDTYDDDLDNLLAQIGDQYADLFLAAKNLSDAILLSDILRVNTEITKAPLSASMIKRYDEHHQDLTLLKALVRQQLPEKYKEIFFDQSKNGYAGYIDGGASQEEFYKFIKPILEKMDGTEELLVKLNREDLLRKQRTFDNGSIPHQIHLGELHAILRRQEDFYPFLKDNREKIEKILTFRIPYYVGPLARGNSRFAWMTRKSEETITPWNFEEVVDKGASAQSFIERMTNFDKNLPNEKVLPKHSLLYEYFTVYNELTKVKYVTEGMRKPAFLSGEQKKAIVDLLFKTNRKVTVKQLKEDYFKKIECFDSVEISGVEDRFNASLGTYHDLLKIIKDKDFLDNEENEDILEDIVLTLTLFEDREMIEERLKTYAHLFDDKVMKQLKRRRYTGWGRLSRKLINGIRDKQSGKTILDFLKSDGFANRNFMQLIHDDSLTFKEDIQKAQVSGQGDSLHEHIANLAGSPAIKKGILQTVKVVDELVKVMGRHKPENIVIEMARENQTTQKGQKNSRERMKRIEEGIKELGSQILKEHPVENTQLQNEKLYLYYLQNGRDMYVDQELDINRLSDYDVDHIVPQSFLKDDSIDNKVLTRSDKARGKSDNVPSEEVVKKMKNYWRQLLNAKLITQRKFDNLTKAERGGLSELDKAGFIKRQLVETRQITKHVAQILDSRMNTKYDENDKLIREVKVITLKSKLVSDFRKDFQFYKVREINNYHHAHDAYLNAVVGTALIKKYPKLESEFVYGDYKVYDVRKMIAKSEQEIGKATAKYFFYSNIMNFFKTEITLANGEIRKRPLIETNGETGEIVWDKGRDFATVRKVLSMPQVNIVKKTEVQTGGFSKESILPKRNSDKLIARKKDWDPKKYGGFDSPTVAYSVLVVAKVEKGKSKKLKSVKELLGITIMERSSFEKNPIDFLEAKGYKEVKKDLIIKLPKYSLFELENGRKRMLASAGELQKGNELALPSKYVNFLYLASHYEKLKGSPEDNEQKQLFVEQHKHYLDEIIEQISEFSKRVILADANLDKVLSAYNKHRDKPIREQAENIIHLFTLTNLGAPAAFKYFDTTIDRKRYTSTKEVLDATLIHQSITGLYETRIDLSQLGGDGGPAPEAAAKGGTLQLDDEYRLYSPLVKPDQNIQFWLEQFPQAWAETAGMGLAKQVPPQVIQLKASATPVSVRQYPLSKEAQEGIRPHVQRLIQQGILVPVQSPWNTPLLPVRKPGTNDYRPVQDLREVNKRVQDIHPTVPNPYNLLCALPPQRSWYTVLDLKDAFFCLRLHPTSQPLFAFEWRDPGTGRTGQLTWTRLPQGFKNSPTIFDEALHRDLANFRIQHPQVTLLQYVDDLLLAGATKQDCLEGTKALLLELSDLGYRASAKKAQICRREVTYLGYSLRDGQRWLTEARKKTVVQIPAPTTAKQVREFLGTAGFCRLWIPGFATLAAPLYPLTKEKGEFSWAPEHQKAFDAIKKALLSAPALALPDVTKPFTLYVDERKGVARGVLTQTLGPWRRPVAYLSKKLDPVASGWPVCLKAIAAVAILVKDADKLTLGQNITVIAPHALENIVRQPPDRWMTNARMTHYQSLLLTERVTFAPPAALNPATLLPEETDEPVTHDCHQLLIEETGVRKDLTDIPLTGEVLTWFTDGSSYVVEGKRMAGAAVVDGTRTIWASSLPEGTSAQKAELMALTQALRLAEGKSINIYTDSRYAFATAHVHGAIYKQRGLLTSAGREIKNKEEILSLLEALHLPKRLAIIHCPGHQKAKDPISRGNQMADRVAKQAAQGVNLLAGKRTADGSEFEKRTADGSEFESPKKKAKVE

SEQ ID NO: 6793 - protein, 2085 aa, synthetic construct; identical to SEQ ID NO: 6791

SEQ ID NO: 6794 - protein, 2087 aa, synthetic construct; identical to SEQ ID NO: 6792

SEQ ID NO: 6795 - protein, 2091 aa, synthetic construct
MPAAKRVKLDGGDKKYSIGLDIGTNSVGWAVITDEYKVPSKKFKVLGNTDRHSIKKNLIGALLFDSGETAEATRLKRTARRRYTRRKNRICYLQEIFSNEMAKVDDSFFHRLEESFLVEEDKKHERHPIFGNIVDEVAYHEKYPTIYHLRKKLVDSTDKADLRLIYLALAHMIKFRGHFLIEGDLNPDNSDVDKLFIQLVQTYNQLFEENPINASGVDAKAILSARLSKSRRLENLIAQLPGEKKNGLFGNLIALSLGLTPNFKSNFDLAEDAKLQLSKDTYDDDLDNLLAQIGDQYADLFLAAKNLSDAILLSDILRVNTEITKAPLSASMIKRYDEHHQDLTLLKALVRQQLPEKYKEIFFDQSKNGYAGYIDGGASQEEFYKFIKPILEKMDGTEELLVKLNREDLLRKQRTFDNGSIPHQIHLGELHAILRRQEDFYPFLKDNREKIEKILTFRIPYYVGPLARGNSRFAWMTRKSEETITPWNFEEVVDKGASAQSFIERMTNFDKNLPNEKVLPKHSLLYEYFTVYNELTKVKYVTEGMRKPAFLSGEQKKAIVDLLFKTNRKVTVKQLKEDYFKKIECFDSVEISGVEDRFNASLGTYHDLLKIIKDKDFLDNEENEDILEDIVLTLTLFEDREMIEERLKTYAHLFDDKVMKQLKRRRYTGWGRLSRKLINGIRDKQSGKTILDFLKSDGFANRNFMQLIHDDSLTFKEDIQKAQVSGQGDSLHEHIANLAGSPAIKKGILQTVKVVDELVKVMGRHKPENIVIEMARENQTTQKGQKNSRERMKRIEEGIKELGSQILKEHPVENTQLQNEKLYLYYLQNGRDMYVDQELDINRLSDYDVDHIVPQSFLKDDSIDNKVLTRSDKARGKSDNVPSEEVVKKMKNYWRQLLNAKLITQRKFDNLTKAERGGLSELDKAGFIKRQLVETRQITKHVAQILDSRMNTKYDENDKLIREVKVITLKSKLVSDFRKDFQFYKVREINNYHHAHDAYLNAVVGTALIKKYPKLESEFVYGDYKVYDVRKMIAKSEQEIGKATAKYFFYSNIMNFFKTEITLANGEIRKRPLIETNGETGEIVWDKGRDFATVRKVLSMPQVNIVKKTEVQTGGFSKESILPKRNSDKLIARKKDWDPKKYGGFDSPTVAYSVLVVAKVEKGKSKKLKSVKELLGITIMERSSFEKNPIDFLEAKGYKEVKKDLIIKLPKYSLFELENGRKRMLASAGELQKGNELALPSKYVNFLYLASHYEKLKGSPEDNEQKQLFVEQHKHYLDEIIEQISEFSKRVILADANLDKVLSAYNKHRDKPIREQAENIIHLFTLTNLGAPAAFKYFDTTIDRKRYTSTKEVLDATLIHQSITGLYETRIDLSQLGGDGGPAPEAAAKGGVLNLEEEYRLHEKPVPSSIDPSWLQLFPTVWAERAGMGLANQVPPVVVELRSGASPVAVRQYPMSKEAREGIRPHIQRFLDLGVLVPCQSPWNTPLLPVKKPGTNDYRPVQDLREINKRVQDIHPTVPNPYNLLSSLPPSHTWYSVLDLKDAFFCLKLHPNSQPLFAFEWRDPEKGNTGQLTWTRLPQGFKNSPTLFDEALHRDLAPFRALNPQVVLLQYVDDLLVAAPTYRDCKEGTQKLLQELSKLGYRVSAKKAQLCQKEVTYLGYLLKEGKRWLTPARKATVMKIPPPTTPRQVREFLGTAGFCRLWIPGFASLAAPLYPLTKESIPFIWTEEHQKAFDRIKEALLSAPALALPDLTKPFTLYVDERAGVARGVLTQTLGPWRRPVAYLSKKLDPVASGWPTCLKAVAAVALLLKDADKLTLGQNVTVIASHSLESIVRQPPDRWMTNARMTHYQSLLLNERVSFAPPAVLNPATLLPVESEATPVHRCSEILAEETGTRRDLKDQPLPGVPAWYTDGSSFIAEGKRRAGAAIVDGKRTVWASSLPEGTSAQKAELVALTQALRLAEGKDINIYTDSRYAFATAHIHGAIYKQRGLLTSAGKDIKNKEEILALLEAIHLPKRVAIIHCPGHQKGNDPVATGNRRADEAAKQAALSTRVLAETTKPAGKRTADGSEFEKRTADGSEFESPKKKAKVE

SEQ ID NO: 6796 - protein, 2093 aa, synthetic construct
MPAAKRVKLDGGDKKYSIGLDIGTNSVGWAVITDEYKVPSKKFKVLGNTDRHSIKKNLIGALLFDSGETAEATRLKRTARRRYTRRKNRICYLQEIFSNEMAKVDDSFFHRLEESFLVEEDKKHERHPIFGNIVDEVAYHEKYPTIYHLRKKLVDSTDKADLRLIYLALAHMIKFRGHFLIEGDLNPDNSDVDKLFIQLVQTYNQLFEENPINASGVDAKAILSARLSKSRRLENLIAQLPGEKKNGLFGNLIALSLGLTPNFKSNFDLAEDAKLQLSKDTYDDDLDNLLAQIGDQYADLFLAAKNLSDAILLSDILRVNTEITKAPLSASMIKRYDEHHQDLTLLKALVRQQLPEKYKEIFFDQSKNGYAGYIDGGASQEEFYKFIKPILEKMDGTEELLVKLNREDLLRKQRTFDNGSIPHQIHLGELHAILRRQEDFYPFLKDNREKIEKILTFRIPYYVGPLARGNSRFAWMTRKSEETITPWNFEEVVDKGASAQSFIERMTNFDKNLPNEKVLPKHSLLYEYFTVYNELTKVKYVTEGMRKPAFLSGEQKKAIVDLLFKTNRKVTVKQLKEDYFKKIECFDSVEISGVEDRFNASLGTYHDLLKIIKDKDFLDNEENEDILEDIVLTLTLFEDREMIEERLKTYAHLFDDKVMKQLKRRRYTGWGRLSRKLINGIRDKQSGKTILDFLKSDGFANRNFMQLIHDDSLTFKEDIQKAQVSGQGDSLHEHIANLAGSPAIKKGILQTVKVVDELVKVMGRHKPENIVIEMARENQTTQKGQKNSRERMKRIEEGIKELGSQILKEHPVENTQLQNEKLYLYYLQNGRDMYVDQELDINRLSDYDVDHIVPQSFLKDDSIDNKVLTRSDKARGKSDNVPSEEVVKKMKNYWRQLLNAKLITQRKFDNLTKAERGGLSELDKAGFIKRQLVETRQITKHVAQILDSRMNTKYDENDKLIREVKVITLKSKLVSDFRKDFQFYKVREINNYHHAHDAYLNAVVGTALIKKYPKLESEFVYGDYKVYDVRKMIAKSEQEIGKATAKYFFYSNIMNFFKTEITLANGEIRKRPLIETNGETGEIVWDKGRDFATVRKVLSMPQVNIVKKTEVQTGGFSKESILPKRNSDKLIARKKDWDPKKYGGFDSPTVAYSVLVVAKVEKGKSKKLKSVKELLGITIMERSSFEKNPIDFLEAKGYKEVKKDLIIKLPKYSLFELENGRKRMLASAGELQKGNELALPSKYVNFLYLASHYEKLKGSPEDNEQKQLFVEQHKHYLDEIIEQISEFSKRVILADANLDKVLSAYNKHRDKPIREQAENIIHLFTLTNLGAPAAFKYFDTTIDRKRYTSTKEVLDATLIHQSITGLYETRIDLSQLGGDGGPAPEAAAKGGTLNIEDEYRLHETSKEPDVPLGSTWLSDFPQAWAETGGMGLAVRQAPLIIPLKATSTPVSIKQYPMSQEARLGIKPHIQRLLDQGILVPCQSPWNTPLLPVKKPGTNDYRPVQDLREVNKRVEDIHPTVPNPYNLLSGLPPSHQWYTVLDLKDAFFCLRLHPTSQPLFAFEWRDPEMGISGQLTWTRLPQGFKNSPTLFNEALHRDLADFRIQHPDLILLQYVDDLLLAATSEQDCQRGTRALLQTLGNLGYRASAKKAQICQKQVKYLGYLLKEGQRWLTEARKETVMGQPTPKTPRQLREFLGTAGFCRLWIPGFAEMAAPLYPLTKPGTLFNWGPDQQKAYQEIKQALLTAPALGLPDLTKPFELFVDEKQGYAKGVLTQKLGPWRRPVAYLSKKLDPVAAGWPPCLRMVAAIAVLTKDAGKLTMGQPLVILAPHAVEALVKQPPDRWLSNARMTHYQAMLLDTDRVQFGPVVALNPATLLPLPEKEAPHDCLEILAETHGTRPDLTDQPIPDADYTWYTDGSSFLQEGQRRAGAAVTTETEVIWARALPAGTSAQRAELIALTQALKMAEGKKLNVYTDSRYAFATAHVHGEIYRRRGWLTSEGREIKNKNEILALLKALFLPKRLSIIHCPGHQKGNSAEARGNRMADQAAREAAMKAVLETSTLLAGKRTADGSEFEKRTADGSEFESPKKKAKVE

SEQ ID NO: 6797 - protein, 2093 aa, synthetic construct
MPAAKRVKLDGGDKKYSIGLDIGTNSVGWAVITDEYKVPSKKFKVLGNTDRHSIKKNLIGALLFDSGETAEATRLKRTARRRYTRRKNRICYLQEIFSNEMAKVDDSFFHRLEESFLVEEDKKHERHPIFGNIVDEVAYHEKYPTIYHLRKKLVDSTDKADLRLIYLALAHMIKFRGHFLIEGDLNPDNSDVDKLFIQLVQTYNQLFEENPINASGVDAKAILSARLSKSRRLENLIAQLPGEKKNGLFGNLIALSLGLTPNFKSNFDLAEDAKLQLSKDTYDDDLDNLLAQIGDQYADLFLAAKNLSDAILLSDILRVNTEITKAPLSASMIKRYDEHHQDLTLLKALVRQQLPEKYKEIFFDQSKNGYAGYIDGGASQEEFYKFIKPILEKMDGTEELLVKLNREDLLRKQRTFDNGSIPHQIHLGELHAILRRQEDFYPFLKDNREKIEKILTFRIPYYVGPLARGNSRFAWMTRKSEETITPWNFEEVVDKGASAQSFIERMTNFDKNLPNEKVLPKHSLLYEYFTVYNELTKVKYVTEGMRKPAFLSGEQKKAIVDLLFKTNRKVTVKQLKEDYFKKIECFDSVEISGVEDRFNASLGTYHDLLKIIKDKDFLDNEENEDILEDIVLTLTLFEDREMIEERLKTYAHLFDDKVMKQLKRRRYTGWGRLSRKLINGIRDKQSGKTILDFLKSDGFANRNFMQLIHDDSLTFKEDIQKAQVSGQGDSLHEHIANLAGSPAIKKGILQTVKVVDELVKVMGRHKPENIVIEMARENQTTQKGQKNSRERMKRIEEGIKELGSQILKEHPVENTQLQNEKLYLYYLQNGRDMYVDQELDINRLSDYDVDHIVPQSFLKDDSIDNKVLTRSDKARGKSDNVPSEEVVKKMKNYWRQLLNAKLITQRKFDNLTKAERGGLSELDKAGFIKRQLVETRQITKHVAQILDSRMNTKYDENDKLIREVKVITLKSKLVSDFRKDFQFYKVREINNYHHAHDAYLNAVVGTALIKKYPKLESEFVYGDYKVYDVRKMIAKSEQEIGKATAKYFFYSNIMNFFKTEITLANGEIRKRPLIETNGETGEIVWDKGRDFATVRKVLSMPQVNIVKKTEVQTGGFSKESILPKRNSDKLIARKKDWDPKKYGGFDSPTVAYSVLVVAKVEKGKSKKLKSVKELLGITIMERSSFEKNPIDFLEAKGYKEVKKDLIIKLPKYSLFELENGRKRMLASAGELQKGNELALPSKYVNFLYLASHYEKLKGSPEDNEQKQLFVEQHKHYLDEIIEQISEFSKRVILADANLDKVLSAYNKHRDKPIREQAENIIHLFTLTNLGAPAAFKYFDTTIDRKRYTSTKEVLDATLIHQSITGLYETRIDLSQLGGDGGPAPEAAAKGGTLNIEDEYRLHETSKEPDVPLGSTWLSDFPQAWAETGGMGLAVRQAPLIIPLKATSTPVSIKQYPMSQEARLGIKPHIQRLLDQGILVPCQSPWNTPLLPVKKPGTNDYRPVQDLREVNKRVEDIHPTVPNPYNLLSGLPPSHQWYTVLDLKDAFFCLRLHPTSQPLFAFEWRDPEMGISGQLTWTRLPQGFKNSPTLFNEALHRDLADFRIQHPDLILLQYVDDLLLAATSEQDCQRGTRALLQTLGNLGYRASAKKAQICQKQVKYLGYLLKEGQRWLTEARKETVMGQPTPKTPRQLREFLGKAGFCRLFIPGFAEMAAPLYPLTKPGTLFNWGPDQQKAYQEIKQALLTAPALGLPDLTKPFELFVDEKQGYAKGVLTQKLGPWRRPVAYLSKKLDPVAAGWPPCLRMVAAIAVLTKDAGKLTMGQPLVILAPHAVEALVKQPPDRWLSNARMTHYQAMLLDTDRVQFGPVVALNPATLLPLPEKEAPHDCLEILAETHGTRPDLTDQPIPDADYTWYTDGSSFLQEGQRRAGAAVTTETEVIWARALPAGTSAQRAELIALTQALKMAEGKKLNVYTDSRYAFATAHVHGEIYRRRGWLTSEGREIKNKNEILALLKALFLPKRLSIIHCPGHQKGNSAEARGNRMADQAAREAAMKAVLETSTLLAGKRTADGSEFEKRTADGSEFESPKKKAKVE

SEQ ID NO: 6798 - protein, 2096 aa, synthetic construct
MPAAKRVKLDGGDKKYSIGLDIGTNSVGWAVITDEYKVPSKKFKVLGNTDRHSIKKNLIGALLFDSGETAEATRLKRTARRRYTRRKNRICYLQEIFSNEMAKVDDSFFHRLEESFLVEEDKKHERHPIFGNIVDEVAYHEKYPTIYHLRKKLVDSTDKADLRLIYLALAHMIKFRGHFLIEGDLNPDNSDVDKLFIQLVQTYNQLFEENPINASGVDAKAILSARLSKSRRLENLIAQLPGEKKNGLFGNLIALSLGLTPNFKSNFDLAEDAKLQLSKDTYDDDLDNLLAQIGDQYADLFLAAKNLSDAILLSDILRVNTEITKAPLSASMIKRYDEHHQDLTLLKALVRQQLPEKYKEIFFDQSKNGYAGYIDGGASQEEFYKFIKPILEKMDGTEELLVKLNREDLLRKQRTFDNGSIPHQIHLGELHAILRRQEDFYPFLKDNREKIEKILTFRIPYYVGPLARGNSRFAWMTRKSEETITPWNFEEVVDKGASAQSFIERMTNFDKNLPNEKVLPKHSLLYEYFTVYNELTKVKYVTEGMRKPAFLSGEQKKAIVDLLFKTNRKVTVKQLKEDYFKKIECFDSVEISGVEDRFNASLGTYHDLLKIIKDKDFLDNEENEDILEDIVLTLTLFEDREMIEERLKTYAHLFDDKVMKQLKRRRYTGWGRLSRKLINGIRDKQSGKTILDFLKSDGFANRNFMQLIHDDSLTFKEDIQKAQVSGQGDSLHEHIANLAGSPAIKKGILQTVKVVDELVKVMGRHKPENIVIEMARENQTTQKGQKNSRERMKRIEEGIKELGSQILKEHPVENTQLQNEKLYLYYLQNGRDMYVDQELDINRLSDYDVDHIVPQSFLKDDSIDNKVLTRSDKARGKSDNVPSEEVVKKMKNYWRQLLNAKLITQRKFDNLTKAERGGLSELDKAGFIKRQLVETRQITKHVAQILDSRMNTKYDENDKLIREVKVITLKSKLVSDFRKDFQFYKVREINNYHHAHDAYLNAVVGTALIKKYPKLESEFVYGDYKVYDVRKMIAKSEQEIGKATAKYFFYSNIMNFFKTEITLANGEIRKRPLIETNGETGEIVWDKGRDFATVRKVLSMPQVNIVKKTEVQTGGFSKESILPKRNSDKLIARKKDWDPKKYGGFDSPTVAYSVLVVAKVEKGKSKKLKSVKELLGITIMERSSFEKNPIDFLEAKGYKEVKKDLIIKLPKYSLFELENGRKRMLASAGELQKGNELALPSKYVNFLYLASHYEKLKGSPEDNEQKQLFVEQHKHYLDEIIEQISEFSKRVILADANLDKVLSAYNKHRDKPIREQAENIIHLFTLTNLGAPAAFKYFDTTIDRKRYTSTKEVLDATLIHQSITGLYETRIDLSQLGGDGGGGSGGGGSSGGTAPLEEEYRLFLEAPIQNVTLLEQWKREIPKVWAEINPPGLASTQAPIHVQLLSTALPVRVRQYPITLEAKRSLRETIRKFRAAGILRPVHSPWNTPLLPVRKSGTSEYRMVQDLREVNKRVETIHPTVPNPYTLLSLLPPDRIWYSVLDLKDAFFCIPLAPESQLIFAFEWADAEEGESGQLTWTRLPQGFKNSPTLFNEALNRDLQGFRLDHPSVSLLQYVDDLLIAADTQAACLSATRDLLMTLAELGYRVSGKKAQLCQEEVTYLGFKIHKGSRSLSNSRTQAILQIPVPKTKRQVREFLGKIGYCRLFIPGFAELAQPLYAATRPGNDPLVWGEKEEEAFQSLKLALTQPPALALPSLDKPFQLFVEETSGAAKGVLTQALGPWKRPVAYLSKRLDPVAAGWPRCLRAIAAAALLTREASKLTFGQDIEITSSHNLESLLRSPPDKWLTNARITQYQVLLLDPPRVRFKQTAALNPATLLPETDDTLPIHHCLDTLDSLTSTRPDLTDQPLAQAEATLFTDGSSYIRDGKRYAGAAVVTLDSVIWAEPLPIGTSAQKAELIALTKALEWSKDKSVNIYTDSRYAFATLHVHGMIYRERGWLTAGGKAIKNAPEILALLTAVWLPKRVAVMHCKGHQKDDAPTSTGNRRADEVAREVAIRPLSTQATISAGKRTADGSEFEKRTADGSEFESPKKKAKVE

SEQ ID NO: 6799 - protein, 2100 aa, synthetic construct
MPAAKRVKLDGGDKKYSIGLDIGTNSVGWAVITDEYKVPSKKFKVLGNTDRHSIKKNLIGALLFDSGETAEATRLKRTARRRYTRRKNRICYLQEIFSNEMAKVDDSFFHRLEESFLVEEDKKHERHPIFGNIVDEVAYHEKYPTIYHLRKKLVDSTDKADLRLIYLALAHMIKFRGHFLIEGDLNPDNSDVDKLFIQLVQTYNQLFEENPINASGVDAKAILSARLSKSRRLENLIAQLPGEKKNGLFGNLIALSLGLTPNFKSNFDLAEDAKLQLSKDTYDDDLDNLLAQIGDQYADLFLAAKNLSDAILLSDILRVNTEITKAPLSASMIKRYDEHHQDLTLLKALVRQQLPEKYKEIFFDQSKNGYAGYIDGGASQEEFYKFIKPILEKMDGTEELLVKLNREDLLRKQRTFDNGSIPHQIHLGELHAILRRQEDFYPFLKDNREKIEKILTFRIPYYVGPLARGNSRFAWMTRKSEETITPWNFEEVVDKGASAQSFIERMTNFDKNLPNEKVLPKHSLLYEYFTVYNELTKVKYVTEGMRKPAFLSGEQKKAIVDLLFKTNRKVTVKQLKEDYFKKIECFDSVEISGVEDRFNASLGTYHDLLKIIKDKDFLDNEENEDILEDIVLTLTLFEDREMIEERLKTYAHLFDDKVMKQLKRRRYTGWGRLSRKLINGIRDKQSGKTILDFLKSDGFANRNFMQLIHDDSLTFKEDIQKAQVSGQGDSLHEHIANLAGSPAIKKGILQTVKVVDELVKVMGRHKPENIVIEMARENQTTQKGQKNSRERMKRIEEGIKELGSQILKEHPVENTQLQNEKLYLYYLQNGRDMYVDQELDINRLSDYDVDHIVPQSFLKDDSIDNKVLTRSDKARGKSDNVPSEEVVKKMKNYWRQLLNAKLITQRKFDNLTKAERGGLSELDKAGFIKRQLVETRQITKHVAQILDSRMNTKYDENDKLIREVKVITLKSKLVSDFRKDFQFYKVREINNYHHAHDAYLNAVVGTALIKKYPKLESEFVYGDYKVYDVRKMIAKSEQEIGKATAKYFFYSNIMNFFKTEITLANGEIRKRPLIETNGETGEIVWDKGRDFATVRKVLSMPQVNIVKKTEVQTGGFSKESILPKRNSDKLIARKKDWDPKKYGGFDSPTVAYSVLVVAKVEKGKSKKLKSVKELLGITIMERSSFEKNPIDFLEAKGYKEVKKDLIIKLPKYSLFELENGRKRMLASAGELQKGNELALPSKYVNFLYLASHYEKLKGSPEDNEQKQLFVEQHKHYLDEIIEQISEFSKRVILADANLDKVLSAYNKHRDKPIREQAENIIHLFTLTNLGAPAAFKYFDTTIDRKRYTSTKEVLDATLIHQSITGLYETRIDLSQLGGDGGGGSGGGGSSGGTVSLQDEHRLFDIPVTTSLPDVWLQDFPQAWAETGGLGRAKCQAPIIIDLKPTAVPVSIKQYPMSLEAHMGIRQHIIKFLELGVLRPCRSPWNTPLLPVKKPGTQDYRPVQDLREINKRTVDIHPTVPNPYNLLSTLKPDYSWYTVLDLKDAFFCLPLAPQSQELFAFEWKDPERGISGQLTWTRLPQGFKNSPTLFDEALHRDLTDFRTQHPEVTLLQYVDDLLLAAPTKKACTQGTRHLLQELGEKGYRASAKKAQICQTKVTYLGYILSEGKRWLTPGRIETVARIPPPRNPREVREFLGTAGFCRLWIPGFAELAAPLYALTKESTPFTWQTEHQLAFEALKKALLSAPALGLPDTSKPFTLFLDERQGIAKGVLTQKLGPWKRPVAYLSKKLDPVAAGWPPCLRIMAATAMLVKDSAKLTLGQPLTVITPHTLEAIVRQPPDRWITNARLTHYQALLLDTDRVQFGPPVTLNPATLLPVPENQPSPHDCRQVLAETHGTREDLKDQELPDADHTWYTDGSSYLDSGTRRAGAAVVDGHNTIWAQSLPPGTSAQKAELIALTKALELSKGKKANIYTDSRYAFATAHTHGSIYERRGLLTSEGKEIKNKAEIIALLKALFLPQEVAIIHCPGHQKGQDPVAVGNRQADRVARQAAMAEVLTLATEPDNTSHITAGKRTADGSEFEKRTADGSEFESPKKKAKVE

SEQ ID NO: 6800 - protein, 1999 aa, synthetic construct
MPAAKRVKLDGGDKKYSIGLDIGTNSVGWAVITDEYKVPSKKFKVLGNTDRHSIKKNLIGALLFDSGETAEATRLKRTARRRYTRRKNRICYLQEIFSNEMAKVDDSFFHRLEESFLVEEDKKHERHPIFGNIVDEVAYHEKYPTIYHLRKKLVDSTDKADLRLIYLALAHMIKFRGHFLIEGDLNPDNSDVDKLFIQLVQTYNQLFEENPINASGVDAKAILSARLSKSRRLENLIAQLPGEKKNGLFGNLIALSLGLTPNFKSNFDLAEDAKLQLSKDTYDDDLDNLLAQIGDQYADLFLAAKNLSDAILLSDILRVNTEITKAPLSASMIKRYDEHHQDLTLLKALVRQQLPEKYKEIFFDQSKNGYAGYIDGGASQEEFYKFIKPILEKMDGTEELLVKLNREDLLRKQRTFDNGSIPHQIHLGELHAILRRQEDFYPFLKDNREKIEKILTFRIPYYVGPLARGNSRFAWMTRKSEETITPWNFEEVVDKGASAQSFIERMTNFDKNLPNEKVLPKHSLLYEYFTVYNELTKVKYVTEGMRKPAFLSGEQKKAIVDLLFKTNRKVTVKQLKEDYFKKIECFDSVEISGVEDRFNASLGTYHDLLKIIKDKDFLDNEENEDILEDIVLTLTLFEDREMIEERLKTYAHLFDDKVMKQLKRRRYTGWGRLSRKLINGIRDKQSGKTILDFLKSDGFANRNFMQLIHDDSLTFKEDIQKAQVSGQGDSLHEHIANLAGSPAIKKGILQTVKVVDELVKVMGRHKPENIVIEMARENQTTQKGQKNSRERMKRIEEGIKELGSQILKEHPVENTQLQNEKLYLYYLQNGRDMYVDQELDINRLSDYDVDHIVPQSFLKDDSIDNKVLTRSDKARGKSDNVPSEEVVKKMKNYWRQLLNAKLITQRKFDNLTKAERGGLSELDKAGFIKRQLVETRQITKHVAQILDSRMNTKYDENDKLIREVKVITLKSKLVSDFRKDFQFYKVREINNYHHAHDAYLNAVVGTALIKKYPKLESEFVYGDYKVYDVRKMIAKSEQEIGKATAKYFFYSNIMNFFKTEITLANGEIRKRPLIETNGETGEIVWDKGRDFATVRKVLSMPQVNIVKKTEVQTGGFSKESILPKRNSDKLIARKKDWDPKKYGGFDSPTVAYSVLVVAKVEKGKSKKLKSVKELLGITIMERSSFEKNPIDFLEAKGYKEVKKDLIIKLPKYSLFELENGRKRMLASAGELQKGNELALPSKYVNFLYLASHYEKLKGSPEDNEQKQLFVEQHKHYLDEIIEQISEFSKRVILADANLDKVLSAYNKHRDKPIREQAENIIHLFTLTNLGAPAAFKYFDTTIDRKRYTSTKEVLDATLIHQSITGLYETRIDLSQLGGDGGGGSGGGGSSGGGVLDTPPSHIGLEHLPPPPEVPQFPLNLERLQALQDLVHRSLEAGYISPWDGPGNNPVFPVRKPNGAWRFVHDLRATNALTKPIPALSPGPPDLTAPPTHPPHIICLDLKDAFFQIPVEDRFRFYLSFTLPSPGGLQPHRRFAWRVLPQGFINSPALFQRALQEPLRQVSAAFSQSLLVSYMDDILYASPTEEQRSQCYQALAARLRDLGFQVASEKTSQTPSPVPFLGQMVHEQIVTYQSLPTLQISSPISLHQLQAVLGDLQWVSRGTPTTRRPLQLLYSSLKRHHDPRAIIQLSPEQLQGIAELRQALSHNARSRYNEQEPLLAYVHLTRAGSTLVLFQKGAQFPLAYFQTPLTDNQASPWGLLLLLGCQYLQTQALSSYAKPILKYYHNLPKTSLDNWIQSSEDPRVQELLQLWPQISSQGIQPPGPWKTLITRAEVFLTPQFSPDPIPAALCLFSDGATGRGAYCLWKDHLLDFQAVPAPESAQKGELAGLLAGLAAAPPEPVNIWVDSKYLYSLLRTWVLGAWLQPDPVPSYALLYKSLLRHPAIVVGHVRSHSSASHPIASLNNYVDQLAGKRTADGSEFEKRTADGSEFESPKKKAKVE

SEQ ID NO: 6801 - protein, 2085 aa, synthetic construct
MPAAKRVKLDGGDKKYSIGLDIGTNSVGWAVITDEYKVPSKKFKVLGNTDRHSIKKNLIGALLFDSGETAEATRLKRTARRRYTRRKNRICYLQEIFSNEMAKVDDSFFHRLEESFLVEEDKKHERHPIFGNIVDEVAYHEKYPTIYHLRKKLVDSTDKADLRLIYLALAHMIKFRGHFLIEGDLNPDNSDVDKLFIQLVQTYNQLFEENPINASGVDAKAILSARLSKSRRLENLIAQLPGEKKNGLFGNLIALSLGLTPNFKSNFDLAEDAKLQLSKDTYDDDLDNLLAQIGDQYADLFLAAKNLSDAILLSDILRVNTEITKAPLSASMIKRYDEHHQDLTLLKALVRQQLPEKYKEIFFDQSKNGYAGYIDGGASQEEFYKFIKPILEKMDGTEELLVKLNREDLLRKQRTFDNGSIPHQIHLGELHAILRRQEDFYPFLKDNREKIEKILTFRIPYYVGPLARGNSRFAWMTRKSEETITPWNFEEVVDKGASAQSFIERMTNFDKNLPNEKVLPKHSLLYEYFTVYNELTKVKYVTEGMRKPAFLSGEQKKAIVDLLFKTNRKVTVKQLKEDYFKKIECFDSVEISGVEDRFNASLGTYHDLLKIIKDKDFLDNEENEDILEDIVLTLTLFEDREMIEERLKTYAHLFDDKVMKQLKRRRYTGWGRLSRKLINGIRDKQSGKTILDFLKSDGFANRNFMQLIHDDSLTFKEDIQKAQVSGQGDSLHEHIANLAGSPAIKKGILQTVKVVDELVKVMGRHKPENIVIEMARENQTTQKGQKNSRERMKRIEEGIKELGSQILKEHPVENTQLQNEKLYLYYLQNGRDMYVDQELDINRLSDYDVDHIVPQSFLKDDSIDNKVLTRSDKARGKSDNVPSEEVVKKMKNYWRQLLNAKLITQRKFDNLTKAERGGLSELDKAGFIKRQLVETRQITKHVAQILDSRMNTKYDENDKLIREVKVITLKSKLVSDFRKDFQFYKVREINNYHHAHDAYLNAVVGTALIKKYPKLESEFVYGDYKVYDVRKMIAKSEQEIGKATAKYFFYSNIMNFFKTEITLANGEIRKRPLIETNGETGEIVWDKGRDFATVRKVLSMPQVNIVKKTEVQTGGFSKESILPKRNSDKLIARKKDWDPKKYGGFDSPTVAYSVLVVAKVEKGKSKKLKSVKELLGITIMERSSFEKNPIDFLEAKGYKEVKKDLIIKLPKYSLFELENGRKRMLASAGELQKGNELALPSKYVNFLYLASHYEKLKGSPEDNEQKQLFVEQHKHYLDEIIEQISEFSKRVILADANLDKVLSAYNKHRDKPIREQAENIIHLFTLTNLGAPAAFKYFDTTIDRKRYTSTKEVLDATLIHQSITGLYETRIDLSQLGGDGGGGSGGGGSSGGVPWILKKPLELTIKLDLEEQQGTLLNNSILSKKGKEELKQLFEKYSALWQSWENQVGHRRIRPHKIATGTVKPTPQKQYHINPKAKPDIQIVINDLLKQGVLIQKESTMNTPVYPVPKPNGRWRMVLDYRAVNKVTPLIAVQNQHSYGILGSLFKGRYKTTIDLSNGFWAHPIVPEDYWITAFTWQGKQYCWTVLPQGFLNSPGLFTGDVVDLLQGIPNVEVYVDDVYISHDSEKEHLEYLDILFNRLKEAGYIISLKKSNIANSIVDFLGFQITNEGRGLTDTFKEKLENITAPTTLKQLQSILGLLNFARNFIPDFTELIAPLYALIPKSTKNYVPWQIEHSTTLETLITKLNGAEYLQGRKGDKTLIMKVNASYTTGYIRYYNEGEKKPISYVSIVFSKTELKFTELEKLLTTVHKGLLKALDLSMGQNIHVYSPIVSMQNIQKTPQTAKKALASRWLSWLSYLEDPRIRFFYDPQMPALKDLPAVDTGKDNKKHPSNFQHIFYTDGSAITSPTKEGHLNAGMGIVYFINKDGNLQKQQEWSISLGNHTAQFAEIAAFEFALKKCLPLGGNILVVTDSNYVAKAYNEELDVWASNGFVNNRKKPLKHISKWKSVADLKRLRPDVVVTHEPGHQKLDSSPHAYGNNLADQLATQASFKVHAGKRTADGSEFEKRTADGSEFESPKKKAKVE

SEQ ID NO: 6802 - protein, 2093 aa, synthetic construct
MPAAKRVKLDGGDKKYSIGLDIGTNSVGWAVITDEYKVPSKKFKVLGNTDRHSIKKNLIGALLFDSGETAEATRLKRTARRRYTRRKNRICYLQEIFSNEMAKVDDSFFHRLEESFLVEEDKKHERHPIFGNIVDEVAYHEKYPTIYHLRKKLVDSTDKADLRLIYLALAHMIKFRGHFLIEGDLNPDNSDVDKLFIQLVQTYNQLFEENPINASGVDAKAILSARLSKSRRLENLIAQLPGEKKNGLFGNLIALSLGLTPNFKSNFDLAEDAKLQLSKDTYDDDLDNLLAQIGDQYADLFLAAKNLSDAILLSDILRVNTEITKAPLSASMIKRYDEHHQDLTLLKALVRQQLPEKYKEIFFDQSKNGYAGYIDGGASQEEFYKFIKPILEKMDGTEELLVKLNREDLLRKQRTFDNGSIPHQIHLGELHAILRRQEDFYPFLKDNREKIEKILTFRIPYYVGPLARGNSRFAWMTRKSEETITPWNFEEVVDKGASAQSFIERMTNFDKNLPNEKVLPKHSLLYEYFTVYNELTKVKYVTEGMRKPAFLSGEQKKAIVDLLFKTNRKVTVKQLKEDYFKKIECFDSVEISGVEDRFNASLGTYHDLLKIIKDKDFLDNEENEDILEDIVLTLTLFEDREMIEERLKTYAHLFDDKVMKQLKRRRYTGWGRLSRKLINGIRDKQSGKTILDFLKSDGFANRNFMQLIHDDSLTFKEDIQKAQVSGQGDSLHEHIANLAGSPAIKKGILQTVKVVDELVKVMGRHKPENIVIEMARENQTTQKGQKNSRERMKRIEEGIKELGSQILKEHPVENTQLQNEKLYLYYLQNGRDMYVDQELDINRLSDYDVDHIVPQSFLKDDSIDNKVLTRSDKARGKSDNVPSEEVVKKMKNYWRQLLNAKLITQRKFDNLTKAERGGLSELDKAGFIKRQLVETRQITKHVAQILDSRMNTKYDENDKLIREVKVITLKSKLVSDFRKDFQFYKVREINNYHHAHDAYLNAVVGTALIKKYPKLESEFVYGDYKVYDVRKMIAKSEQEIGKATAKYFFYSNIMNFFKTEITLANGEIRKRPLIETNGETGEIVWDKGRDFATVRKVLSMPQVNIVKKTEVQTGGFSKESILPKRNSDKLIARKKDWDPKKYGGFDSPTVAYSVLVVAKVEKGKSKKLKSVKELLGITIMERSSFEKNPIDFLEAKGYKEVKKDLIIKLPKYSLFELENGRKRMLASAGELQKGNELALPSKYVNFLYLASHYEKLKGSPEDNEQKQLFVEQHKHYLDEIIEQISEFSKRVILADANLDKVLSAYNKHRDKPIREQAENIIHLFTLTNLGAPAAFKYFDTTIDRKRYTSTKEVLDATLIHQSITGLYETRIDLSQLGGDGGGGSGGGGSSGGTLQLEEEYRLFEPESTQKQEMDIWLKNFPQAWAETGGMGTAHCQAPVLIQLKATATPISIRQYPMPHEAYQGIKPHIRRMLDQGILKPCQSPWNTPLLPVKKPGTEDYRPVQDLREVNKRVEDIHPTVPNPYNLLSTLPPSHPWYTVLDLKDAFFCLRLHSESQLLFAFEWRDPEIGLSGQLTWTRLPQGFKNSPTLFNEALHSDLADFRVRYPALVLLQYVDDLLLAAATRTECLEGTKALLETLGNKGYRASAKKAQICLQEVTYLGYSLKDGQRWLTKARKEAILSIPVPKNSRQVREFLGTAGYCRLWIPGFAELAAPLYPLTRPGTLFQWGTEQQLAFEDIKKALLSSPALGLPDITKPFELFIDENSGFAKGVLVQKLGPWKRPVAYLSKKLDTVASGWPPCLRMVAAIAILVKDAGKLTLGQPLTILTSHPVEALVRQPPNKWLSNARMTHYQAMLLDAERVHFGPTVSLNPATLLPLPSGGNHHDCLQILAETHGTRPDLTDQPLPDADLTWYTDGSSFIRNGEREAGAAVTTESEVIWAAPLPPGTSAQRAELIALTQALKMAEGKKLTVYTDSRYAFATTHVHGEIYRRRGWLTSEGKEIKNKNEILALLEALFLPKRLSIIHCPGHQKGDSPQAKGNRLADDTAKKAATETHSSLTVLPAGKRTADGSEFEKRTADGSEFESPKKKAKVE

SEQ ID NO: 6803 - protein, 2125 aa, synthetic construct
MPAAKRVKLDGGDKKYSIGLDIGTNSVGWAVITDEYKVPSKKFKVLGNTDRHSIKKNLIGALLFDSGETAEATRLKRTARRRYTRRKNRICYLQEIFSNEMAKVDDSFFHRLEESFLVEEDKKHERHPIFGNIVDEVAYHEKYPTIYHLRKKLVDSTDKADLRLIYLALAHMIKFRGHFLIEGDLNPDNSDVDKLFIQLVQTYNQLFEENPINASGVDAKAILSARLSKSRRLENLIAQLPGEKKNGLFGNLIALSLGLTPNFKSNFDLAEDAKLQLSKDTYDDDLDNLLAQIGDQYADLFLAAKNLSDAILLSDILRVNTEITKAPLSASMIKRYDEHHQDLTLLKALVRQQLPEKYKEIFFDQSKNGYAGYIDGGASQEEFYKFIKPILEKMDGTEELLVKLNREDLLRKQRTFDNGSIPHQIHLGELHAILRRQEDFYPFLKDNREKIEKILTFRIPYYVGPLARGNSRFAWMTRKSEETITPWNFEEVVDKGASAQSFIERMTNFDKNLPNEKVLPKHSLLYEYFTVYNELTKVKYVTEGMRKPAFLSGEQKKAIVDLLFKTNRKVTVKQLKEDYFKKIECFDSVEISGVEDRFNASLGTYHDLLKIIKDKDFLDNEENEDILEDIVLTLTLFEDREMIEERLKTYAHLFDDKVMKQLKRRRYTGWGRLSRKLINGIRDKQSGKTILDFLKSDGFANRNFMQLIHDDSLTFKEDIQKAQVSGQGDSLHEHIANLAGSPAIKKGILQTVKVVDELVKVMGRHKPENIVIEMARENQTTQKGQKNSRERMKRIEEGIKELGSQILKEHPVENTQLQNEKLYLYYLQNGRDMYVDQELDINRLSDYDVDHIVPQSFLKDDSIDNKVLTRSDKARGKSDNVPSEEVVKKMKNYWRQLLNAKLITQRKFDNLTKAERGGLSELDKAGFIKRQLVETRQITKHVAQILDSRMNTKYDENDKLIREVKVITLKSKLVSDFRKDFQFYKVREINNYHHAHDAYLNAVVGTALIKKYPKLESEFVYGDYKVYDVRKMIAKSEQEIGKATAKYFFYSNIMNFFKTEITLANGEIRKRPLIETNGETGEIVWDKGRDFATVRKVLSMPQVNIVKKTEVQTGGFSKESILPKRNSDKLIARKKDWDPKKYGGFDSPTVAYSVLVVAKVEKGKSKKLKSVKELLGITIMERSSFEKNPIDFLEAKGYKEVKKDLIIKLPKYSLFELENGRKRMLASAGELQKGNELALPSKYVNFLYLASHYEKLKGSPEDNEQKQLFVEQHKHYLDEIIEQISEFSKRVILADANLDKVLSAYNKHRDKPIREQAENIIHLFTLTNLGAPAAFKYFDTTIDRKRYTSTKEVLDATLIHQSITGLYETRIDLSQLGGDGGGGSGGGGSSGGLLGRDLLTKLKAQIQFSTEGPQVTWEDRPAMCLVLNLEEEYRLHEKPVPPSIDPSWLQLFPMVWAEKAGMGLANQVPPVVVELKSDASPVAVRQYPMSKEAREGIRPHIQRFLDLGILVPCQSPWNTPLLPVKKPGTNDYRPVQDLREVNKRVQDIHPTVPNPYNLLSSLPPSHTWYSVLDLKDAFFCLKLHPNSQPLFAFEWRDPEKGNTGQLTWTRLPQGFKNSPTLFNEALHRDLASFRALNPQVVMLQYVDDLLVAAPTYRDCKEGTRRLLQELSKLGYRVSAKKAQLCREEVTYLGYLLKGGKRWLTPARKATVMKIPTPTTPRQVREFLGTAGFCRLWIPGFASLAAPLYPLTRPKVPFTWTEAHQEAFGRIKEALLSAPALALPDLTKPFALYVDEKEGVARGVLTQTLGPWRRPVAYLSKKLDPVASGWPTCLKAIAAVALLLKDADKLTLGQNVLVIAPHNLESIVRQPPDRWMTNARMTHYQSLLLNERVSFAPPAILNPATLLPVESDDTPIHICSEILAEETGTRPDLRDQPLPGVPAWYTDGSSFIMDGRRQAGAAIVDNKRTVWASNLPEGTSAQKAELIALTQALRLAEGKSINIYTDSRYAFATAHVHGAIYKQRGWLTSAGKDIKNKEEILALLEAIHLPKRVAIIHCPGHQRGTDPVATGNRKADEAAKQAAQSTRILTETTKNAGKRTADGSEFEKRTADGSEFESPKKKAKVE

SEQ ID NO: 6804 - protein, 2125 aa, synthetic construct
MPAAKRVKLDGGDKKYSIGLDIGTNSVGWAVITDEYKVPSKKFKVLGNTDRHSIKKNLIGALLFDSGETAEATRLKRTARRRYTRRKNRICYLQEIFSNEMAKVDDSFFHRLEESFLVEEDKKHERHPIFGNIVDEVAYHEKYPTIYHLRKKLVDSTDKADLRLIYLALAHMIKFRGHFLIEGDLNPDNSDVDKLFIQLVQTYNQLFEENPINASGVDAKAILSARLSKSRRLENLIAQLPGEKKNGLFGNLIALSLGLTPNFKSNFDLAEDAKLQLSKDTYDDDLDNLLAQIGDQYADLFLAAKNLSDAILLSDILRVNTEITKAPLSASMIKRYDEHHQDLTLLKALVRQQLPEKYKEIFFDQSKNGYAGYIDGGASQEEFYKFIKPILEKMDGTEELLVKLNREDLLRKQRTFDNGSIPHQIHLGELHAILRRQEDFYPFLKDNREKIEKILTFRIPYYVGPLARGNSRFAWMTRKSEETITPWNFEEVVDKGASAQSFIERMTNFDKNLPNEKVLPKHSLLYEYFTVYNELTKVKYVTEGMRKPAFLSGEQKKAIVDLLFKTNRKVTVKQLKEDYFKKIECFDSVEISGVEDRFNASLGTYHDLLKIIKDKDFLDNEENEDILEDIVLTLTLFEDREMIEERLKTYAHLFDDKVMKQLKRRRYTGWGRLSRKLINGIRDKQSGKTILDFLKSDGFANRNFMQLIHDDSLTFKEDIQKAQVSGQGDSLHEHIANLAGSPAIKKGILQTVKVVDELVKVMGRHKPENIVIEMARENQTTQKGQKNSRERMKRIEEGIKELGSQILKEHPVENTQLQNEKLYLYYLQNGRDMYVDQELDINRLSDYDVDHIVPQSFLKDDSIDNKVLTRSDKARGKSDNVPSEEVVKKMKNYWRQLLNAKLITQRKFDNLTKAERGGLSELDKAGFIKRQLVETRQITKHVAQILDSRMNTKYDENDKLIREVKVITLKSKLVSDFRKDFQFYKVREINNYHHAHDAYLNAVVGTALIKKYPKLESEFVYGDYKVYDVRKMIAKSEQEIGKATAKYFFYSNIMNFFKTEITLANGEIRKRPLIETNGETGEIVWDKGRDFATVRKVLSMPQVNIVKKTEVQTGGFSKESILPKRNSDKLIARKKDWDPKKYGGFDSPTVAYSVLVVAKVEKGKSKKLKSVKELLGITIMERSSFEKNPIDFLEAKGYKEVKKDLIIKLPKYSLFELENGRKRMLASAGELQKGNELALPSKYVNFLYLASHYEKLKGSPEDNEQKQLFVEQHKHYLDEIIEQISEFSKRVILADANLDKVLSAYNKHRDKPIREQAENIIHLFTLTNLGAPAAFKYFDTTIDRKRYTSTKEVLDATLIHQSITGLYETRIDLSQLGGDGGGGSGGGGSSGGLLGRDLLTKLKAQIQFSTEGPQVTWEDRPAMCLVLNLEEEYRLHEKPVPPSIDPSWLQLFPMVWAEKAGMGLANQVPPVVVELKSDASPVAVRQYPMSKEAREGIRPHIQRFLDLGILVPCQSPWNTPLLPVKKPGTNDYRPVQDLREVNKRVQDIHPTVPNPYNLLSSLPPSHTWYSVLDLKDAFFCLKLHPNSQPLFAFEWRDPEKGNTGQLTWTRLPQGFKNSPTLFNEALHRDLASFRALNPQVVMLQYVDDLLVAAPTYRDCKEGTRRLLQELSKLGYRVSAKKAQLCREEVTYLGYLLKGGKRWLTPARKATVMKIPTPTTPRQVREFLGKAGFCRLFIPGFASLAAPLYPLTRPKVPFTWTEAHQEAFGRIKEALLSAPALALPDLTKPFALYVDEKEGVARGVLTQTLGPWRRPVAYLSKKLDPVASGWPTCLKAIAAVALLLKDADKLTLGQNVLVIAPHNLESIVRQPPDRWMTNARMTHYQSLLLNERVSFAPPAILNPATLLPVESDDTPIHICSEILAEETGTRPDLRDQPLPGVPAWYTDGSSFIMDGRRQAGAAIVDNKRTVWASNLPEGTSAQKAELIALTQALRLAEGKSINIYTDSRYAFATAHVHGAIYKQRGWLTSAGKDIKNKEEILALLEAIHLPKRVAIIHCPGHQRGTDPVATGNRKADEAAKQAAQSTRILTETTKNAGKRTADGSEFEKRTADGSEFESPKKKAKVE

SEQ ID NO: 6805 - protein, 2094 aa, synthetic construct
MPAAKRVKLDGGDKKYSIGLDIGTNSVGWAVITDEYKVPSKKFKVLGNTDRHSIKKNLIGALLFDSGETAEATRLKRTARRRYTRRKNRICYLQEIFSNEMAKVDDSFFHRLEESFLVEEDKKHERHPIFGNIVDEVAYHEKYPTIYHLRKKLVDSTDKADLRLIYLALAHMIKFRGHFLIEGDLNPDNSDVDKLFIQLVQTYNQLFEENPINASGVDAKAILSARLSKSRRLENLIAQLPGEKKNGLFGNLIALSLGLTPNFKSNFDLAEDAKLQLSKDTYDDDLDNLLAQIGDQYADLFLAAKNLSDAILLSDILRVNTEITKAPLSASMIKRYDEHHQDLTLLKALVRQQLPEKYKEIFFDQSKNGYAGYIDGGASQEEFYKFIKPILEKMDGTEELLVKLNREDLLRKQRTFDNGSIPHQIHLGELHAILRRQEDFYPFLKDNREKIEKILTFRIPYYVGPLARGNSRFAWMTRKSEETITPWNFEEVVDKGASAQSFIERMTNFDKNLPNEKVLPKHSLLYEYFTVYNELTKVKYVTEGMRKPAFLSGEQKKAIVDLLFKTNRKVTVKQLKEDYFKKIECFDSVEISGVEDRFNASLGTYHDLLKIIKDKDFLDNEENEDILEDIVLTLTLFEDREMIEERLKTYAHLFDDKVMKQLKRRRYTGWGRLSRKLINGIRDKQSGKTILDFLKSDGFANRNFMQLIHDDSLTFKEDIQKAQVSGQGDSLHEHIANLAGSPAIKKGILQTVKVVDELVKVMGRHKPENIVIEMARENQTTQKGQKNSRERMKRIEEGIKELGSQILKEHPVENTQLQNEKLYLYYLQNGRDMYVDQELDINRLSDYDVDHIVPQSFLKDDSIDNKVLTRSDKARGKSDNVPSEEVVKKMKNYWRQLLNAKLITQRKFDNLTKAERGGLSELDKAGFIKRQLVETRQITKHVAQILDSRMNTKYDENDKLIREVKVITLKSKLVSDFRKDFQFYKVREINNYHHAHDAYLNAVVGTALIKKYPKLESEFVYGDYKVYDVRKMIAKSEQEIGKATAKYFFYSNIMNFFKTEITLANGEIRKRPLIETNGETGEIVWDKGRDFATVRKVLSMPQVNIVKKTEVQTGGFSKESILPKRNSDKLIARKKDWDPKKYGGFDSPTVAYSVLVVAKVEKGKSKKLKSVKELLGITIMERSSFEKNPIDFLEAKGYKEVKKDLIIKLPKYSLFELENGRKRMLASAGELQKGNELALPSKYVNFLYLASHYEKLKGSPEDNEQKQLFVEQHKHYLDEIIEQISEFSKRVILADANLDKVLSAYNKHRDKPIREQAENIIHLFTLTNLGAPAAFKYFDTTIDRKRYTSTKEVLDATLIHQSITGLYETRIDLSQLGGDGGGGSGGGGSSGGTLNLEDEYRLYETSAEPEVSPGSTWLSDFPQAWAETGGMGLAVRQAPLIIPLKATSTPVSIKQYPMSQEAKLGIKPHIQRLLDQGILVPCQSPWNTPLLPVKKPGTNDYRPVQDLREVNKRVEDIHPTVPNPYNLLSGLPPSHRWYTVLDLKDAFFCLRLHPTSQPLFAFEWRDPGMGISGQLTWTRLPQGFKNSPTLFNEALHRDLADFRIQHPDLILLQYVDDILLAATSELDCQQGTRALLLTLGNLGYRASAKKAQLCQKQVKYLGYLLKEGQRWLTEARKETVMGQPTPKTPRQLREFLGKAGFCRLFIPGFAEMAAPLYPLTKPGTLFNWGPDQQKAYQEIKQALLTAPALGLPDLTKPFELFVDEKQGYAKGVLTQKLGPWRRPVAYLSKKLDPVAAGWPPCLRMVAAIAVLRKDAGKLTMGQPLVILAPHAVEALVKQPPDRWLSNARMTHYQAMLLDTDRVQFGPVVALNPATLLPLPEEGAPHDCLEILAETHGTRPDLTDQPIPDADHTWYTDGSSFLQEGQRKAGAAVTTETEVIWARALPAGTSAQRAELIALTQALKMAEGKRLNVYTDSRYAFATAHIHGEIYRRRGWLTSEGREIKNKSEILALLKALFLPKRLSIIHCLGHQKGDSAEARGNRLADQAAREAAIKTPPDTSTLLAGKRTADGSEFEKRTADGSEFESPKKKAKVE

SEQ ID NO: 6806 - protein, 2094 aa, synthetic construct
MPAAKRVKLDGGDKKYSIGLDIGTNSVGWAVITDEYKVPSKKFKVLGNTDRHSIKKNLIGALLFDSGETAEATRLKRTARRRYTRRKNRICYLQEIFSNEMAKVDDSFFHRLEESFLVEEDKKHERHPIFGNIVDEVAYHEKYPTIYHLRKKLVDSTDKADLRLIYLALAHMIKFRGHFLIEGDLNPDNSDVDKLFIQLVQTYNQLFEENPINASGVDAKAILSARLSKSRRLENLIAQLPGEKKNGLFGNLIALSLGLTPNFKSNFDLAEDAKLQLSKDTYDDDLDNLLAQIGDQYADLFLAAKNLSDAILLSDILRVNTEITKAPLSASMIKRYDEHHQDLTLLKALVRQQLPEKYKEIFFDQSKNGYAGYIDGGASQEEFYKFIKPILEKMDGTEELLVKLNREDLLRKQRTFDNGSIPHQIHLGELHAILRRQEDFYPFLKDNREKIEKILTFRIPYYVGPLARGNSRFAWMTRKSEETITPWNFEEVVDKGASAQSFIERMTNFDKNLPNEKVLPKHSLLYEYFTVYNELTKVKYVTEGMRKPAFLSGEQKKAIVDLLFKTNRKVTVKQLKEDYFKKIECFDSVEISGVEDRFNASLGTYHDLLKIIKDKDFLDNEENEDILEDIVLTLTLFEDREMIEERLKTYAHLFDDKVMKQLKRRRYTGWGRLSRKLINGIRDKQSGKTILDFLKSDGFANRNFMQLIHDDSLTFKEDIQKAQVSGQGDSLHEHIANLAGSPAIKKGILQTVKVVDELVKVMGRHKPENIVIEMARENQTTQKGQKNSRERMKRIEEGIKELGSQILKEHPVENTQLQNEKLYLYYLQNGRDMYVDQELDINRLSDYDVDHIVPQSFLKDDSIDNKVLTRSDKARGKSDNVPSEEVVKKMKNYWRQLLNAKLITQRKFDNLTKAERGGLSELDKAGFIKRQLVETRQITKHVAQILDSRMNTKYDENDKLIREVKVITLKSKLVSDFRKDFQFYKVREINNYHHAHDAYLNAVVGTALIKKYPKLESEFVYGDYKVYDVRKMIAKSEQEIGKATAKYFFYSNIMNFFKTEITLANGEIRKRPLIETNGETGEIVWDKGRDFATVRKVLSMPQVNIVKKTEVQTGGFSKESILPKRNSDKLIARKKDWDPKKYGGFDSPTVAYSVLVVAKVEKGKSKKLKSVKELLGITIMERSSFEKNPIDFLEAKGYKEVKKDLIIKLPKYSLFELENGRKRMLASAGELQKGNELALPSKYVNFLYLASHYEKLKGSPEDNEQKQLFVEQHKHYLDEIIEQISEFSKRVILADANLDKVLSAYNKHRDKPIREQAENIIHLFTLTNLGAPAAFKYFDTTIDRKRYTSTKEVLDATLIHQSITGLYETRIDLSQLGGDGGGGSGGGGSSGGTLGIEDEYRLHETSTEPDVSLGSTWLSDFPQAWAETGGMGLAVRQAPLIIPLKATSTPVSIQQYPMSHEARLGIKPHIQRLLDQGILVPCQSPWNTPLLPVKKPGTNDYRPVQDLREVNKRVEDIHPTVPNPYNLLSGLPPSHQWYTVLDLKDAFFCLRLHPTSQPLFAFEWRDPGMGISGQLTWTRLPQGFKNSPTLFNEALHRDLADFRIQHPDLILLQYVDDILLAATSELDCQQGTRALLQTLGDLGYRASAKKAQICQKQVKYLGYLLREGQRWLTEARKETVMGQPVPKTPRQLREFLGTAGFCRLWIPGFAEMAAPLYPLTKPGTLFSWGPDQQKAYQEIKQALLTAPALGLPDLTKPFELFVDEKQGYAKGVLTQKLGPWRRPVAYLSKKLDPVAAGWPPCLRMVAAIAVLTKDAGKLTMGQPLVILAPHAVEALVKQPPDRWLSNARMTHYQAMLLDTDRVQFGPVVALNPATLLPLPEEGAPHDCLEILAETHGTRPDLTDQPIPDADHTWYTDGSSFLQEGQRKAGAAVTTETEVIWAGALPAGTSAQRAELIALTQALKMAEGKRLNVYTDSRYAFATAHIHGEIYRRRGWLTSEGREIKNKSEILALLKALFLPKRLSIIHCLGHQKGDSAEARGNRLADQAAREAAIKTPPDTSTLLAGKRTADGSEFEKRTADGSEFESPKKKAKVE

SEQ ID NO: 6807 - protein, 2094 aa, synthetic construct; identical to SEQ ID NO: 6806

SEQ ID NO: 6808 - protein, 2094 aa, synthetic construct
MPAAKRVKLDGGDKKYSIGLDIGTNSVGWAVITDEYKVPSKKFKVLGNTDRHSIKKNLIGALLFDSGETAEATRLKRTARRRYTRRKNRICYLQEIFSNEMAKVDDSFFHRLEESFLVEEDKKHERHPIFGNIVDEVAYHEKYPTIYHLRKKLVDSTDKADLRLIYLALAHMIKFRGHFLIEGDLNPDNSDVDKLFIQLVQTYNQLFEENPINASGVDAKAILSARLSKSRRLENLIAQLPGEKKNGLFGNLIALSLGLTPNFKSNFDLAEDAKLQLSKDTYDDDLDNLLAQIGDQYADLFLAAKNLSDAILLSDILRVNTEITKAPLSASMIKRYDEHHQDLTLLKALVRQQLPEKYKEIFFDQSKNGYAGYIDGGASQEEFYKFIKPILEKMDGTEELLVKLNREDLLRKQRTFDNGSIPHQIHLGELHAILRRQEDFYPFLKDNREKIEKILTFRIPYYVGPLARGNSRFAWMTRKSEETITPWNFEEVVDKGASAQSFIERMTNFDKNLPNEKVLPKHSLLYEYFTVYNELTKVKYVTEGMRKPAFLSGEQKKAIVDLLFKTNRKVTVKQLKEDYFKKIECFDSVEISGVEDRFNASLGTYHDLLKIIKDKDFLDNEENEDILEDIVLTLTLFEDREMIEERLKTYAHLFDDKVMKQLKRRRYTGWGRLSRKLINGIRDKQSGKTILDFLKSDGFANRNFMQLIHDDSLTFKEDIQKAQVSGQGDSLHEHIANLAGSPAIKKGILQTVKVVDELVKVMGRHKPENIVIEMARENQTTQKGQKNSRERMKRIEEGIKELGSQILKEHPVENTQLQNEKLYLYYLQNGRDMYVDQELDINRLSDYDVDHIVPQSFLKDDSIDNKVLTRSDKARGKSDNVPSEEVVKKMKNYWRQLLNAKLITQRKFDNLTKAERGGLSELDKAGFIKRQLVETRQITKHVAQILDSRMNTKYDENDKLIREVKVITLKSKLVSDFRKDFQFYKVREINNYHHAHDAYLNAVVGTALIKKYPKLESEFVYGDYKVYDVRKMIAKSEQEIGKATAKYFFYSNIMNFFKTEITLANGEIRKRPLIETNGETGEIVWDKGRDFATVRKVLSMPQVNIVKKTEVQTGGFSKESILPKRNSDKLIARKKDWDPKKYGGFDSPTVAYSVLVVAKVEKGKSKKLKSVKELLGITIMERSSFEKNPIDFLEAKGYKEVKKDLIIKLPKYSLFELENGRKRMLASAGELQKGNELALPSKYVNFLYLASHYEKLKGSPEDNEQKQLFVEQHKHYLDEIIEQISEFSKRVILADANLDKVLSAYNKHRDKPIREQAENIIHLFTLTNLGAPAAFKYFDTTIDRKRYTSTKEVLDATLIHQSITGLYETRIDLSQLGGDGGGGSGGGGSSGGTLNIEDEYRLHETSKEPDVSLGSTWLSDFPQAWAETGGMGLAVRQAPLIIPLKATSTPVSIKQYPMSQEARLGIKPHIQRLLDQGILVPCQSPWNTPLLPVKKPGTNDYRPVQDLREVNKRVEDIHPTVPNPYNLLSGLPPSHQWYTVLDLKDAFFCLRLHPTSQPLFAFEWRDPEMGISGQLTWTRLPQGFKNSPTLFNEALHRDLAGFRIQHPDLILLQYVDDLLLAATSELDCQQGTRALLQTLGDLGYRASAKKAQICQKQVKYLGYLLKEGQRWLTEARKETVMGQPIPKTPRQLREFLGTAGFCRLWIPGFAEMAAPLYPLTKPGTLFNWGPDQQKAFQEIKQALLTAPALGLPDLTKPFELFVDEKQGYAKGVLTQKLGPWRRPVAYLSKKLDPVAAGWPPCLRMVAAIAVLTKDAGKLTMGQPLVILAPHAVEALVKQPPDRWLSNARMTHYQALLLDTDRVQFGPVVALNPATLLPLPEEGLQHDCLDILAEAHGTRSDLMDQPLPDADHTWYTDGSSFLQEGQRKAGAAVTTETEVIWARALPAGTSAQRAELIALTQALKMAEGKKLNVYTDSRYAFATAHIHGEIYRRRGWLTSEGKEIKNKDEILALLKALFLPKRLSIIHCPGHQKGNSAEARGNRMADQAAREVATRETPETSTLLAGKRTADGSEFEKRTADGSEFESPKKKAKVE

SEQ ID NO: 6809 - protein, 2094 aa, synthetic construct
MPAAKRVKLDGGDKKYSIGLDIGTNSVGWAVITDEYKVPSKKFKVLGNTDRHSIKKNLIGALLFDSGETAEATRLKRTARRRYTRRKNRICYLQEIFSNEMAKVDDSFFHRLEESFLVEEDKKHERHPIFGNIVDEVAYHEKYPTIYHLRKKLVDSTDKADLRLIYLALAHMIKFRGHFLIEGDLNPDNSDVDKLFIQLVQTYNQLFEENPINASGVDAKAILSARLSKSRRLENLIAQLPGEKKNGLFGNLIALSLGLTPNFKSNFDLAEDAKLQLSKDTYDDDLDNLLAQIGDQYADLFLAAKNLSDAILLSDILRVNTEITKAPLSASMIKRYDEHHQDLTLLKALVRQQLPEKYKEIFFDQSKNGYAGYIDGGASQEEFYKFIKPILEKMDGTEELLVKLNREDLLRKQRTFDNGSIPHQIHLGELHAILRRQEDFYPFLKDNREKIEKILTFRIPYYVGPLARGNSRFAWMTRKSEETITPWNFEEVVDKGASAQSFIERMTNFDKNLPNEKVLPKHSLLYEYFTVYNELTKVKYVTEGMRKPAFLSGEQKKAIVDLLFKTNRKVTVKQLKEDYFKKIECFDSVEISGVEDRFNASLGTYHDLLKIIKDKDFLDNEENEDILEDIVLTLTLFEDREMIEERLKTYAHLFDDKVMKQLKRRRYTGWGRLSRKLINGIRDKQSGKTILDFLKSDGFANRNFMQLIHDDSLTFKEDIQKAQVSGQGDSLHEHIANLAGSPAIKKGILQTVKVVDELVKVMGRHKPENIVIEMARENQTTQKGQKNSRERMKRIEEGIKELGSQILKEHPVENTQLQNEKLYLYYLQNGRDMYVDQELDINRLSDYDVDHIVPQSFLKDDSIDNKVLTRSDKARGKSDNVPSEEVVKKMKNYWRQLLNAKLITQRKFDNLTKAERGGLSELDKAGFIKRQLVETRQITKHVAQILDSRMNTKYDENDKLIREVKVITLKSKLVSDFRKDFQFYKVREINNYHHAHDAYLNAVVGTALIKKYPKLESEFVYGDYKVYDVRKMIAKSEQEIGKATAKYFFYSNIMNFFKTEITLANGEIRKRPLIETNGETGEIVWDKGRDFATVRKVLSMPQVNIVKKTEVQTGGFSKESILPKRNSDKLIARKKDWDPKKYGGFDSPTVAYSVLVVAKVEKGKSKKLKSVKELLGITIMERSSFEKNPIDFLEAKGYKEVKKDLIIKLPKYSLFELENGRKRMLASAGELQKGNELALPSKYVNFLYLASHYEKLKGSPEDNEQKQLFVEQHKHYLDEIIEQISEFSKRVILADANLDKVLSAYNKHRDKPIREQAENIIHLFTLTNLGAPAAFKYFDTTIDRKRYTSTKEVLDATLIHQSITGLYETRIDLSQLGGDGGGGSGGGGSSGGTLNIEDEHRLHETSKEPDVSLGSTWLSDFPQAWAETGGMGLAVRQAPLIIPLKATSTPVSIKQYPMSQEARLGIKPHIQRLLDQGILVPCQSPWNTPLLPVKKPGTNDYRPVQDLREVNKRVEDIHPTVPNPYNLLSGLPPSHQWYTVLDLKDAFFCLRLHPTSQPLFAFEWRDPEMGISGQLTWTRLPQGFKNSPTLFNEALHRDLADFRIQHPDLILLQYVDDLLLAATSELDCQQGTRALLQTLGNLGYRASAKKAQICQKQVKYLGYLLKEGQRWLTEARKETVMGQPTPKTPRQLREFLGTAGFCRLWIPGFAEMAAPLYPLTKPGTLFNWGPDQQKAYQEIKQALLTAPALGLPDLTKPFELFVDEKQGYAKGVLTQKLGPWRRPVAYLSKKLDPVAAGWPPCLRMVAAIAVLTKDAGKLTMGQPLVILAPHAVEALVKQPPDRWLSNARMTHYQALLLDTDRVQFGPVVALNPATLLPLPEEGLQHNCLDILAEAHGTRPDLTDQPLPDADHTWYTDGSSLLQEGQRKAGAAVTTETEVIWAKALPAGTSAQRAELIALTQALKMAEGKKLNVYTDSRYAFATAHIHGEIYRRRGWLTSEGKEIKNKDEILALLKALFLPKRLSIIHCPGHQKGHSAEARGNRMADQAARKAAITETPDTSTLLAGKRTADGSEFEKRTADGSEFESPKKKAKVE

SEQ ID NO: 6810 - protein, 2088 aa, synthetic construct
MPAAKRVKLDGGDKKYSIGLDIGTNSVGWAVITDEYKVPSKKFKVLGNTDRHSIKKNLIGALLFDSGETAEATRLKRTARRRYTRRKNRICYLQEIFSNEMAKVDDSFFHRLEESFLVEEDKKHERHPIFGNIVDEVAYHEKYPTIYHLRKKLVDSTDKADLRLIYLALAHMIKFRGHFLIEGDLNPDNSDVDKLFIQLVQTYNQLFEENPINASGVDAKAILSARLSKSRRLENLIAQLPGEKKNGLFGNLIALSLGLTPNFKSNFDLAEDAKLQLSKDTYDDDLDNLLAQIGDQYADLFLAAKNLSDAILLSDILRVNTEITKAPLSASMIKRYDEHHQDLTLLKALVRQQLPEKYKEIFFDQSKNGYAGYIDGGASQEEFYKFIKPILEKMDGTEELLVKLNREDLLRKQRTFDNGSIPHQIHLGELHAILRRQEDFYPFLKDNREKIEKILTFRIPYYVGPLARGNSRFAWMTRKSEETITPWNFEEVVDKGASAQSFIERMTNFDKNLPNEKVLPKHSLLYEYFTVYNELTKVKYVTEGMRKPAFLSGEQKKAIVDLLFKTNRKVTVKQLKEDYFKKIECFDSVEISGVEDRFNASLGTYHDLLKIIKDKDFLDNEENEDILEDIVLTLTLFEDREMIEERLKTYAHLFDDKVMKQLKRRRYTGWGRLSRKLINGIRDKQSGKTILDFLKSDGFANRNFMQLIHDDSLTFKEDIQKAQVSGQGDSLHEHIANLAGSPAIKKGILQTVKVVDELVKVMGRHKPENIVIEMARENQTTQKGQKNSRERMKRIEEGIKELGSQILKEHPVENTQLQNEKLYLYYLQNGRDMYVDQELDINRLSDYDVDHIVPQSFLKDDSIDNKVLTRSDKARGKSDNVPSEEVVKKMKNYWRQLLNAKLITQRKFDNLTKAERGGLSELDKAGFIKRQLVETRQITKHVAQILDSRMNTKYDENDKLIREVKVITLKSKLVSDFRKDFQFYKVREINNYHHAHDAYLNAVVGTALIKKYPKLESEFVYGDYKVYDVRKMIAKSEQEIGKATAKYFFYSNIMNFFKTEITLANGEIRKRPLIETNGETGEIVWDKGRDFATVRKVLSMPQVNIVKKTEVQTGGFSKESILPKRNSDKLIARKKDWDPKKYGGFDSPTVAYSVLVVAKVEKGKSKKLKSVKELLGITIMERSSFEKNPIDFLEAKGYKEVKKDLIIKLPKYSLFELENGRKRMLASAGELQKGNELALPSKYVNFLYLASHYEKLKGSPEDNEQKQLFVEQHKHYLDEIIEQISEFSKRVILADANLDKVLSAYNKHRDKPIREQAENIIHLFTLTNLGAPAAFKYFDTTIDRKRYTSTKEVLDATLIHQSITGLYETRIDLSQLGGDGGGGSGGGGSSGGTLQLDDEYRLYSPLVKPDQNIQFWLEQFPQAWAETAGMGLAKQVPPQVIQLKASATPVSVRQYPLSKEAQEGIRPHVQRLIQQGILVPVQSPWNTPLLPVRKPGTNDYRPVQDLREVNKRVQDIHPTVPNPYNLLCALPPQRSWYTVLDLKDAFFCLRLHPTSQPLFAFEWRDPGTGRTGQLTWTRLPQGFKNSPTIFDEALHRDLANFRIQHPQVTLLQYVDDLLLAGATKQDCLEGTKALLLELSDLGYRASAKKAQICRREVTYLGYSLRDGQRWLTEARKKTVVQIPAPTTAKQVREFLGTAGFCRLWIPGFATLAAPLYPLTKEKGEFSWAPEHQKAFDAIKKALLSAPALALPDVTKPFTLYVDERKGVARGVLTQTLGPWRRPVAYLSKKLDPVASGWPVCLKAIAAVAILVKDADKLTLGQNITVIAPHALENIVRQPPDRWMTNARMTHYQSLLLTERVTFAPPAALNPATLLPEETDEPVTHDCHQLLIEETGVRKDLTDIPLTGEVLTWFTDGSSYVVEGKRMAGAAVVDGTRTIWASSLPEGTSAQKAELMALTQALRLAEGKSINIYTDSRYAFATAHVHGAIYKQRGLLTSAGREIKNKEEILSLLEALHLPKRLAIIHCPGHQKAKDPISRGNQMADRVAKQAAQGVNLLAGKRTADGSEFEKRTADGSEFESPKKKAKVE

SEQ ID NO: 6811 - protein, 2088 aa, synthetic construct; identical to SEQ ID NO: 6810

SEQ ID NO: 6812 - protein, 2174 aa, synthetic construct
MPAAKRVKLDGGDKKYSIGLDIGTNSVGWAVITDEYKVPSKKFKVLGNTDRHSIKKNLIGALLFDSGETAEATRLKRTARRRYTRRKNRICYLQEIFSNEMAKVDDSFFHRLEESFLVEEDKKHERHPIFGNIVDEVAYHEKYPTIYHLRKKLVDSTDKADLRLIYLALAHMIKFRGHFLIEGDLNPDNSDVDKLFIQLVQTYNQLFEENPINASGVDAKAILSARLSKSRRLENLIAQLPGEKKNGLFGNLIALSLGLTPNFKSNFDLAEDAKLQLSKDTYDDDLDNLLAQIGDQYADLFLAAKNLSDAILLSDILRVNTEITKAPLSASMIKRYDEHHQDLTLLKALVRQQLPEKYKEIFFDQSKNGYAGYIDGGASQEEFYKFIKPILEKMDGTEELLVKLNREDLLRKQRTFDNGSIPHQIHLGELHAILRRQEDFYPFLKDNREKIEKILTFRIPYYVGPLARGNSRFAWMTRKSEETITPWNFEEVVDKGASAQSFIERMTNFDKNLPNEKVLPKHSLLYEYFTVYNELTKVKYVTEGMRKPAFLSGEQKKAIVDLLFKTNRKVTVKQLKEDYFKKIECFDSVEISGVEDRFNASLGTYHDLLKIIKDKDFLDNEENEDILEDIVLTLTLFEDREMIEERLKTYAHLFDDKVMKQLKRRRYTGWGRLSRKLINGIRDKQSGKTILDFLKSDGFANRNFMQLIHDDSLTFKEDIQKAQVSGQGDSLHEHIANLAGSPAIKKGILQTVKVVDELVKVMGRHKPENIVIEMARENQTTQKGQKNSRERMKRIEEGIKELGSQILKEHPVENTQLQNEKLYLYYLQNGRDMYVDQELDINRLSDYDVDHIVPQSFLKDDSIDNKVLTRSDKARGKSDNVPSEEVVKKMKNYWRQLLNAKLITQRKFDNLTKAERGGLSELDKAGFIKRQLVETRQITKHVAQILDSRMNTKYDENDKLIREVKVITLKSKLVSDFRKDFQFYKVREINNYHHAHDAYLNAVVGTALIKKYPKLESEFVYGDYKVYDVRKMIAKSEQEIGKATAKYFFYSNIMNFFKTEITLANGEIRKRPLIETNGETGEIVWDKGRDFATVRKVLSMPQVNIVKKTEVQTGGFSKESILPKRNSDKLIARKKDWDPKKYGGFDSPTVAYSVLVVAKVEKGKSKKLKSVKELLGITIMERSSFEKNPIDFLEAKGYKEVKKDLIIKLPKYSLFELENGRKRMLASAGELQKGNELALPSKYVNFLYLASHYEKLKGSPEDNEQKQLFVEQHKHYLDEIIEQISEFSKRVILADANLDKVLSAYNKHRDKPIREQAENIIHLFTLTNLGAPAAFKYFDTTIDRKRYTSTKEVLDATLIHQSITGLYETRIDLSQLGGDGGGGSGGGGSSGGMDPLQLLQPLEAEIKGTKLKAHWNSGATITCVPEAFLEDERPIQTMLIKTIHGEKQQDVYYLTFKVQGRKVEAEVLASPYDYILLNPSDVPWLMKKPLQLTVLVPLHEYQERLLQQTALPKEQKELLQKLFLKYDALWQHWENQVGHRRIKPHNIATGTLAPRPQKQYPINPKAKPSIQIVIDDLLKQGVLIQQNSTMNTPVYPVPKPDGKWRMVLDYREVNKTIPLIAAQNQHSAGILSSIYRGKYKTTLDLTNGFWAHPITPESYWLTAFTWQGKQYCWTRLPQGFLNSPALFTADVVDLLKEIPNVQAYVDDIYISHDDPQEHLEQLEKIFSILLNAGYVVSLKKSEIAQREVEFLGFNITKEGRGLTDTFKQKLLNITPPKDLKQLQSILGLLNFARNFIPNYSELVKPLYTIVANANGKFISWTEDNSNQLQHIISVLNQADNLEERNPETRLIIKVNSSPSAGYIRYYNEGSKRPIMYVNYIFSKAEAKFTQTEKLLTTMHKGLIKAMDLAMGQEILVYSPIVSMTKIQRTPLPERKALPVRWITWMTYLEDPRIQFHYDKSLPELQQIPNVTEDVIAKTKHPSEFAMVFYTDGSAIKHPDVNKSHSAGMGIAQVQFIPEYKIVHQWSIPLGDHTAQLAEIAAVEFACKKALKISGPVLIVTDSFYVAESANKELPYWKSNGFLNNKKKPLRHVSKWKSIAECLQLKPDIIIMHEKGHQQPMTTLHTEGNNLADKLATQGSYVVHAGKRTADGSEFEKRTADGSEFESPKKKAKVE

SEQ ID NO: 6813 - protein, 2085 aa, synthetic construct
MPAAKRVKLDGGDKKYSIGLDIGTNSVGWAVITDEYKVPSKKFKVLGNTDRHSIKKNLIGALLFDSGETAEATRLKRTARRRYTRRKNRICYLQEIFSNEMAKVDDSFFHRLEESFLVEEDKKHERHPIFGNIVDEVAYHEKYPTIYHLRKKLVDSTDKADLRLIYLALAHMIKFRGHFLIEGDLNPDNSDVDKLFIQLVQTYNQLFEENPINASGVDAKAILSARLSKSRRLENLIAQLPGEKKNGLFGNLIALSLGLTPNFKSNFDLAEDAKLQLSKDTYDDDLDNLLAQIGDQYADLFLAAKNLSDAILLSDILRVNTEITKAPLSASMIKRYDEHHQDLTLLKALVRQQLPEKYKEIFFDQSKNGYAGYIDGGASQEEFYKFIKPILEKMDGTEELLVKLNREDLLRKQRTFDNGSIPHQIHLGELHAILRRQEDFYPFLKDNREKIEKILTFRIPYYVGPLARGNSRFAWMTRKSEETITPWNFEEVVDKGASAQSFIERMTNFDKNLPNEKVLPKHSLLYEYFTVYNELTKVKYVTEGMRKPAFLSGEQKKAIVDLLFKTNRKVTVKQLKEDYFKKIECFDSVEISGVEDRFNASLGTYHDLLKIIKDKDFLDNEENEDILEDIVLTLTLFEDREMIEERLKTYAHLFDDKVMKQLKRRRYTGWGRLSRKLINGIRDKQSGKTILDFLKSDGFANRNFMQLIHDDSLTFKEDIQKAQVSGQGDSLHEHIANLAGSPAIKKGILQTVKVVDELVKVMGRHKPENIVIEMARENQTTQKGQKNSRERMKRIEEGIKELGSQILKEHPVENTQLQNEKLYLYYLQNGRDMYVDQELDINRLSDYDVDHIVPQSFLKDDSIDNKVLTRSDKARGKSDNVPSEEVVKKMKNYWRQLLNAKLITQRKFDNLTKAERGGLSELDKAGFIKRQLVETRQITKHVAQILDSRMNTKYDENDKLIREVKVITLKSKLVSDFRKDFQFYKVREINNYHHAHDAYLNAVVGTALIKKYPKLESEFVYGDYKVYDVRKMIAKSEQEIGKATAKYFFYSNIMNFFKTEITLANGEIRKRPLIETNGETGEIVWDKGRDFATVRKVLSMPQVNIVKKTEVQTGGFSKESILPKRNSDKLIARKKDWDPKKYGGFDSPTVAYSVLVVAKVEKGKSKKLKSVKELLGITIMERSSFEKNPIDFLEAKGYKEVKKDLIIKLPKYSLFELENGRKRMLASAGELQKGNELALPSKYVNFLYLASHYEKLKGSPEDNEQKQLFVEQHKHYLDEIIEQISEFSKRVILADANLDKVLSAYNKHRDKPIREQAENIIHLFTLTNLGAPAAFKYFDTTIDRKRYTSTKEVLDATLIHQSITGLYETRIDLSQLGGDGGGGSGGGGSSGGVPWLMKKPLQLTVLVPLHEYQERLLQQTALPKEQKELLQKLFLKYDALWQHWENQVGHRRIKPHNIATGTLAPRPQKQYPINPKAKPSIQIVIDDLLKQGVLIQQNSTMNTPVYPVPKPDGKWRMVLDYREVNKTIPLIAAQNQHSAGILSSIYRGKYKTTLDLTNGFWAHPITPESYWLTAFTWQGKQYCWTRLPQGFLNSPALFTADVVDLLKEIPNVQAYVDDIYISHDDPQEHLEQLEKIFSILLNAGYVVSLKKSEIAQREVEFLGFNITKEGRGLTDTFKQKLLNITPPKDLKQLQSILGLLNFARNFIPNYSELVKPLYTIVANANGKFISWTEDNSNQLQHIISVLNQADNLEERNPETRLIIKVNSSPSAGYIRYYNEGSKRPIMYVNYIFSKAEAKFTQTEKLLTTMHKGLIKAMDLAMGQEILVYSPIVSMTKIQRTPLPERKALPVRWITWMTYLEDPRIQFHYDKSLPELQQIPNVTEDVIAKTKHPSEFAMVFYTDGSAIKHPDVNKSHSAGMGIAQVQFIPEYKIVHQWSIPLGDHTAQLAEIAAVEFACKKALKISGPVLIVTDSFYVAESANKELPYWKSNGFLNNKKKPLRHVSKWKSIAECLQLKPDIIIMHEKGHQQPMTTLHTEGNNLADKLATQGSYVVHAGKRTADGSEFEKRTADGSEFESPKKKAKVE

SEQ ID NO: 6814 - protein, 2085 aa, synthetic construct
MPAAKRVKLDGGDKKYSIGLDIGTNSVGWAVITDEYKVPSKKFKVLGNTDRHSIKKNLIGALLFDSGETAEATRLKRTARRRYTRRKNRICYLQEIFSNEMAKVDDSFFHRLEESFLVEEDKKHERHPIFGNIVDEVAYHEKYPTIYHLRKKLVDSTDKADLRLIYLALAHMIKFRGHFLIEGDLNPDNSDVDKLFIQLVQTYNQLFEENPINASGVDAKAILSARLSKSRRLENLIAQLPGEKKNGLFGNLIALSLGLTPNFKSNFDLAEDAKLQLSKDTYDDDLDNLLAQIGDQYADLFLAAKNLSDAILLSDILRVNTEITKAPLSASMIKRYDEHHQDLTLLKALVRQQLPEKYKEIFFDQSKNGYAGYIDGGASQEEFYKFIKPILEKMDGTEELLVKLNREDLLRKQRTFDNGSIPHQIHLGELHAILRRQEDFYPFLKDNREKIEKILTFRIPYYVGPLARGNSRFAWMTRKSEETITPWNFEEVVDKGASAQSFIERMTNFDKNLPNEKVLPKHSLLYEYFTVYNELTKVKYVTEGMRKPAFLSGEQKKAIVDLLFKTNRKVTVKQLKEDYFKKIECFDSVEISGVEDRFNASLGTYHDLLKIIKDKDFLDNEENEDILEDIVLTLTLFEDREMIEERLKTYAHLFDDKVMKQLKRRRYTGWGRLSRKLINGIRDKQSGKTILDFLKSDGFANRNFMQLIHDDSLTFKEDIQKAQVSGQGDSLHEHIANLAGSPAIKKGILQTVKVVDELVKVMGRHKPENIVIEMARENQTTQKGQKNSRERMKRIEEGIKELGSQILKEHPVENTQLQNEKLYLYYLQNGRDMYVDQELDINRLSDYDVDHIVPQSFLKDDSIDNKVLTRSDKARGKSDNVPSEEVVKKMKNYWRQLLNAKLITQRKFDNLTKAERGGLSELDKAGFIKRQLVETRQITKHVAQILDSRMNTKYDENDKLIREVKVITLKSKLVSDFRKDFQFYKVREINNYHHAHDAYLNAVVGTALIKKYPKLESEFVYGDYKVYDVRKMIAKSEQEIGKATAKYFFYSNIMNFFKTEITLANGEIRKRPLIETNGETGEIVWDKGRDFATVRKVLSMPQVNIVKKTEVQTGGFSKESILPKRNSDKLIARKKDWDPKKYGGFDSPTVAYSVLVVAKVEKGKSKKLKSVKELLGITIMERSSFEKNPIDFLEAKGYKEVKKDLIIKLPKYSLFELENGRKRMLASAGELQKGNELALPSKYVNFLYLASHYEKLKGSPEDNEQKQLFVEQHKHYLDEIIEQISEFSKRVILADANLDKVLSAYNKHRDKPIREQAENIIHLFTLTNLGAPAAFKYFDTTIDRKRYTSTKEVLDATLIHQSITGLYETRIDLSQLGGDGGGGSGGGGSSGGIPWLMKKPLQLTTLVPLQEYEERLLKQTMLTGSYKEKLQSLFLKYDALWQHWENQVGHRRIKPHHIATGTVNPRPQKQYPINPKAKASIQTVINDLLKQGVLIQQNSIMNTPVYPVPKPDGKWRMVLDYREVNKTIPLIAAQNQHSAGILSSIFRGKYKTTLDLSNGFWAHSITPESYWLTAFTWLGQQYCWTRLPQGFLNSPALFNADVVDLLKEVPNVQVYVDDIYISHDDPREHLEQLEKVFSLLLNAGYVVSLKKSEIAQHEVEFLGFNITKEGRGLTETFKQKLLNITPPRDLKQLQSILGKLNFARNFIPNFSELVKPLYNIIATAPGKYITWTTDNSQQLQNIISMLNSAENLEERNPEVRLIMKVNTSPSAGYIRFYNEFAKRPIMYLNYVYTKAEVKFTNTEKLLTTIHKGLIKALDLGMGQEILVYSPIVSMTKIQKTPLPERKALPIRWITWMSYLEDPRIQFHYDKTLPELQQVPTVTDDIIAKIKHPSEFSMVFYTDGSAIKHPNVNKSHNAGMGIAQVQFKPEFTVINTWSIPLGDHTAQLAEVAAVEFACKKALKIDGPVLIVTDSFYVAESVNKELPYWQSNGFFNNKKKPLKHVSKWKSIADCIQLKPDIIIIHEKGHQPTASTFHTEGNNLADKLATQGSYVVNAGKRTADGSEFEKRTADGSEFESPKKKAKVE

SEQ ID NO: 6815 - protein, 2094 aa, synthetic construct
MPAAKRVKLDGGDKKYSIGLDIGTNSVGWAVITDEYKVPSKKFKVLGNTDRHSIKKNLIGALLFDSGETAEATRLKRTARRRYTRRKNRICYLQEIFSNEMAKVDDSFFHRLEESFLVEEDKKHERHPIFGNIVDEVAYHEKYPTIYHLRKKLVDSTDKADLRLIYLALAHMIKFRGHFLIEGDLNPDNSDVDKLFIQLVQTYNQLFEENPINASGVDAKAILSARLSKSRRLENLIAQLPGEKKNGLFGNLIALSLGLTPNFKSNFDLAEDAKLQLSKDTYDDDLDNLLAQIGDQYADLFLAAKNLSDAILLSDILRVNTEITKAPLSASMIKRYDEHHQDLTLLKALVRQQLPEKYKEIFFDQSKNGYAGYIDGGASQEEFYKFIKPILEKMDGTEELLVKLNREDLLRKQRTFDNGSIPHQIHLGELHAILRRQEDFYPFLKDNREKIEKILTFRIPYYVGPLARGNSRFAWMTRKSEETITPWNFEEVVDKGASAQSFIERMTNFDKNLPNEKVLPKHSLLYEYFTVYNELTKVKYVTEGMRKPAFLSGEQKKAIVDLLFKTNRKVTVKQLKEDYFKKIECFDSVEISGVEDRFNASLGTYHDLLKIIKDKDFLDNEENEDILEDIVLTLTLFEDREMIEERLKTYAHLFDDKVMKQLKRRRYTGWGRLSRKLINGIRDKQSGKTILDFLKSDGFANRNFMQLIHDDSLTFKEDIQKAQVSGQGDSLHEHIANLAGSPAIKKGILQTVKVVDELVKVMGRHKPENIVIEMARENQTTQKGQKNSRERMKRIEEGIKELGSQILKEHPVENTQLQNEKLYLYYLQNGRDMYVDQELDINRLSDYDVDHIVPQSFLKDDSIDNKVLTRSDKARGKSDNVPSEEVVKKMKNYWRQLLNAKLITQRKFDNLTKAERGGLSELDKAGFIKRQLVETRQITKHVAQILDSRMNTKYDENDKLIREVKVITLKSKLVSDFRKDFQFYKVREINNYHHAHDAYLNAVVGTALIKKYPKLESEFVYGDYKVYDVRKMIAKSEQEIGKATAKYFFYSNIMNFFKTEITLANGEIRKRPLIETNGETGEIVWDKGRDFATVRKVLSMPQVNIVKKTEVQTGGFSKESILPKRNSDKLIARKKDWDPKKYGGFDSPTVAYSVLVVAKVEKGKSKKLKSVKELLGITIMERSSFEKNPIDFLEAKGYKEVKKDLIIKLPKYSLFELENGRKRMLASAGELQKGNELALPSKYVNFLYLASHYEKLKGSPEDNEQKQLFVEQHKHYLDEIIEQISEFSKRVILADANLDKVLSAYNKHRDKPIREQAENIIHLFTLTNLGAPAAFKYFDTTIDRKRYTSTKEVLDATLIHQSITGLYETRIDLSQLGGDGGGGSGGGGSSGGTLNIEDEYRLHETSKEPDVPLGSTWLSDFPQAWAETGGMGLAVRQAPLIIPLKATSTPVSIKQYPMSQEARLGIKPHIQRLLDQGILVPCQSPWNTPLLPVKKPGTNDYRPVQDLREVNKRVEDIHPTVPNPYNLLSGLPPSHQWYTVLDLKDAFFCLRLHPTSQPLFAFEWRDPEMGISGQLTWTRLPQGFKNSPTLFNEALHRDLADFRIQHPDLILLQYVDDLLLAATSEQDCQRGTRALLQTLGNLGYRASAKKAQICQKQVKYLGYLLKEGQRWLTEARKETVMGQPTPKTPRQLREFLGTAGFCRLWIPGFAEMAAPLYPLTKPGTLFNWGPDQQKAYQEIKQALLTAPALGLPDLTKPFELFVDEKQGYAKGVLTQKLGPWRRPVAYLSKKLDPVAAGWPPCLRMVAAIAVLTKDAGKLTMGQPLVILAPHAVEALVKQPPDRWLSNARMTHYQAMLLDTDRVQFGPVVALNPATLLPLPEKEAPHDCLEILAETHGTRPDLTDQPIPDADYTWYTDGSSFLQEGQRRAGAAVTTETEVIWARALPAGTSAQRAELIALTQALKMAEGKKLNVYTDSRYAFATAHVHGEIYRRRGWLTSEGREIKNKNEILALLKALFLPKRLSIIHCPGHQKGNSAEARGNRMADQAAREAAMKAVLETSTLLAGKRTADGSEFEKRTADGSEFESPKKKAKVE

SEQ ID NO: 6816 - protein, 2094 aa, synthetic construct
MPAAKRVKLDGGDKKYSIGLDIGTNSVGWAVITDEYKVPSKKFKVLGNTDRHSIKKNLIGALLFDSGETAEATRLKRTARRRYTRRKNRICYLQEIFSNEMAKVDDSFFHRLEESFLVEEDKKHERHPIFGNIVDEVAYHEKYPTIYHLRKKLVDSTDKADLRLIYLALAHMIKFRGHFLIEGDLNPDNSDVDKLFIQLVQTYNQLFEENPINASGVDAKAILSARLSKSRRLENLIAQLPGEKKNGLFGNLIALSLGLTPNFKSNFDLAEDAKLQLSKDTYDDDLDNLLAQIGDQYADLFLAAKNLSDAILLSDILRVNTEITKAPLSASMIKRYDEHHQDLTLLKALVRQQLPEKYKEIFFDQSKNGYAGYIDGGASQEEFYKFIKPILEKMDGTEELLVKLNREDLLRKQRTFDNGSIPHQIHLGELHAILRRQEDFYPFLKDNREKIEKILTFRIPYYVGPLARGNSRFAWMTRKSEETITPWNFEEVVDKGASAQSFIERMTNFDKNLPNEKVLPKHSLLYEYFTVYNELTKVKYVTEGMRKPAFLSGEQKKAIVDLLFKTNRKVTVKQLKEDYFKKIECFDSVEISGVEDRFNASLGTYHDLLKIIKDKDFLDNEENEDILEDIVLTLTLFEDREMIEERLKTYAHLFDDKVMKQLKRRRYTGWGRLSRKLINGIRDKQSGKTILDFLKSDGFANRNFMQLIHDDSLTFKEDIQKAQVSGQGDSLHEHIANLAGSPAIKKGILQTVKVVDELVKVMGRHKPENIVIEMARENQTTQKGQKNSRERMKRIEEGIKELGSQILKEHPVENTQLQNEKLYLYYLQNGRDMYVDQELDINRLSDYDVDHIVPQSFLKDDSIDNKVLTRSDKARGKSDNVPSEEVVKKMKNYWRQLLNAKLITQRKFDNLTKAERGGLSELDKAGFIKRQLVETRQITKHVAQILDSRMNTKYDENDKLIREVKVITLKSKLVSDFRKDFQFYKVREINNYHHAHDAYLNAVVGTALIKKYPKLESEFVYGDYKVYDVRKMIAKSEQEIGKATAKYFFYSNIMNFFKTEITLANGEIRKRPLIETNGETGEIVWDKGRDFATVRKVLSMPQVNIVKKTEVQTGGFSKESILPKRNSDKLIARKKDWDPKKYGGFDSPTVAYSVLVVAKVEKGKSKKLKSVKELLGITIMERSSFEKNPIDFLEAKGYKEVKKDLIIKLPKYSLFELENGRKRMLASAGELQKGNELALPSKYVNFLYLASHYEKLKGSPEDNEQKQLFVEQHKHYLDEIIEQISEFSKRVILADANLDKVLSAYNKHRDKPIREQAENIIHLFTLTNLGAPAAFKYFDTTIDRKRYTSTKEVLDATLIHQSITGLYETRIDLSQLGGDGGGGSGGGGSSGGTLNIEDEYRLHETSKEPDVPLGSTWLSDFPQAWAETGGMGLAVRQAPLIIPLKATSTPVSIKQYPMSQEARLGIKPHIQRLLDQGILVPCQSPWNTPLLPVKKPGTNDYRPVQDLREVNKRVEDIHPTVPNPYNLLSGLPPSHQWYTVLDLKDAFFCLRLHPTSQPLFAFEWRDPEMGISGQLTWTRLPQGFKNSPTLFNEALHRDLADFRIQHPDLILLQYVDDLLLAATSEQDCQRGTRALLQTLGNLGYRASAKKAQICQKQVKYLGYLLKEGQRWLTEARKETVMGQPTPKTPRQLREFLGKAGFCRLFIPGFAEMAAPLYPLTKPGTLFNWGPDQQKAYQEIKQALLTAPALGLPDLTKPFELFVDEKQGYAKGVLTQKLGPWRRPVAYLSKKLDPVAAGWPPCLRMVAAIAVLTKDAGKLTMGQPLVILAPHAVEALVKQPPDRWLSNARMTHYQAMLLDTDRVQFGPVVALNPATLLPLPEKEAPHDCLEILAETHGTRPDLTDQPIPDADYTWYTDGSSFLQEGQRRAGAAVTTETEVIWARALPAGTSAQRAELIALTQALKMAEGKKLNVYTDSRYAFATAHVHGEIYRRRGWLTSEGREIKNKNEILALLKALFLPKRLSIIHCPGHQKGNSAEARGNRMADQAAREAAMKAVLETSTLLAGKRTADGSEFEKRTADGSEFESPKKKAKVE

SEQ ID NO: 6817 - protein, 2096 aa, synthetic construct
MPAAKRVKLDGGDKKYSIGLDIGTNSVGWAVITDEYKVPSKKFKVLGNTDRHSIKKNLIGALLFDSGETAEATRLKRTARRRYTRRKNRICYLQEIFSNEMAKVDDSFFHRLEESFLVEEDKKHERHPIFGNIVDEVAYHEKYPTIYHLRKKLVDSTDKADLRLIYLALAHMIKFRGHFLIEGDLNPDNSDVDKLFIQLVQTYNQLFEENPINASGVDAKAILSARLSKSRRLENLIAQLPGEKKNGLFGNLIALSLGLTPNFKSNFDLAEDAKLQLSKDTYDDDLDNLLAQIGDQYADLFLAAKNLSDAILLSDILRVNTEITKAPLSASMIKRYDEHHQDLTLLKALVRQQLPEKYKEIFFDQSKNGYAGYIDGGASQEEFYKFIKPILEKMDGTEELLVKLNREDLLRKQRTFDNGSIPHQIHLGELHAILRRQEDFYPFLKDNREKIEKILTFRIPYYVGPLARGNSRFAWMTRKSEETITPWNFEEVVDKGASAQSFIERMTNFDKNLPNEKVLPKHSLLYEYFTVYNELTKVKYVTEGMRKPAFLSGEQKKAIVDLLFKTNRKVTVKQLKEDYFKKIECFDSVEISGVEDRFNASLGTYHDLLKIIKDKDFLDNEENEDILEDIVLTLTLFEDREMIEERLKTYAHLFDDKVMKQLKRRRYTGWGRLSRKLINGIRDKQSGKTILDFLKSDGFANRNFMQLIHDDSLTFKEDIQKAQVSGQGDSLHEHIANLAGSPAIKKGILQTVKVVDELVKVMGRHKPENIVIEMARENQTTQKGQKNSRERMKRIEEGIKELGSQILKEHPVENTQLQNEKLYLYYLQNGRDMYVDQELDINRLSDYDVDHIVPQSFLKDDSIDNKVLTRSDKARGKSDNVPSEEVVKKMKNYWRQLLNAKLITQRKFDNLTKAERGGLSELDKAGFIKRQLVETRQITKHVAQILDSRMNTKYDENDKLIREVKVITLKSKLVSDFRKDFQFYKVREINNYHHAHDAYLNAVVGTALIKKYPKLESEFVYGDYKVYDVRKMIAKSEQEIGKATAKYFFYSNIMNFFKTEITLANGEIRKRPLIETNGETGEIVWDKGRDFATVRKVLSMPQVNIVKKTEVQTGGFSKESILPKRNSDKLIARKKDWDPKKYGGFDSPTVAYSVLVVAKVEKGKSKKLKSVKELLGITIMERSSFEKNPIDFLEAKGYKEVKKDLIIKLPKYSLFELENGRKRMLASAGELQKGNELALPSKYVNFLYLASHYEKLKGSPEDNEQKQLFVEQHKHYLDEIIEQISEFSKRVILADANLDKVLSAYNKHRDKPIREQAENIIHLFTLTNLGAPAAFKYFDTTIDRKRYTSTKEVLDATLIHQSITGLYETRIDLSQLGGDGGGGSGSSGGGGGTAPLEEEYRLFLEAPIQNVTLLEQWKREIPKVWAEINPPGLASTQAPIHVQLLSTALPVRVRQYPITLEAKRSLRETIRKFRAAGILRPVHSPWNTPLLPVRKSGTSEYRMVQDLREVNKRVETIHPTVPNPYTLLSLLPPDRIWYSVLDLKDAFFCIPLAPESQLIFAFEWADAEEGESGQLTWTRLPQGFKNSPTLFNEALNRDLQGFRLDHPSVSLLQYVDDLLIAADTQAACLSATRDLLMTLAELGYRVSGKKAQLCQEEVTYLGFKIHKGSRSLSNSRTQAILQIPVPKTKRQVREFLGTIGYCRLWIPGFAELAQPLYAATRPGNDPLVWGEKEEEAFQSLKLALTQPPALALPSLDKPFQLFVEETSGAAKGVLTQALGPWKRPVAYLSKRLDPVAAGWPRCLRAIAAAALLTREASKLTFGQDIEITSSHNLESLLRSPPDKWLTNARITQYQVLLLDPPRVRFKQTAALNPATLLPETDDTLPIHHCLDTLDSLTSTRPDLTDQPLAQAEATLFTDGSSYIRDGKRYAGAAVVTLDSVIWAEPLPIGTSAQKAELIALTKALEWSKDKSVNIYTDSRYAFATLHVHGMIYRERGWLTAGGKAIKNAPEILALLTAVWLPKRVAVMHCKGHQKDDAPTSTGNRRADEVAREVAIRPLSTQATISAGKRTADGSEFEKRTADGSEFESPKKKAKVE

SEQ ID NO: 6818 - protein, 2100 aa, synthetic construct
MPAAKRVKLDGGDKKYSIGLDIGTNSVGWAVITDEYKVPSKKFKVLGNTDRHSIKKNLIGALLFDSGETAEATRLKRTARRRYTRRKNRICYLQEIFSNEMAKVDDSFFHRLEESFLVEEDKKHERHPIFGNIVDEVAYHEKYPTIYHLRKKLVDSTDKADLRLIYLALAHMIKFRGHFLIEGDLNPDNSDVDKLFIQLVQTYNQLFEENPINASGVDAKAILSARLSKSRRLENLIAQLPGEKKNGLFGNLIALSLGLTPNFKSNFDLAEDAKLQLSKDTYDDDLDNLLAQIGDQYADLFLAAKNLSDAILLSDILRVNTEITKAPLSASMIKRYDEHHQDLTLLKALVRQQLPEKYKEIFFDQSKNGYAGYIDGGASQEEFYKFIKPILEKMDGTEELLVKLNREDLLRKQRTFDNGSIPHQIHLGELHAILRRQEDFYPFLKDNREKIEKILTFRIPYYVGPLARGNSRFAWMTRKSEETITPWNFEEVVDKGASAQSFIERMTNFDKNLPNEKVLPKHSLLYEYFTVYNELTKVKYVTEGMRKPAFLSGEQKKAIVDLLFKTNRKVTVKQLKEDYFKKIECFDSVEISGVEDRFNASLGTYHDLLKIIKDKDFLDNEENEDILEDIVLTLTLFEDREMIEERLKTYAHLFDDKVMKQLKRRRYTGWGRLSRKLINGIRDKQSGKTILDFLKSDGFANRNFMQLIHDDSLTFKEDIQKAQVSGQGDSLHEHIANLAGSPAIKKGILQTVKVVDELVKVMGRHKPENIVIEMARENQTTQKGQKNSRERMKRIEEGIKELGSQILKEHPVENTQLQNEKLYLYYLQNGRDMYVDQELDINRLSDYDVDHIVPQSFLKDDSIDNKVLTRSDKARGKSDNVPSEEVVKKMKNYWRQLLNAKLITQRKFDNLTKAERGGLSELDKAGFIKRQLVETRQITKHVAQILDSRMNTKYDENDKLIREVKVITLKSKLVSDFRKDFQFYKVREINNYHHAHDAYLNAVVGTALIKKYPKLESEFVYGDYKVYDVRKMIAKSEQEIGKATAKYFFYSNIMNFFKTEITLANGEIRKRPLIETNGETGEIVWDKGRDFATVRKVLSMPQVNIVKKTEVQTGGFSKESILPKRNSDKLIARKKDWDPKKYGGFDSPTVAYSVLVVAKVEKGKSKKLKSVKELLGITIMERSSFEKNPIDFLEAKGYKEVKKDLIIKLPKYSLFELENGRKRMLASAGELQKGNELALPSKYVNFLYLASHYEKLKGSPEDNEQKQLFVEQHKHYLDEIIEQISEFSKRVILADANLDKVLSAYNKHRDKPIREQAENIIHLFTLTNLGAPAAFKYFDTTIDRKRYTSTKEVLDATLIHQSITGLYETRIDLSQLGGDGGGGSGSSGGGGGTVSLQDEHRLFDIPVTTSLPDVWLQDFPQAWAETGGLGRAKCQAPIIIDLKPTAVPVSIKQYPMSLEAHMGIRQHIIKFLELGVLRPCRSPWNTPLLPVKKPGTQDYRPVQDLREINKRTVDIHPTVPNPYNLLSTLKPDYSWYTVLDLKDAFFCLPLAPQSQELFAFEWKDPERGISGQLTWTRLPQGFKNSPTLFDEALHRDLTDFRTQHPEVTLLQYVDDLLLAAPTKKACTQGTRHLLQELGEKGYRASAKKAQICQTKVTYLGYILSEGKRWLTPGRIETVARIPPPRNPREVREFLGTAGFCRLWIPGFAELAAPLYALTKESTPFTWQTEHQLAFEALKKALLSAPALGLPDTSKPFTLFLDERQGIAKGVLTQKLGPWKRPVAYLSKKLDPVAAGWPPCLRIMAATAMLVKDSAKLTLGQPLTVITPHTLEAIVRQPPDRWITNARLTHYQALLLDTDRVQFGPPVTLNPATLLPVPENQPSPHDCRQVLAETHGTREDLKDQELPDADHTWYTDGSSYLDSGTRRAGAAVVDGHNTIWAQSLPPGTSAQKAELIALTKALELSKGKKANIYTDSRYAFATAHTHGSIYERRGLLTSEGKEIKNKAEIIALLKALFLPQEVAIIHCPGHQKGQDPVAVGNRQADRVARQAAMAEVLTLATEPDNTSHITAGKRTADGSEFEKRTADGSEFESPKKKAKVE

SEQ ID NO: 6819 - protein, 2094 aa, synthetic construct
MPAAKRVKLDGGDKKYSIGLDIGTNSVGWAVITDEYKVPSKKFKVLGNTDRHSIKKNLIGALLFDSGETAEATRLKRTARRRYTRRKNRICYLQEIFSNEMAKVDDSFFHRLEESFLVEEDKKHERHPIFGNIVDEVAYHEKYPTIYHLRKKLVDSTDKADLRLIYLALAHMIKFRGHFLIEGDLNPDNSDVDKLFIQLVQTYNQLFEENPINASGVDAKAILSARLSKSRRLENLIAQLPGEKKNGLFGNLIALSLGLTPNFKSNFDLAEDAKLQLSKDTYDDDLDNLLAQIGDQYADLFLAAKNLSDAILLSDILRVNTEITKAPLSASMIKRYDEHHQDLTLLKALVRQQLPEKYKEIFFDQSKNGYAGYIDGGASQEEFYKFIKPILEKMDGTEELLVKLNREDLLRKQRTFDNGSIPHQIHLGELHAILRRQEDFYPFLKDNREKIEKILTFRIPYYVGPLARGNSRFAWMTRKSEETITPWNFEEVVDKGASAQSFIERMTNFDKNLPNEKVLPKHSLLYEYFTVYNELTKVKYVTEGMRKPAFLSGEQKKAIVDLLFKTNRKVTVKQLKEDYFKKIECFDSVEISGVEDRFNASLGTYHDLLKIIKDKDFLDNEENEDILEDIVLTLTLFEDREMIEERLKTYAHLFDDKVMKQLKRRRYTGWGRLSRKLINGIRDKQSGKTILDFLKSDGFANRNFMQLIHDDSLTFKEDIQKAQVSGQGDSLHEHIANLAGSPAIKKGILQTVKVVDELVKVMGRHKPENIVIEMARENQTTQKGQKNSRERMKRIEEGIKELGSQILKEHPVENTQLQNEKLYLYYLQNGRDMYVDQELDINRLSDYDVDHIVPQSFLKDDSIDNKVLTRSDKARGKSDNVPSEEVVKKMKNYWRQLLNAKLITQRKFDNLTKAERGGLSELDKAGFIKRQLVETRQITKHVAQILDSRMNTKYDENDKLIREVKVITLKSKLVSDFRKDFQFYKVREINNYHHAHDAYLNAVVGTALIKKYPKLESEFVYGDYKVYDVRKMIAKSEQEIGKATAKYFFYSNIMNFFKTEITLANGEIRKRPLIETNGETGEIVWDKGRDFATVRKVLSMPQVNIVKKTEVQTGGFSKESILPKRNSDKLIARKKDWDPKKYGGFDSPTVAYSVLVVAKVEKGKSKKLKSVKELLGITIMERSSFEKNPIDFLEAKGYKEVKKDLIIKLPKYSLFELENGRKRMLASAGELQKGNELALPSKYVNFLYLASHYEKLKGSPEDNEQKQLFVEQHKHYLDEIIEQISEFSKRVILADANLDKVLSAYNKHRDKPIREQAENIIHLFTLTNLGAPAAFKYFDTTIDRKRYTSTKEVLDATLIHQSITGLYETRIDLSQLGGDGGGGSGSSGGGGGTLNLEDEYRLYETSAEPEVSPGSTWLSDFPQAWAETGGMGLAVRQAPLIIPLKATSTPVSIKQYPMSQEAKLGIKPHIQRLLDQGILVPCQSPWNTPLLPVKKPGTNDYRPVQDLREVNKRVEDIHPTVPNPYNLLSGLPPSHRWYTVLDLKDAFFCLRLHPTSQPLFAFEWRDPGMGISGQLTWTRLPQGFKNSPTLFNEALHRDLADFRIQHPDLILLQYVDDILLAATSELDCQQGTRALLLTLGNLGYRASAKKAQLCQKQVKYLGYLLKEGQRWLTEARKETVMGQPTPKTPRQLREFLGKAGFCRLFIPGFAEMAAPLYPLTKPGTLFNWGPDQQKAYQEIKQALLTAPALGLPDLTKPFELFVDEKQGYAKGVLTQKLGPWRRPVAYLSKKLDPVAAGWPPCLRMVAAIAVLRKDAGKLTMGQPLVILAPHAVEALVKQPPDRWLSNARMTHYQAMLLDTDRVQFGPVVALNPATLLPLPEEGAPHDCLEILAETHGTRPDLTDQPIPDADHTWYTDGSSFLQEGQRKAGAAVTTETEVIWARALPAGTSAQRAELIALTQALKMAEGKRLNVYTDSRYAFATAHIHGEIYRRRGWLTSEGREIKNKSEILALLKALFLPKRLSIIHCLGHQKGDSAEARGNRLADQAAREAAIKTPPDTSTLLAGKRTADGSEFEKRTADGSEFESPKKKAKVE

SEQ ID NO: 6820 - protein, 2094 aa, synthetic construct
MPAAKRVKLDGGDKKYSIGLDIGTNSVGWAVITDEYKVPSKKFKVLGNTDRHSIKKNLIGALLFDSGETAEATRLKRTARRRYTRRKNRICYLQEIFSNEMAKVDDSFFHRLEESFLVEEDKKHERHPIFGNIVDEVAYHEKYPTIYHLRKKLVDSTDKADLRLIYLALAHMIKFRGHFLIEGDLNPDNSDVDKLFIQLVQTYNQLFEENPINASGVDAKAILSARLSKSRRLENLIAQLPGEKKNGLFGNLIALSLGLTPNFKSNFDLAEDAKLQLSKDTYDDDLDNLLAQIGDQYADLFLAAKNLSDAILLSDILRVNTEITKAPLSASMIKRYDEHHQDLTLLKALVRQQLPEKYKEIFFDQSKNGYAGYIDGGASQEEFYKFIKPILEKMDGTEELLVKLNREDLLRKQRTFDNGSIPHQIHLGELHAILRRQEDFYPFLKDNREKIEKILTFRIPYYVGPLARGNSRFAWMTRKSEETITPWNFEEVVDKGASAQSFIERMTNFDKNLPNEKVLPKHSLLYEYFTVYNELTKVKYVTEGMRKPAFLSGEQKKAIVDLLFKTNRKVTVKQLKEDYFKKIECFDSVEISGVEDRFNASLGTYHDLLKIIKDKDFLDNEENEDILEDIVLTLTLFEDREMIEERLKTYAHLFDDKVMKQLKRRRYTGWGRLSRKLINGIRDKQSGKTILDFLKSDGFANRNFMQLIHDDSLTFKEDIQKAQVSGQGDSLHEHIANLAGSPAIKKGILQTVKVVDELVKVMGRHKPENIVIEMARENQTTQKGQKNSRERMKRIEEGIKELGSQILKEHPVENTQLQNEKLYLYYLQNGRDMYVDQELDINRLSDYDVDHIVPQSFLKDDSIDNKVLTRSDKARGKSDNVPSEEVVKKMKNYWRQLLNAKLITQRKFDNLTKAERGGLSELDKAGFIKRQLVETRQITKHVAQILDSRMNTKYDENDKLIREVKVITLKSKLVSDFRKDFQFYKVREINNYHHAHDAYLNAVVGTALIKKYPKLESEFVYGDYKVYDVRKMIAKSEQEIGKATAKYFFYSNIMNFFKTEITLANGEIRKRPLIETNGETGEIVWDKGRDFATVRKVLSMPQVNIVKKTEVQTGGFSKESILPKRNSDKLIARKKDWDPKKYGGFDSPTVAYSVLVVAKVEKGKSKKLKSVKELLGITIMERSSFEKNPIDFLEAKGYKEVKKDLIIKLPKYSLFELENGRKRMLASAGELQKGNELALPSKYVNFLYLASHYEKLKGSPEDNEQKQLFVEQHKHYLDEIIEQISEFSKRVILADANLDKVLSAYNKHRDKPIREQAENIIHLFTLTNLGAPAAFKYFDTTIDRKRYTSTKEVLDATLIHQSITGLYETRIDLSQLGGDGGGGSGSSGGGGGLGIEDEYRLHETSTEPDVSLGSTWLSDFPQAWAETGGMGLAVRQAPLIIPLKATSTPVSIQQYPMSHEARLGIKPHIQRLLDQGILVPCQSPWNTPLLPVKKPGTNDYRPVQDLREVNKRVEDIHPTVPNPYNLLSGLPPSHQWYTVLDLKDAFFCLRLHPTSQPLFAFEWRDPGMGISGQLTWTRLPQGFKNSPTLFNEALHRDLADFRIQHPDLILLQYVDDILLAATSELDCQQGTRALLQTLGDLGYRASAKKAQICQKQVKYLGYLLREGQRWLTEARKETVMGQPVPKTPRQLREFLGKAGFCRLFIPGFAEMAAPLYPLTKPGTLFSWGPDQQKAYQEIKQALLTAPALGLPDLTKPFELFVDEKQGYAKGVLTQKLGPWRRPVAYLSKKLDPVAAGWPPCLRMVAAIAVLTKDAGKLTMGQPLVILAPHAVEALVKQPPDRWLSNARMTHYQAMLLDTDRVQFGPVVALNPATLLPLPEEGAPHDCLEILAETHGTRPDLTDQPIPDADHTWYTDGSSFLQEGQRKAGAAVTTETEVIWAGALPAGTSAQRAELIALTQALKMAEGKRLNVYTDSRYAFATAHIHGEIYRRRGWLTSEGREIKNKSEILALLKALFLPKRLSIIHCLGHQKGDSAEARGNRLADQAAREAAIKTPPDTSTLLIAGKRTADGSEFEKRTADGSEFESPKKKAKVE

SEQ ID NO: 6821 - protein, 2174 aa, synthetic construct
MPAAKRVKLDGGDKKYSIGLDIGTNSVGWAVITDEYKVPSKKFKVLGNTDRHSIKKNLIGALLFDSGETAEATRLKRTARRRYTRRKNRICYLQEIFSNEMAKVDDSFFHRLEESFLVEEDKKHERHPIFGNIVDEVAYHEKYPTIYHLRKKLVDSTDKADLRLIYLALAHMIKFRGHFLIEGDLNPDNSDVDKLFIQLVQTYNQLFEENPINASGVDAKAILSARLSKSRRLENLIAQLPGEKKNGLFGNLIALSLGLTPNFKSNFDLAEDAKLQLSKDTYDDDLDNLLAQIGDQYADLFLAAKNLSDAILLSDILRVNTEITKAPLSASMIKRYDEHHQDLTLLKALVRQQLPEKYKEIFFDQSKNGYAGYIDGGASQEEFYKFIKPILEKMDGTEELLVKLNREDLLRKQRTFDNGSIPHQIHLGELHAILRRQEDFYPFLKDNREKIEKILTFRIPYYVGPLARGNSRFAWMTRKSEETITPWNFEEVVDKGASAQSFIERMTNFDKNLPNEKVLPKHSLLYEYFTVYNELTKVKYVTEGMRKPAFLSGEQKKAIVDLLFKTNRKVTVKQLKEDYFKKIECFDSVEISGVEDRFNASLGTYHDLLKIIKDKDFLDNEENEDILEDIVLTLTLFEDREMIEERLKTYAHLFDDKVMKQLKRRRYTGWGRLSRKLINGIRDKQSGKTILDFLKSDGFANRNFMQLIHDDSLTFKEDIQKAQVSGQGDSLHEHIANLAGSPAIKKGILQTVKVVDELVKVMGRHKPENIVIEMARENQTTQKGQKNSRERMKRIEEGIKELGSQILKEHPVENTQLQNEKLYLYYLQNGRDMYVDQELDINRLSDYDVDHIVPQSFLKDDSIDNKVLTRSDKARGKSDNVPSEEVVKKMKNYWRQLLNAKLITQRKFDNLTKAERGGLSELDKAGFIKRQLVETRQITKHVAQILDSRMNTKYDENDKLIREVKVITLKSKLVSDFRKDFQFYKVREINNYHHAHDAYLNAVVGTALIKKYPKLESEFVYGDYKVYDVRKMIAKSEQEIGKATAKYFFYSNIMNFFKTEITLANGEIRKRPLIETNGETGEIVWDKGRDFATVRKVLSMPQVNIVKKTEVQTGGFSKESILPKRNSDKLIARKKDWDPKKYGGFDSPTVAYSVLVVAKVEKGKSKKLKSVKELLGITIMERSSFEKNPIDFLEAKGYKEVKKDLIIKLPKYSLFELENGRKRMLASAGELQKGNELALPSKYVNFLYLASHYEKLKGSPEDNEQKQLFVEQHKHYLDEIIEQISEFSKRVILADANLDKVLSAYNKHRDKPIREQAENIIHLFTLTNLGAPAAFKYFDTTIDRKRYTSTKEVLDATLIHQSITGLYETRIDLSQLGGDGGGGSGSSGGGGGMDPLQLLQPLEAEIKGTKLKAHWNSGATITCVPEAFLEDERPIQTMLIKTIHGEKQQDVYYLTFKVQGRKVEAEVLASPYDYILLNPSDVPWLMKKPLQLTVLVPLHEYQERLLQQTALPKEQKELLQKLFLKYDALWQHWENQVGHRRIKPHNIATGTLAPRPQKQYPINPKAKPSIQIVIDDLLKQGVLIQQNSTMNTPVYPVPKPDGKWRMVLDYREVNKTIPLIAAQNQHSAGILSSIYRGKYKTTLDLTNGFWAHPITPESYWLTAFTWQGKQYCWTRLPQGFLNSPALFNADVVDLLKEIPNVQAYVDDIYISHDDPQEHLEQLEKIFSILLNAGYVVSLKKSEIAQREVEFLGFNITKEGRGLTDTFKQKLLNITPPKDLKQLQSILGLLNFARNFIPNYSELVKPLYTIVAPANGKFISWTEDNSNQLQHIISVLNQADNLEERNPETRLIIKVNSSPSAGYIRYYNEGSKRPIMYVNYIFSKAEAKFTQTEKLLTTMHKGLIKAMDLAMGQEILVYSPIVSMTKIQRTPLPERKALPVRWITWMTYLEDPRIQFHYDKSLPELQQIPNVTEDVIAKTKHPSEFAMVFYTDGSAIKHPDVNKSHSAGMGIAQVQFIPEYKIVHQWSIPLGDHTAQLAEIAAVEFACKKALKISGPVLIVTDSFYVAESANKELPYWKSNGFLNNKKKPLRHVSKWKSIAECLQLKPDIIIMHEKGHQQPMTTLHTEGNNLADKLATQGSYVVHAGKRTADGSEFEKRTADGSEFESPKKKAKVE

SEQ ID NO: 6822 - protein, 2096 aa, synthetic construct
MPAAKRVKLDGGDKKYSIGLDIGTNSVGWAVITDEYKVPSKKFKVLGNTDRHSIKKNLIGALLFDSGETAEATRLKRTARRRYTRRKNRICYLQEIFSNEMAKVDDSFFHRLEESFLVEEDKKHERHPIFGNIVDEVAYHEKYPTIYHLRKKLVDSTDKADLRLIYLALAHMIKFRGHFLIEGDLNPDNSDVDKLFIQLVQTYNQLFEENPINASGVDAKAILSARLSKSRRLENLIAQLPGEKKNGLFGNLIALSLGLTPNFKSNFDLAEDAKLQLSKDTYDDDLDNLLAQIGDQYADLFLAAKNLSDAILLSDILRVNTEITKAPLSASMIKRYDEHHQDLTLLKALVRQQLPEKYKEIFFDQSKNGYAGYIDGGASQEEFYKFIKPILEKMDGTEELLVKLNREDLLRKQRTFDNGSIPHQIHLGELHAILRRQEDFYPFLKDNREKIEKILTFRIPYYVGPLARGNSRFAWMTRKSEETITPWNFEEVVDKGASAQSFIERMTNFDKNLPNEKVLPKHSLLYEYFTVYNELTKVKYVTEGMRKPAFLSGEQKKAIVDLLFKTNRKVTVKQLKEDYFKKIECFDSVEISGVEDRFNASLGTYHDLLKIIKDKDFLDNEENEDILEDIVLTLTLFEDREMIEERLKTYAHLFDDKVMKQLKRRRYTGWGRLSRKLINGIRDKQSGKTILDFLKSDGFANRNFMQLIHDDSLTFKEDIQKAQVSGQGDSLHEHIANLAGSPAIKKGILQTVKVVDELVKVMGRHKPENIVIEMARENQTTQKGQKNSRERMKRIEEGIKELGSQILKEHPVENTQLQNEKLYLYYLQNGRDMYVDQELDINRLSDYDVDHIVPQSFLKDDSIDNKVLTRSDKARGKSDNVPSEEVVKKMKNYWRQLLNAKLITQRKFDNLTKAERGGLSELDKAGFIKRQLVETRQITKHVAQILDSRMNTKYDENDKLIREVKVITLKSKLVSDFRKDFQFYKVREINNYHHAHDAYLNAVVGTALIKKYPKLESEFVYGDYKVYDVRKMIAKSEQEIGKATAKYFFYSNIMNFFKTEITLANGEIRKRPLIETNGETGEIVWDKGRDFATVRKVLSMPQVNIVKKTEVQTGGFSKESILPKRNSDKLIARKKDWDPKKYGGFDSPTVAYSVLVVAKVEKGKSKKLKSVKELLGITIMERSSFEKNPIDFLEAKGYKEVKKDLIIKLPKYSLFELENGRKRMLASAGELQKGNELALPSKYVNFLYLASHYEKLKGSPEDNEQKQLFVEQHKHYLDEIIEQISEFSKRVILADANLDKVLSAYNKHRDKPIREQAENIIHLFTLTNLGAPAAFKYFDTTIDRKRYTSTKEVLDATLIHQSITGLYETRIDLSQLGGDGGGGGGGSGSSGGTAPLEEEYRLFLEAPIQNVTLLEQWKREIPKVWAEINPPGLASTQAPIHVQLLSTALPVRVRQYPITLEAKRSLRETIRKFRAAGILRPVHSPWNTPLLPVRKSGTSEYRMVQDLREVNKRVETIHPTVPNPYTLLSLLPPDRIWYSVLDLKDAFFCIPLAPESQLIFAFEWADAEEGESGQLTWTRLPQGFKNSPTLFDEALNRDLQGFRLDHPSVSLLQYVDDLLIAADTQAACLSATRDLLMTLAELGYRVSGKKAQLCQEEVTYLGFKIHKGSRSLSNSRTQAILQIPVPKTKRQVREFLGTIGYCRLWIPGFAELAQPLYAATRGGNDPLVWGEKEEEAFQSLKLALTQPPALALPSLDKPFQLFVEETSGAAKGVLTQALGPWKRPVAYLSKRLDPVAAGWPRCLRAIAAAALLTREASKLTFGQDIEITSSHNLESLLRSPPDKWLTNARITQYQVLLLDPPRVRFKQTAALNPATLLPETDDTLPIHHCLDTLDSLTSTRPDLTDQPLAQAEATLFTDGSSYIRDGKRYAGAAVVTLDSVIWAEPLPIGTSAQKAELIALTKALEWSKDKSVNIYTDSRYAFATLHVHGMIYRERGLLTAGGKAIKNAPEILALLTAVWLPKRVAVMHCKGHQKDDAPTSTGNRRADEVAREVAIRPLSTQATISAGKRTADGSEFEKRTADGSEFESPKKKAKVE

SEQ ID NO: 6823 - protein, 2096 aa, synthetic construct
MPAAKRVKLDGGDKKYSIGLDIGTNSVGWAVITDEYKVPSKKFKVLGNTDRHSIKKNLIGALLFDSGETAEATRLKRTARRRYTRRKNRICYLQEIFSNEMAKVDDSFFHRLEESFLVEEDKKHERHPIFGNIVDEVAYHEKYPTIYHLRKKLVDSTDKADLRLIYLALAHMIKFRGHFLIEGDLNPDNSDVDKLFIQLVQTYNQLFEENPINASGVDAKAILSARLSKSRRLENLIAQLPGEKKNGLFGNLIALSLGLTPNFKSNFDLAEDAKLQLSKDTYDDDLDNLLAQIGDQYADLFLAAKNLSDAILLSDILRVNTEITKAPLSASMIKRYDEHHQDLTLLKALVRQQLPEKYKEIFFDQSKNGYAGYIDGGASQEEFYKFIKPILEKMDGTEELLVKLNREDLLRKQRTFDNGSIPHQIHLGELHAILRRQEDFYPFLKDNREKIEKILTFRIPYYVGPLARGNSRFAWMTRKSEETITPWNFEEVVDKGASAQSFIERMTNFDKNLPNEKVLPKHSLLYEYFTVYNELTKVKYVTEGMRKPAFLSGEQKKAIVDLLFKTNRKVTVKQLKEDYFKKIECFDSVEISGVEDRFNASLGTYHDLLKIIKDKDFLDNEENEDILEDIVLTLTLFEDREMIEERLKTYAHLFDDKVMKQLKRRRYTGWGRLSRKLINGIRDKQSGKTILDFLKSDGFANRNFMQLIHDDSLTFKEDIQKAQVSGQGDSLHEHIANLAGSPAIKKGILQTVKVVDELVKVMGRHKPENIVIEMARENQTTQKGQKNSRERMKRIEEGIKELGSQILKEHPVENTQLQNEKLYLYYLQNGRDMYVDQELDINRLSDYDVDHIVPQSFLKDDSIDNKVLTRSDKARGKSDNVPSEEVVKKMKNYWRQLLNAKLITQRKFDNLTKAERGGLSELDKAGFIKRQLVETRQITKHVAQILDSRMNTKYDENDKLIREVKVITLKSKLVSDFRKDFQFYKVREINNYHHAHDAYLNAVVGTALIKKYPKLESEFVYGDYKVYDVRKMIAKSEQEIGKATAKYFFYSNIMNFFKTEITLANGEIRKRPLIETNGETGEIVWDKGRDFATVRKVLSMPQVNIVKKTEVQTGGFSKESILPKRNSDKLIARKKDWDPKKYGGFDSPTVAYSVLVVAKVEKGKSKKLKSVKELLGITIMERSSFEKNPIDFLEAKGYKEVKKDLIIKLPKYSLFELENGRKRMLASAGELQKGNELALPSKYVNFLYLASHYEKLKGSPEDNEQKQLFVEQHKHYLDEIIEQISEFSKRVILADANLDKVLSAYNKHRDKPIREQAENIIHLFTLTNLGAPAAFKYFDTTIDRKRYTSTKEVLDATLIHQSITGLYETRIDLSQLGGDGGGGGGGSGSSGGTAPLEEEYRLFLEAPIQNVTLLEQWKREIPKVWAEINPPGLASTQAPIHVQLLSTALPVRVRQYPITLEAKRSLRETIRKFRAAGILRPVHSPWNTPLLPVRKSGTSEYRMVQDLREVNKRVETIHPTVPNPYTLLSLLPPDRIWYSVLDLKDAFFCIPLAPESQLIFAFEWADAEEGESGQLTWTRLPQGFKNSPTLFNEALNRDLQGFRLDHPSVSLLQYVDDLLIAADTQAACLSATRDLLMTLAELGYRVSGKKAQLCQEEVTYLGFKIHKGSRSLSNSRTQAILQIPVPKTKRQVREFLGTIGYCRLWIPGFAELAQPLYAATRPGNDPLVWGEKEEEAFQSLKLALTQPPALALPSLDKPFQLFVEETSGAAKGVLTQALGPWKRPVAYLSKRLDPVAAGWPRCLRAIAAAALLTREASKLTFGQDIEITSSHNLESLLRSPPDKWLTNARITQYQVLLLDPPRVRFKQTAALNPATLLPETDDTLPIHHCLDTLDSLTSTRPDLTDQPLAQAEATLFTDGSSYIRDGKRYAGAAVVTLDSVIWAEPLPIGTSAQKAELIALTKALEWSKDKSVNIYTDSRYAFATLHVHGMIYRERGWLTAGGKAIKNAPEILALLTAVWLPKRVAVMHCKGHQKDDAPTSTGNRRADEVAREVAIRPLSTQATISAGKRTADGSEFEKRTADGSEFESPKKKAKVE

SEQ ID NO: 6824 - protein, 2096 aa, synthetic construct
MPAAKRVKLDGGDKKYSIGLDIGTNSVGWAVITDEYKVPSKKFKVLGNTDRHSIKKNLIGALLFDSGETAEATRLKRTARRRYTRRKNRICYLQEIFSNEMAKVDDSFFHRLEESFLVEEDKKHERHPIFGNIVDEVAYHEKYPTIYHLRKKLVDSTDKADLRLIYLALAHMIKFRGHFLIEGDLNPDNSDVDKLFIQLVQTYNQLFEENPINASGVDAKAILSARLSKSRRLENLIAQLPGEKKNGLFGNLIALSLGLTPNFKSNFDLAEDAKLQLSKDTYDDDLDNLLAQIGDQYADLFLAAKNLSDAILLSDILRVNTEITKAPLSASMIKRYDEHHQDLTLLKALVRQQLPEKYKEIFFDQSKNGYAGYIDGGASQEEFYKFIKPILEKMDGTEELLVKLNREDLLRKQRTFDNGSIPHQIHLGELHAILRRQEDFYPFLKDNREKIEKILTFRIPYYVGPLARGNSRFAWMTRKSEETITPWNFEEVVDKGASAQSFIERMTNFDKNLPNEKVLPKHSLLYEYFTVYNELTKVKYVTEGMRKPAFLSGEQKKAIVDLLFKTNRKVTVKQLKEDYFKKIECFDSVEISGVEDRFNASLGTYHDLLKIIKDKDFLDNEENEDILEDIVLTLTLFEDREMIEERLKTYAHLFDDKVMKQLKRRRYTGWGRLSRKLINGIRDKQSGKTILDFLKSDGFANRNFMQLIHDDSLTFKEDIQKAQVSGQGDSLHEHIANLAGSPAIKKGILQTVKVVDELVKVMGRHKPENIVIEMARENQTTQKGQKNSRERMKRIEEGIKELGSQILKEHPVENTQLQNEKLYLYYLQNGRDMYVDQELDINRLSDYDVDHIVPQSFLKDDSIDNKVLTRSDKARGKSDNVPSEEVVKKMKNYWRQLLNAKLITQRKFDNLTKAERGGLSELDKAGFIKRQLVETRQITKHVAQILDSRMNTKYDENDKLIREVKVITLKSKLVSDFRKDFQFYKVREINNYHHAHDAYLNAVVGTALIKKYPKLESEFVYGDYKVYDVRKMIAKSEQEIGKATAKYFFYSNIMNFFKTEITLANGEIRKRPLIETNGETGEIVWDKGRDFATVRKVLSMPQVNIVKKTEVQTGGFSKESILPKRNSDKLIARKKDWDPKKYGGFDSPTVAYSVLVVAKVEKGKSKKLKSVKELLGITIMERSSFEKNPIDFLEAKGYKEVKKDLIIKLPKYSLFELENGRKRMLASAGELQKGNELALPSKYVNFLYLASHYEKLKGSPEDNEQKQLFVEQHKHYLDEIIEQISEFSKRVILADANLDKVLSAYNKHRDKPIREQAENIIHLFTLTNLGAPAAFKYFDTTIDRKRYTSTKEVLDATLIHQSITGLYETRIDLSQLGGDGGGGGGGSGSSGGTAPLEEEYRLFLEAPIQNVTLLEQWKREIPKVWAEINPPGLASTQAPIHVQLLSTALPVRVRQYPITLEAKRSLRETIRKFRAAGILRPVHSPWNTPLLPVRKSGTSEYRMVQDLREVNKRVETIHPTVPNPYTLLSLLPPDRIWYSVLDLKDAFFCIPLAPESQLIFAFEWADAEEGESGQLTWTRLPQGFKNSPTLFNEALNRDLQGFRLDHPSVSLLQYVDDLLIAADTQAACLSATRDLLMTLAELGYRVSGKKAQLCQEEVTYLGFKIHKGSRSLSNSRTQAILQIPVPKTKRQVREFLGKIGYCRLFIPGFAELAQPLYAATRPGNDPLVWGEKEEEAFQSLKLALTQPPALALPSLDKPFQLFVEETSGAAKGVLTQALGPWKRPVAYLSKRLDPVAAGWPRCLRAIAAAALLTREASKLTFGQDIEITSSHNLESLLRSPPDKWLTNARITQYQVLLLDPPRVRFKQTAALNPATLLPETDDTLPIHHCLDTLDSLTSTRPDLTDQPLAQAEATLFTDGSSYIRDGKRYAGAAVVTLDSVIWAEPLPIGTSAQKAELIALTKALEWSKDKSVNIYTDSRYAFATLHVHGMIYRERGWLTAGGKAIKNAPEILALLTAVWLPKRVAVMHCKGHQKDDAPTSTGNRRADEVAREVAIRPLSTQATISAGKRTADGSEFEKRTADGSEFESPKKKAKVE

SEQ ID NO: 6825 - protein, 2100 aa, synthetic construct
MPAAKRVKLDGGDKKYSIGLDIGTNSVGWAVITDEYKVPSKKFKVLGNTDRHSIKKNLIGALLFDSGETAEATRLKRTARRRYTRRKNRICYLQEIFSNEMAKVDDSFFHRLEESFLVEEDKKHERHPIFGNIVDEVAYHEKYPTIYHLRKKLVDSTDKADLRLIYLALAHMIKFRGHFLIEGDLNPDNSDVDKLFIQLVQTYNQLFEENPINASGVDAKAILSARLSKSRRLENLIAQLPGEKKNGLFGNLIALSLGLTPNFKSNFDLAEDAKLQLSKDTYDDDLDNLLAQIGDQYADLFLAAKNLSDAILLSDILRVNTEITKAPLSASMIKRYDEHHQDLTLLKALVRQQLPEKYKEIFFDQSKNGYAGYIDGGASQEEFYKFIKPILEKMDGTEELLVKLNREDLLRKQRTFDNGSIPHQIHLGELHAILRRQEDFYPFLKDNREKIEKILTFRIPYYVGPLARGNSRFAWMTRKSEETITPWNFEEVVDKGASAQSFIERMTNFDKNLPNEKVLPKHSLLYEYFTVYNELTKVKYVTEGMRKPAFLSGEQKKAIVDLLFKTNRKVTVKQLKEDYFKKIECFDSVEISGVEDRFNASLGTYHDLLKIIKDKDFLDNEENEDILEDIVLTLTLFEDREMIEERLKTYAHLFDDKVMKQLKRRRYTGWGRLSRKLINGIRDKQSGKTILDFLKSDGFANRNFMQLIHDDSLTFKEDIQKAQVSGQGDSLHEHIANLAGSPAIKKGILQTVKVVDELVKVMGRHKPENIVIEMARENQTTQKGQKNSRERMKRIEEGIKELGSQILKEHPVENTQLQNEKLYLYYLQNGRDMYVDQELDINRLSDYDVDHIVPQSFLKDDSIDNKVLTRSDKARGKSDNVPSEEVVKKMKNYWRQLLNAKLITQRKFDNLTKAERGGLSELDKAGFIKRQLVETRQITKHVAQILDSRMNTKYDENDKLIREVKVITLKSKLVSDFRKDFQFYKVREINNYHHAHDAYLNAVVGTALIKKYPKLESEFVYGDYKVYDVRKMIAKSEQEIGKATAKYFFYSNIMNFFKTEITLANGEIRKRPLIETNGETGEIVWDKGRDFATVRKVLSMPQVNIVKKTEVQTGGFSKESILPKRNSDKLIARKKDWDPKKYGGFDSPTVAYSVLVVAKVEKGKSKKLKSVKELLGITIMERSSFEKNPIDFLEAKGYKEVKKDLIIKLPKYSLFELENGRKRMLASAGELQKGNELALPSKYVNFLYLASHYEKLKGSPEDNEQKQLFVEQHKHYLDEIIEQISEFSKRVILADANLDKVLSAYNKHRDKPIREQAENIIHLFTLTNLGAPAAFKYFDTTIDRKRYTSTKEVLDATLIHQSITGLYETRIDLSQLGGDGGGGGGGSGSSGGTVSLQDEHRLFDIPVTTSLPDVWLQDFPQAWAETGGLGRAKCQAPIIIDLKPTAVPVSIKQYPMSLEAHMGIRQHIIKFLELGVLRPCRSPWNTPLLPVKKPGTQDYRPVQDLREINKRTVDIHPTVPNPYNLLSTLKPDYSWYTVLDLKDAFFCLPLAPQSQELFAFEWKDPERGISGQLTWTRLPQGFKNSPTLFNEALHRDLTDFRTQHPEVTLLQYVDDLLLAAPTKKACTQGTRHLLQELGEKGYRASAKKAQICQTKVTYLGYILSEGKRWLTPGRIETVARIPPPRNPREVREFLGTAGFCRLWIPGFAELAAPLYALTKPSTPFTWQTEHQLAFEALKKALLSAPALGLPDTSKPFTLFLDERQGIAKGVLTQKLGPWKRPVAYLSKKLDPVAAGWPPCLRIMAATAMLVKDSAKLTLGQPLTVITPHTLEAIVRQPPDRWITNARLTHYQALLLDTDRVQFGPPVTLNPATLLPVPENQPSPHDCRQVLAETHGTREDLKDQELPDADHTWYTDGSSYLDSGTRRAGAAVVDGHNTIWAQSLPPGTSAQKAELIALTKALELSKGKKANIYTDSRYAFATAHTHGSIYERRGWLTSEGKEIKNKAEIIALLKALFLPQEVAIIHCPGHQKGQDPVAVGNRQADRVARQAAMAEVLTLATEPDNTSHITAGKRTADGSEFEKRTADGSEFESPKKKAKVE

SEQ ID NO: 6826 - protein, 2093 aa, synthetic construct
MPAAKRVKLDGGDKKYSIGLDIGTNSVGWAVITDEYKVPSKKFKVLGNTDRHSIKKNLIGALLFDSGETAEATRLKRTARRRYTRRKNRICYLQEIFSNEMAKVDDSFFHRLEESFLVEEDKKHERHPIFGNIVDEVAYHEKYPTIYHLRKKLVDSTDKADLRLIYLALAHMIKFRGHFLIEGDLNPDNSDVDKLFIQLVQTYNQLFEENPINASGVDAKAILSARLSKSRRLENLIAQLPGEKKNGLFGNLIALSLGLTPNFKSNFDLAEDAKLQLSKDTYDDDLDNLLAQIGDQYADLFLAAKNLSDAILLSDILRVNTEITKAPLSASMIKRYDEHHQDLTLLKALVRQQLPEKYKEIFFDQSKNGYAGYIDGGASQEEFYKFIKPILEKMDGTEELLVKLNREDLLRKQRTFDNGSIPHQIHLGELHAILRRQEDFYPFLKDNREKIEKILTFRIPYYVGPLARGNSRFAWMTRKSEETITPWNFEEVVDKGASAQSFIERMTNFDKNLPNEKVLPKHSLLYEYFTVYNELTKVKYVTEGMRKPAFLSGEQKKAIVDLLFKTNRKVTVKQLKEDYFKKIECFDSVEISGVEDRFNASLGTYHDLLKIIKDKDFLDNEENEDILEDIVLTLTLFEDREMIEERLKTYAHLFDDKVMKQLKRRRYTGWGRLSRKLINGIRDKQSGKTILDFLKSDGFANRNFMQLIHDDSLTFKEDIQKAQVSGQGDSLHEHIANLAGSPAIKKGILQTVKVVDELVKVMGRHKPENIVIEMARENQTTQKGQKNSRERMKRIEEGIKELGSQILKEHPVENTQLQNEKLYLYYLQNGRDMYVDQELDINRLSDYDVDHIVPQSFLKDDSIDNKVLTRSDKARGKSDNVPSEEVVKKMKNYWRQLLNAKLITQRKFDNLTKAERGGLSELDKAGFIKRQLVETRQITKHVAQILDSRMNTKYDENDKLIREVKVITLKSKLVSDFRKDFQFYKVREINNYHHAHDAYLNAVVGTALIKKYPKLESEFVYGDYKVYDVRKMIAKSEQEIGKATAKYFFYSNIMNFFKTEITLANGEIRKRPLIETNGETGEIVWDKGRDFATVRKVLSMPQVNIVKKTEVQTGGFSKESILPKRNSDKLIARKKDWDPKKYGGFDSPTVAYSVLVVAKVEKGKSKKLKSVKELLGITIMERSSFEKNPIDFLEAKGYKEVKKDLIIKLPKYSLFELENGRKRMLASAGELQKGNELALPSKYVNFLYLASHYEKLKGSPEDNEQKQLFVEQHKHYLDEIIEQISEFSKRVILADANLDKVLSAYNKHRDKPIREQAENIIHLFTLTNLGAPAAFKYFDTTIDRKRYTSTKEVLDATLIHQSITGLYETRIDLSQLGGDGGGGGGGSGSSGGTLQLEEEYRLFEPESTQKQEMDIWLKNFPQAWAETGGMGTAHCQAPVLIQLKATATPISIRQYPMPHEAYQGIKPHIRRMLDQGILKPCQSPWNTPLLPVKKPGTEDYRPVQDLREVNKRVEDIHPTVPNPYNLLSTLPPSHPWYTVLDLKDAFFCLRLHSESQLLFAFEWRDPEIGLSGQLTWTRLPQGFKNSPTLFNEALHSDLADFRVRYPALVLLQYVDDLLLAAATRTECLEGTKALLETLGNKGYRASAKKAQICLQEVTYLGYSLKDGQRWLTKARKEAILSIPVPKNSRQVREFLGKAGYCRLFIPGFAELAAPLYPLTRPGTLFQWGTEQQLAFEDIKKALLSSPALGLPDITKPFELFIDENSGFAKGVLVQKLGPWKRPVAYLSKKLDTVASGWPPCLRMVAAIAILVKDAGKLTLGQPLTILTSHPVEALVRQPPNKWLSNARMTHYQAMLLDAERVHFGPTVSLNPATLLPLPSGGNHHDCLQILAETHGTRPDLTDQPLPDADLTWYTDGSSFIRNGEREAGAAVTTESEVIWAAPLPPGTSAQRAELIALTQALKMAEGKKLTVYTDSRYAFATTHVHGEIYRRRGWLTSEGKEIKNKNEILALLEALFLPKRLSIIHCPGHQKGDSPQAKGNRLADDTAKKAATETHSSLTVLPAGKRTADGSEFEKRTADGSEFESPKKKAKVE

SEQ ID NO: 6827 - protein, 2174 aa, synthetic construct
MPAAKRVKLDGGDKKYSIGLDIGTNSVGWAVITDEYKVPSKKFKVLGNTDRHSIKKNLIGALLFDSGETAEATRLKRTARRRYTRRKNRICYLQEIFSNEMAKVDDSFFHRLEESFLVEEDKKHERHPIFGNIVDEVAYHEKYPTIYHLRKKLVDSTDKADLRLIYLALAHMIKFRGHFLIEGDLNPDNSDVDKLFIQLVQTYNQLFEENPINASGVDAKAILSARLSKSRRLENLIAQLPGEKKNGLFGNLIALSLGLTPNFKSNFDLAEDAKLQLSKDTYDDDLDNLLAQIGDQYADLFLAAKNLSDAILLSDILRVNTEITKAPLSASMIKRYDEHHQDLTLLKALVRQQLPEKYKEIFFDQSKNGYAGYIDGGASQEEFYKFIKPILEKMDGTEELLVKLNREDLLRKQRTFDNGSIPHQIHLGELHAILRRQEDFYPFLKDNREKIEKILTFRIPYYVGPLARGNSRFAWMTRKSEETITPWNFEEVVDKGASAQSFIERMTNFDKNLPNEKVLPKHSLLYEYFTVYNELTKVKYVTEGMRKPAFLSGEQKKAIVDLLFKTNRKVTVKQLKEDYFKKIECFDSVEISGVEDRFNASLGTYHDLLKIIKDKDFLDNEENEDILEDIVLTLTLFEDREMIEERLKTYAHLFDDKVMKQLKRRRYTGWGRLSRKLINGIRDKQSGKTILDFLKSDGFANRNFMQLIHDDSLTFKEDIQKAQVSGQGDSLHEHIANLAGSPAIKKGILQTVKVVDELVKVMGRHKPENIVIEMARENQTTQKGQKNSRERMKRIEEGIKELGSQILKEHPVENTQLQNEKLYLYYLQNGRDMYVDQELDINRLSDYDVDHIVPQSFLKDDSIDNKVLTRSDKARGKSDNVPSEEVVKKMKNYWRQLLNAKLITQRKFDNLTKAERGGLSELDKAGFIKRQLVETRQITKHVAQILDSRMNTKYDENDKLIREVKVITLKSKLVSDFRKDFQFYKVREINNYHHAHDAYLNAVVGTALIKKYPKLESEFVYGDYKVYDVRKMIAKSEQEIGKATAKYFFYSNIMNFFKTEITLANGEIRKRPLIETNGETGEIVWDKGRDFATVRKVLSMPQVNIVKKTEVQTGGFSKESILPKRNSDKLIARKKDWDPKKYGGFDSPTVAYSVLVVAKVEKGKSKKLKSVKELLGITIMERSSFEKNPIDFLEAKGYKEVKKDLIIKLPKYSLFELENGRKRMLASAGELQKGNELALPSKYVNFLYLASHYEKLKGSPEDNEQKQLFVEQHKHYLDEIIEQISEFSKRVILADANLDKVLSAYNKHRDKPIREQAENIIHLFTLTNLGAPAAFKYFDTTIDRKRYTSTKEVLDATLIHQSITGLYETRIDLSQLGGDGGGGGGGSGSSGGMNPLQLLQPLPAEIKGTKLLAHWNSGATITCIPESFLEDEQPIKKTLIKTIHGEKQQNVYYVTFKVKGRKVEAEVIASPYEYILLSPTDVPWLTQQPLQLTILVPLQEYQEKILSKTALPEDQKQQLKTLFVKYDNLWQHWENQVGHRKIRPHNIATGDYPPRPQKQYPINPKAKPSIQIVIDDLLKQGVLTPQNSTMNTPVYPVPKPDGRWRMVLDYREVNKTIPLTAAQNQHSAGILATIVRQKYKTTLDLANGFWAHPITPESYWLTAFTWQGKQYCWTRLPQGFLNSPALFNADVVDLLKEIPNVQVYVDDIYLSHDDPKEHVQQLEKVFQILLQAGYVVSLKKSEIGQKTVEFLGFNITKEGRGLTDTFKTKLLNITPPKDLKQLQSILGKLNFARNFIPNFAELVQPLYNLIAPAKGKYIEWSEENTKQLNMVIEALNTASNLEERLPEQRLVIKVNTSPSAGYVRYYNETGKKPIMYLNYVFSKAELKFSMLEKLLTTMHKALIKAMDLAMGQEILVYSPIVSMTKIQKTPLPERKALPIRWITWMTYLEDPRIQFHYDKTLPELKHIPDVYTSSQSPVKHPSQYEGVFYTDGSAIKSPDPTKSNNAGMGIVHATYKPEYQVLNQWSIPLGNHTAQMAEIAAVEFACKKALKIPGPVLVITDSFYVAESANKELPYWKSNGFVNNKKKPLKHISKWKSIAECLSMKPDITIQHEKGISLQIPVFILKGNALADKLATQGSYVVNAGKRTADGSEFEKRTADGSEFESPKKKAKVE

SEQ ID NO: 6828 - protein, 2125 aa, synthetic construct
MPAAKRVKLDGGDKKYSIGLDIGTNSVGWAVITDEYKVPSKKFKVLGNTDRHSIKKNLIGALLFDSGETAEATRLKRTARRRYTRRKNRICYLQEIFSNEMAKVDDSFFHRLEESFLVEEDKKHERHPIFGNIVDEVAYHEKYPTIYHLRKKLVDSTDKADLRLIYLALAHMIKFRGHFLIEGDLNPDNSDVDKLFIQLVQTYNQLFEENPINASGVDAKAILSARLSKSRRLENLIAQLPGEKKNGLFGNLIALSLGLTPNFKSNFDLAEDAKLQLSKDTYDDDLDNLLAQIGDQYADLFLAAKNLSDAILLSDILRVNTEITKAPLSASMIKRYDEHHQDLTLLKALVRQQLPEKYKEIFFDQSKNGYAGYIDGGASQEEFYKFIKPILEKMDGTEELLVKLNREDLLRKQRTFDNGSIPHQIHLGELHAILRRQEDFYPFLKDNREKIEKILTFRIPYYVGPLARGNSRFAWMTRKSEETITPWNFEEVVDKGASAQSFIERMTNFDKNLPNEKVLPKHSLLYEYFTVYNELTKVKYVTEGMRKPAFLSGEQKKAIVDLLFKTNRKVTVKQLKEDYFKKIECFDSVEISGVEDRFNASLGTYHDLLKIIKDKDFLDNEENEDILEDIVLTLTLFEDREMIEERLKTYAHLFDDKVMKQLKRRRYTGWGRLSRKLINGIRDKQSGKTILDFLKSDGFANRNFMQLIHDDSLTFKEDIQKAQVSGQGDSLHEHIANLAGSPAIKKGILQTVKVVDELVKVMGRHKPENIVIEMARENQTTQKGQKNSRERMKRIEEGIKELGSQILKEHPVENTQLQNEKLYLYYLQNGRDMYVDQELDINRLSDYDVDHIVPQSFLKDDSIDNKVLTRSDKARGKSDNVPSEEVVKKMKNYWRQLLNAKLITQRKFDNLTKAERGGLSELDKAGFIKRQLVETRQITKHVAQILDSRMNTKYDENDKLIREVKVITLKSKLVSDFRKDFQFYKVREINNYHHAHDAYLNAVVGTALIKKYPKLESEFVYGDYKVYDVRKMIAKSEQEIGKATAKYFFYSNIMNFFKTEITLANGEIRKRPLIETNGETGEIVWDKGRDFATVRKVLSMPQVNIVKKTEVQTGGFSKESILPKRNSDKLIARKKDWDPKKYGGFDSPTVAYSVLVVAKVEKGKSKKLKSVKELLGITIMERSSFEKNPIDFLEAKGYKEVKKDLIIKLPKYSLFELENGRKRMLASAGELQKGNELALPSKYVNFLYLASHYEKLKGSPEDNEQKQLFVEQHKHYLDEIIEQISEFSKRVILADANLDKVLSAYNKHRDKPIREQAENIIHLFTLTNLGAPAAFKYFDTTIDRKRYTSTKEVLDATLIHQSITGLYETRIDLSQLGGDGGGGGGGSGSSGGLLGRDLLTKLKAQIQFSTEGPQVTWEDRPAMCLVLNLEEEYRLHEKPVPPSIDPSWLQLFPMVWAEKAGMGLANQVPPVVVELKSDASPVAVRQYPMSKEAREGIRPHIQRFLDLGILVPCQSPWNTPLLPVKKPGTNDYRPVQDLREVNKRVQDIHPTVPNPYNLLSSLPPSHTWYSVLDLKDAFFCLKLHPNSQPLFAFEWRDPEKGNTGQLTWTRLPQGFKNSPTLFNEALHRDLASFRALNPQVVMLQYVDDLLVAAPTYRDCKEGTRRLLQELSKLGYRVSAKKAQLCREEVTYLGYLLKGGKRWLTPARKATVMKIPTPTTPRQVREFLGTAGFCRLWIPGFASLAAPLYPLTRPKVPFTWTEAHQEAFGRIKEALLSAPALALPDLTKPFALYVDEKEGVARGVLTQTLGPWRRPVAYLSKKLDPVASGWPTCLKAIAAVALLLKDADKLTLGQNVLVIAPHNLESIVRQPPDRWMTNARMTHYQSLLLNERVSFAPPAILNPATLLPVESDDTPIHICSEILAEETGTRPDLRDQPLPGVPAWYTDGSSFIMDGRRQAGAAIVDNKRTVWASNLPEGTSAQKAELIALTQALRLAEGKSINIYTDSRYAFATAHVHGAIYKQRGWLTSAGKDIKNKEEILALLEAIHLPKRVAIIHCPGHQRGTDPVATGNRKADEAAKQAAQSTRILTETTKNAGKRTADGSEFEKRTADGSEFESPKKKAKVE

SEQ ID NO: 6829 - protein, 2125 aa, synthetic construct
MPAAKRVKLDGGDKKYSIGLDIGTNSVGWAVITDEYKVPSKKFKVLGNTDRHSIKKNLIGALLFDSGETAEATRLKRTARRRYTRRKNRICYLQEIFSNEMAKVDDSFFHRLEESFLVEEDKKHERHPIFGNIVDEVAYHEKYPTIYHLRKKLVDSTDKADLRLIYLALAHMIKFRGHFLIEGDLNPDNSDVDKLFIQLVQTYNQLFEENPINASGVDAKAILSARLSKSRRLENLIAQLPGEKKNGLFGNLIALSLGLTPNFKSNFDLAEDAKLQLSKDTYDDDLDNLLAQIGDQYADLFLAAKNLSDAILLSDILRVNTEITKAPLSASMIKRYDEHHQDLTLLKALVRQQLPEKYKEIFFDQSKNGYAGYIDGGASQEEFYKFIKPILEKMDGTEELLVKLNREDLLRKQRTFDNGSIPHQIHLGELHAILRRQEDFYPFLKDNREKIEKILTFRIPYYVGPLARGNSRFAWMTRKSEETITPWNFEEVVDKGASAQSFIERMTNFDKNLPNEKVLPKHSLLYEYFTVYNELTKVKYVTEGMRKPAFLSGEQKKAIVDLLFKTNRKVTVKQLKEDYFKKIECFDSVEISGVEDRFNASLGTYHDLLKIIKDKDFLDNEENEDILEDIVLTLTLFEDREMIEERLKTYAHLFDDKVMKQLKRRRYTGWGRLSRKLINGIRDKQSGKTILDFLKSDGFANRNFMQLIHDDSLTFKEDIQKAQVSGQGDSLHEHIANLAGSPAIKKGILQTVKVVDELVKVMGRHKPENIVIEMARENQTTQKGQKNSRERMKRIEEGIKELGSQILKEHPVENTQLQNEKLYLYYLQNGRDMYVDQELDINRLSDYDVDHIVPQSFLKDDSIDNKVLTRSDKARGKSDNVPSEEVVKKMKNYWRQLLNAKLITQRKFDNLTKAERGGLSELDKAGFIKRQLVETRQITKHVAQILDSRMNTKYDENDKLIREVKVITLKSKLVSDFRKDFQFYKVREINNYHHAHDAYLNAVVGTALIKKYPKLESEFVYGDYKVYDVRKMIAKSEQEIGKATAKYFFYSNIMNFFKTEITLANGEIRKRPLIETNGETGEIVWDKGRDFATVRKVLSMPQVNIVKKTEVQTGGFSKESILPKRNSDKLIARKKDWDPKKYGGFDSPTVAYSVLVVAKVEKGKSKKLKSVKELLGITIMERSSFEKNPIDFLEAKGYKEVKKDLIIKLPKYSLFELENGRKRMLASAGELQKGNELALPSKYVNFLYLASHYEKLKGSPEDNEQKQLFVEQHKHYLDEIIEQISEFSKRVILADANLDKVLSAYNKHRDKPIREQAENIIHLFTLTNLGAPAAFKYFDTTIDRKRYTSTKEVLDATLIHQSITGLYETRIDLSQLGGDGGGGGGGSGSSGGLLGRDLLTKLKAQIQFSTEGPQVTWEDRPAMCLVLNLEEEYRLHEKPVPPSIDPSWLQLFPMVWAEKAGMGLANQVPPVVVELKSDASPVAVRQYPMSKEAREGIRPHIQRFLDLGILVPCQSPWNTPLLPVKKPGTNDYRPVQDLREVNKRVQDIHPTVPNPYNLLSSLPPSHTWYSVLDLKDAFFCLKLHPNSQPLFAFEWRDPEKGNTGQLTWTRLPQGFKNSPTLFNEALHRDLASFRALNPQVVMLQYVDDLLVAAPTYRDCKEGTRRLLQELSKLGYRVSAKKAQLCREEVTYLGYLLKGGKRWLTPARKATVMKIPTPTTPRQVREFLGKAGFCRLFIPGFASLAAPLYPLTRPKVPFTWTEAHQEAFGRIKEALLSAPALALPDLTKPFALYVDEKEGVARGVLTQTLGPWRRPVAYLSKKLDPVASGWPTCLKAIAAVALLLKDADKLTLGQNVLVIAPHNLESIVRQPPDRWMTNARMTHYQSLLLNERVSFAPPAILNPATLLPVESDDTPIHICSEILAEETGTRPDLRDQPLPGVPAWYTDGSSFIMDGRRQAGAAIVDNKRTVWASNLPEGTSAQKAELIALTQALRLAEGKSINIYTDSRYAFATAHVHGAIYKQRGWLTSAGKDIKNKEEILALLEAIHLPKRVAIIHCPGHQRGTDPVATGNRKADEAAKQAAQSTRILTETTKNAGKRTADGSEFEKRTADGSEFESPKKKAKVE

SEQ ID NO: 6830 - protein, 2094 aa, synthetic construct
MPAAKRVKLDGGDKKYSIGLDIGTNSVGWAVITDEYKVPSKKFKVLGNTDRHSIKKNLIGALLFDSGETAEATRLKRTARRRYTRRKNRICYLQEIFSNEMAKVDDSFFHRLEESFLVEEDKKHERHPIFGNIVDEVAYHEKYPTIYHLRKKLVDSTDKADLRLIYLALAHMIKFRGHFLIEGDLNPDNSDVDKLFIQLVQTYNQLFEENPINASGVDAKAILSARLSKSRRLENLIAQLPGEKKNGLFGNLIALSLGLTPNFKSNFDLAEDAKLQLSKDTYDDDLDNLLAQIGDQYADLFLAAKNLSDAILLSDILRVNTEITKAPLSASMIKRYDEHHQDLTLLKALVRQQLPEKYKEIFFDQSKNGYAGYIDGGASQEEFYKFIKPILEKMDGTEELLVKLNREDLLRKQRTFDNGSIPHQIHLGELHAILRRQEDFYPFLKDNREKIEKILTFRIPYYVGPLARGNSRFAWMTRKSEETITPWNFEEVVDKGASAQSFIERMTNFDKNLPNEKVLPKHSLLYEYFTVYNELTKVKYVTEGMRKPAFLSGEQKKAIVDLLFKTNRKVTVKQLKEDYFKKIECFDSVEISGVEDRFNASLGTYHDLLKIIKDKDFLDNEENEDILEDIVLTLTLFEDREMIEERLKTYAHLFDDKVMKQLKRRRYTGWGRLSRKLINGIRDKQSGKTILDFLKSDGFANRNFMQLIHDDSLTFKEDIQKAQVSGQGDSLHEHIANLAGSPAIKKGILQTVKVVDELVKVMGRHKPENIVIEMARENQTTQKGQKNSRERMKRIEEGIKELGSQILKEHPVENTQLQNEKLYLYYLQNGRDMYVDQELDINRLSDYDVDHIVPQSFLKDDSIDNKVLTRSDKARGKSDNVPSEEVVKKMKNYWRQLLNAKLITQRKFDNLTKAERGGLSELDKAGFIKRQLVETRQITKHVAQILDSRMNTKYDENDKLIREVKVITLKSKLVSDFRKDFQFYKVREINNYHHAHDAYLNAVVGTALIKKYPKLESEFVYGDYKVYDVRKMIAKSEQEIGKATAKYFFYSNIMNFFKTEITLANGEIRKRPLIETNGETGEIVWDKGRDFATVRKVLSMPQVNIVKKTEVQTGGFSKESILPKRNSDKLIARKKDWDPKKYGGFDSPTVAYSVLVVAKVEKGKSKKLKSVKELLGITIMERSSFEKNPIDFLEAKGYKEVKKDLIIKLPKYSLFELENGRKRMLASAGELQKGNELALPSKYVNFLYLASHYEKLKGSPEDNEQKQLFVEQHKHYLDEIIEQISEFSKRVILADANLDKVLSAYNKHRDKPIREQAENIIHLFTLTNLGAPAAFKYFDTTIDRKRYTSTKEVLDATLIHQSITGLYETRIDLSQLGGDGGGGGGGSGSSGGTLNIEDEYRLHETSKGPDVPLGSTWLSDFPQAWAETGGMGLAVRQAPLIIPLKATSTPVSIKQYPMSQEARLGIKPHIQRLLDQGILVPCQSPWNTPLLPVKKPGTNDYRPVQDLREVNKRVEDIHPTVPNPYNLLSGLPPSHQWYTVLDLKDAFFCLRLHPTSQSLFAFEWRDPEMGISGQLTWTRLPQGFKNSPTLFNEALHRDLADFRIQHPDLILLQYVDDLLLAATSELDCQQGTRALLQTLGDLGYRASAKKAQICQKQVKYLGYLLKEGQRWLTEARKETVMGQPTPKTPRQLREFLGTAGFCRLWIPGFAEMAAPLYPLTKPGTLFEWGPDQQKAYQEIKQALLTAPALGLPDLTKPFELFVDEKQGYAKGVLTQKLGPWRRPVAYLSKKLDPVAAGWPPCLRMVAAIAVLTKDAGKLTMGQPLVILAPHAVEALVKQPPDRWLSNARMTHYQALLLDTDRVQFGPIVALNPATLLPLPEEGLQHDCLDILAEAHGTRPDLTDQPLPDADHTWYTDGSSFLQEGQRKAGAAVTTETEVVWAKALPAGTSAQRAELIALTQALKMAEGKKLNVYTDSRYAFATAHIHGEIYRRRGWLTSEGKEIKNKDEILALLKALFLPKRLSIIHCPGHQKGNRAEARGNRMADQAAREVATRETPETSTLLAGKRTADGSEFEKRTADGSEFESPKKKAKVE

SEQ ID NO: 6831 - protein, 2094 aa, synthetic construct
MPAAKRVKLDGGDKKYSIGLDIGTNSVGWAVITDEYKVPSKKFKVLGNTDRHSIKKNLIGALLFDSGETAEATRLKRTARRRYTRRKNRICYLQEIFSNEMAKVDDSFFHRLEESFLVEEDKKHERHPIFGNIVDEVAYHEKYPTIYHLRKKLVDSTDKADLRLIYLALAHMIKFRGHFLIEGDLNPDNSDVDKLFIQLVQTYNQLFEENPINASGVDAKAILSARLSKSRRLENLIAQLPGEKKNGLFGNLIALSLGLTPNFKSNFDLAEDAKLQLSKDTYDDDLDNLLAQIGDQYADLFLAAKNLSDAILLSDILRVNTEITKAPLSASMIKRYDEHHQDLTLLKALVRQQLPEKYKEIFFDQSKNGYAGYIDGGASQEEFYKFIKPILEKMDGTEELLVKLNREDLLRKQRTFDNGSIPHQIHLGELHAILRRQEDFYPFLKDNREKIEKILTFRIPYYVGPLARGNSRFAWMTRKSEETITPWNFEEVVDKGASAQSFIERMTNFDKNLPNEKVLPKHSLLYEYFTVYNELTKVKYVTEGMRKPAFLSGEQKKAIVDLLFKTNRKVTVKQLKEDYFKKIECFDSVEISGVEDRFNASLGTYHDLLKIIKDKDFLDNEENEDILEDIVLTLTLFEDREMIEERLKTYAHLFDDKVMKQLKRRRYTGWGRLSRKLINGIRDKQSGKTILDFLKSDGFANRNFMQLIHDDSLTFKEDIQKAQVSGQGDSLHEHIANLAGSPAIKKGILQTVKVVDELVKVMGRHKPENIVIEMARENQTTQKGQKNSRERMKRIEEGIKELGSQILKEHPVENTQLQNEKLYLYYLQNGRDMYVDQELDINRLSDYDVDHIVPQSFLKDDSIDNKVLTRSDKARGKSDNVPSEEVVKKMKNYWRQLLNAKLITQRKFDNLTKAERGGLSELDKAGFIKRQLVETRQITKHVAQILDSRMNTKYDENDKLIREVKVITLKSKLVSDFRKDFQFYKVREINNYHHAHDAYLNAVVGTALIKKYPKLESEFVYGDYKVYDVRKMIAKSEQEIGKATAKYFFYSNIMNFFKTEITLANGEIRKRPLIETNGETGEIVWDKGRDFATVRKVLSMPQVNIVKKTEVQTGGFSKESILPKRNSDKLIARKKDWDPKKYGGFDSPTVAYSVLVVAKVEKGKSKKLKSVKELLGITIMERSSFEKNPIDFLEAKGYKEVKKDLIIKLPKYSLFELENGRKRMLASAGELQKGNELALPSKYVNFLYLASHYEKLKGSPEDNEQKQLFVEQHKHYLDEIIEQISEFSKRVILADANLDKVLSAYNKHRDKPIREQAENIIHLFTLTNLGAPAAFKYFDTTIDRKRYTSTKEVLDATLIHQSITGLYETRIDLSQLGGDGGGGGGGSGSSGGTLNIEDEHRLHETSKEPDVSLGSTWLSDFPQAWAETGGMGLAVRQAPLIIPLKATSTPVSIKQYPMSQEARLGIKPHIQRLLDQGILVPCQSPWNTPLLPVKKPGTNDYRPVQDLREVNKRVEDIHPTVPNPYNLLSGLPPSHQWYTVLDLKDAFFCLRLHPTSQPLFAFEWRDPEMGISGQLTWTRLPQGFKNSPTLFNEALHRDLADFRIQHPDLILLQYVDDLLLAATSELDCQQGTRALLQTLGNLGYRASAKKAQICQKQVKYLGYLLKEGQRWLTEARKETVMGQPTPKTPRQLREFLGTAGFCRLWIPGFAEMAAPLYPLTKPGTLFNWGPDQQKAYQEIKQALLTAPALGLPDLTKPFELFVDEKQGYAKGVLTQKLGPWRRPVAYLSKKLDPVAAGWPPCLRMVAAIAVLTKDAGKLTMGQPLVILAPHAVEALVKQPPDRWLSNARMTHYQALLLDTDRVQFGPVVALNPATLLPLPEEGLQHNCLDILAEAHGTRPDLTDQPLPDADHTWYTDGSSLLQEGQRKAGAAVTTETEVIWAKALPAGTSAQRAELIALTQALKMAEGKKLNVYTDSRYAFATAHIHGEIYRRRGWLTSEGKEIKNKDEILALLKALFLPKRLSIIHCPGHQKGHSAEARGNRMADQAARKAAITETPDTSTLLAGKRTADGSEFEKRTADGSEFESPKKKAKVE

SEQ ID NO: 6832 - protein, 2094 aa, synthetic construct; identical to SEQ ID NO: 6831

SEQ ID NO: 6833 - protein, 2086 aa, synthetic construct
MPAAKRVKLDGGDKKYSIGLDIGTNSVGWAVITDEYKVPSKKFKVLGNTDRHSIKKNLIGALLFDSGETAEATRLKRTARRRYTRRKNRICYLQEIFSNEMAKVDDSFFHRLEESFLVEEDKKHERHPIFGNIVDEVAYHEKYPTIYHLRKKLVDSTDKADLRLIYLALAHMIKFRGHFLIEGDLNPDNSDVDKLFIQLVQTYNQLFEENPINASGVDAKAILSARLSKSRRLENLIAQLPGEKKNGLFGNLIALSLGLTPNFKSNFDLAEDAKLQLSKDTYDDDLDNLLAQIGDQYADLFLAAKNLSDAILLSDILRVNTEITKAPLSASMIKRYDEHHQDLTLLKALVRQQLPEKYKEIFFDQSKNGYAGYIDGGASQEEFYKFIKPILEKMDGTEELLVKLNREDLLRKQRTFDNGSIPHQIHLGELHAILRRQEDFYPFLKDNREKIEKILTFRIPYYVGPLARGNSRFAWMTRKSEETITPWNFEEVVDKGASAQSFIERMTNFDKNLPNEKVLPKHSLLYEYFTVYNELTKVKYVTEGMRKPAFLSGEQKKAIVDLLFKTNRKVTVKQLKEDYFKKIECFDSVEISGVEDRFNASLGTYHDLLKIIKDKDFLDNEENEDILEDIVLTLTLFEDREMIEERLKTYAHLFDDKVMKQLKRRRYTGWGRLSRKLINGIRDKQSGKTILDFLKSDGFANRNFMQLIHDDSLTFKEDIQKAQVSGQGDSLHEHIANLAGSPAIKKGILQTVKVVDELVKVMGRHKPENIVIEMARENQTTQKGQKNSRERMKRIEEGIKELGSQILKEHPVENTQLQNEKLYLYYLQNGRDMYVDQELDINRLSDYDVDHIVPQSFLKDDSIDNKVLTRSDKARGKSDNVPSEEVVKKMKNYWRQLLNAKLITQRKFDNLTKAERGGLSELDKAGFIKRQLVETRQITKHVAQILDSRMNTKYDENDKLIREVKVITLKSKLVSDFRKDFQFYKVREINNYHHAHDAYLNAVVGTALIKKYPKLESEFVYGDYKVYDVRKMIAKSEQEIGKATAKYFFYSNIMNFFKTEITLANGEIRKRPLIETNGETGEIVWDKGRDFATVRKVLSMPQVNIVKKTEVQTGGFSKESILPKRNSDKLIARKKDWDPKKYGGFDSPTVAYSVLVVAKVEKGKSKKLKSVKELLGITIMERSSFEKNPIDFLEAKGYKEVKKDLIIKLPKYSLFELENGRKRMLASAGELQKGNELALPSKYVNFLYLASHYEKLKGSPEDNEQKQLFVEQHKHYLDEIIEQISEFSKRVILADANLDKVLSAYNKHRDKPIREQAENIIHLFTLTNLGAPAAFKYFDTTIDRKRYTSTKEVLDATLIHQSITGLYETRIDLSQLGGDGGGGGGGSGSSGGLDDEYRLYSPLVKPDQNIQFWLEQFPQAWAETAGMGLAKQVPPQVIQLKASATPVSVRQYPLSKEAQEGIRPHVQRLIQQGILVPVQSPWNTPLLPVRKPGTNDYRPVQDLREVNKRVQDIHPTVPNPYNLLCALPPQRSWYTVLDLKDAFFCLRLHPTSQPLFAFEWRDPGTGRTGQLTWTRLPQGFKNSPTIFNEALHRDLANFRIQHPQVTLLQYVDDLLLAGATKQDCLEGTKALLLELSDLGYRASAKKAQICRREVTYLGYSLRDGQRWLTEARKKTVVQIPAPTTAKQVREFLGKAGFCRLFIPGFATLAAPLYPLTKPKGEFSWAPEHQKAFDAIKKALLSAPALALPDVTKPFTLYVDERKGVARGVLTQTLGPWRRPVAYLSKKLDPVASGWPVCLKAIAAVAILVKDADKLTLGQNITVIAPHALENIVRQPPDRWMTNARMTHYQSLLLTERVTFAPPAALNPATLLPEETDEPVTHDCHQLLIEETGVRKDLTDIPLTGEVLTWFTDGSSYVVEGKRMAGAAVVDGTRTIWASSLPEGTSAQKAELMALTQALRLAEGKSINIYTDSRYAFATAHVHGAIYKQRGWLTSAGREIKNKEEILSLLEALHLPKRLAIIHCPGHQKAKDPISRGNQMADRVAKQAAQGVNLLPAGKRTADGSEFEKRTADGSEFESPKKKAKVE

SEQ ID NO: 6834 - protein, 2086 aa, synthetic construct; identical to SEQ ID NO: 6833

SEQ ID NO: 6835 - protein, 2088 aa, synthetic construct
MPAAKRVKLDGGDKKYSIGLDIGTNSVGWAVITDEYKVPSKKFKVLGNTDRHSIKKNLIGALLFDSGETAEATRLKRTARRRYTRRKNRICYLQEIFSNEMAKVDDSFFHRLEESFLVEEDKKHERHPIFGNIVDEVAYHEKYPTIYHLRKKLVDSTDKADLRLIYLALAHMIKFRGHFLIEGDLNPDNSDVDKLFIQLVQTYNQLFEENPINASGVDAKAILSARLSKSRRLENLIAQLPGEKKNGLFGNLIALSLGLTPNFKSNFDLAEDAKLQLSKDTYDDDLDNLLAQIGDQYADLFLAAKNLSDAILLSDILRVNTEITKAPLSASMIKRYDEHHQDLTLLKALVRQQLPEKYKEIFFDQSKNGYAGYIDGGASQEEFYKFIKPILEKMDGTEELLVKLNREDLLRKQRTFDNGSIPHQIHLGELHAILRRQEDFYPFLKDNREKIEKILTFRIPYYVGPLARGNSRFAWMTRKSEETITPWNFEEVVDKGASAQSFIERMTNFDKNLPNEKVLPKHSLLYEYFTVYNELTKVKYVTEGMRKPAFLSGEQKKAIVDLLFKTNRKVTVKQLKEDYFKKIECFDSVEISGVEDRFNASLGTYHDLLKIIKDKDFLDNEENEDILEDIVLTLTLFEDREMIEERLKTYAHLFDDKVMKQLKRRRYTGWGRLSRKLINGIRDKQSGKTILDFLKSDGFANRNFMQLIHDDSLTFKEDIQKAQVSGQGDSLHEHIANLAGSPAIKKGILQTVKVVDELVKVMGRHKPENIVIEMARENQTTQKGQKNSRERMKRIEEGIKELGSQILKEHPVENTQLQNEKLYLYYLQNGRDMYVDQELDINRLSDYDVDHIVPQSFLKDDSIDNKVLTRSDKARGKSDNVPSEEVVKKMKNYWRQLLNAKLITQRKFDNLTKAERGGLSELDKAGFIKRQLVETRQITKHVAQILDSRMNTKYDENDKLIREVKVITLKSKLVSDFRKDFQFYKVREINNYHHAHDAYLNAVVGTALIKKYPKLESEFVYGDYKVYDVRKMIAKSEQEIGKATAKYFFYSNIMNFFKTEITLANGEIRKRPLIETNGETGEIVWDKGRDFATVRKVLSMPQVNIVKKTEVQTGGFSKESILPKRNSDKLIARKKDWDPKKYGGFDSPTVAYSVLVVAKVEKGKSKKLKSVKELLGITIMERSSFEKNPIDFLEAKGYKEVKKDLIIKLPKYSLFELENGRKRMLASAGELQKGNELALPSKYVNFLYLASHYEKLKGSPEDNEQKQLFVEQHKHYLDEIIEQISEFSKRVILADANLDKVLSAYNKHRDKPIREQAENIIHLFTLTNLGAPAAFKYFDTTIDRKRYTSTKEVLDATLIHQSITGLYETRIDLSQLGGDGGGGGGGSGSSGGTLQLDDEYRLYSPLVKPDQNIQFWLEQFPQAWAETAGMGLAKQVPPQVIQLKASATPVSVRQYPLSKEAQEGIRPHVQRLIQQGILVPVQSPWNTPLLPVRKPGTNDYRPVQDLREVNKRVQDIHPTVPNPYNLLCALPPQRSWYTVLDLKDAFFCLRLHPTSQPLFAFEWRDPGTGRTGQLTWTRLPQGFKNSPTIFDEALHRDLANFRIQHPQVTLLQYVDDLLLAGATKQDCLEGTKALLLELSDLGYRASAKKAQICRREVTYLGYSLRDGQRWLTEARKKTVVQIPAPTTAKQVREFLGTAGFCRLWIPGFATLAAPLYPLTKEKGEFSWAPEHQKAFDAIKKALLSAPALALPDVTKPFTLYVDERKGVARGVLTQTLGPWRRPVAYLSKKLDPVASGWPVCLKAIAAVAILVKDADKLTLGQNITVIAPHALENIVRQPPDRWMTNARMTHYQSLLLTERVTFAPPAALNPATLLPEETDEPVTHDCHQLLIEETGVRKDLTDIPLTGEVLTWFTDGSSYVVEGKRMAGAAVVDGTRTIWASSLPEGTSAQKAELMALTQALRLAEGKSINIYTDSRYAFATAHVHGAIYKQRGLLTSAGREIKNKEEILSLLEALHLPKRLAIIHCPGHQKAKDPISRGNQMADRVAKQAAQGVNLLAGKRTADGSEFEKRTADGSEFESPKKKAKVE

SEQ ID NO: 6836 - protein, 2085 aa, synthetic construct
MPAAKRVKLDGGDKKYSIGLDIGTNSVGWAVITDEYKVPSKKFKVLGNTDRHSIKKNLIGALLFDSGETAEATRLKRTARRRYTRRKNRICYLQEIFSNEMAKVDDSFFHRLEESFLVEEDKKHERHPIFGNIVDEVAYHEKYPTIYHLRKKLVDSTDKADLRLIYLALAHMIKFRGHFLIEGDLNPDNSDVDKLFIQLVQTYNQLFEENPINASGVDAKAILSARLSKSRRLENLIAQLPGEKKNGLFGNLIALSLGLTPNFKSNFDLAEDAKLQLSKDTYDDDLDNLLAQIGDQYADLFLAAKNLSDAILLSDILRVNTEITKAPLSASMIKRYDEHHQDLTLLKALVRQQLPEKYKEIFFDQSKNGYAGYIDGGASQEEFYKFIKPILEKMDGTEELLVKLNREDLLRKQRTFDNGSIPHQIHLGELHAILRRQEDFYPFLKDNREKIEKILTFRIPYYVGPLARGNSRFAWMTRKSEETITPWNFEEVVDKGASAQSFIERMTNFDKNLPNEKVLPKHSLLYEYFTVYNELTKVKYVTEGMRKPAFLSGEQKKAIVDLLFKTNRKVTVKQLKEDYFKKIECFDSVEISGVEDRFNASLGTYHDLLKIIKDKDFLDNEENEDILEDIVLTLTLFEDREMIEERLKTYAHLFDDKVMKQLKRRRYTGWGRLSRKLINGIRDKQSGKTILDFLKSDGFANRNFMQLIHDDSLTFKEDIQKAQVSGQGDSLHEHIANLAGSPAIKKGILQTVKVVDELVKVMGRHKPENIVIEMARENQTTQKGQKNSRERMKRIEEGIKELGSQILKEHPVENTQLQNEKLYLYYLQNGRDMYVDQELDINRLSDYDVDHIVPQSFLKDDSIDNKVLTRSDKARGKSDNVPSEEVVKKMKNYWRQLLNAKLITQRKFDNLTKAERGGLSELDKAGFIKRQLVETRQITKHVAQILDSRMNTKYDENDKLIREVKVITLKSKLVSDFRKDFQFYKVREINNYHHAHDAYLNAVVGTALIKKYPKLESEFVYGDYKVYDVRKMIAKSEQEIGKATAKYFFYSNIMNFFKTEITLANGEIRKRPLIETNGETGEIVWDKGRDFATVRKVLSMPQVNIVKKTEVQTGGFSKESILPKRNSDKLIARKKDWDPKKYGGFDSPTVAYSVLVVAKVEKGKSKKLKSVKELLGITIMERSSFEKNPIDFLEAKGYKEVKKDLIIKLPKYSLFELENGRKRMLASAGELQKGNELALPSKYVNFLYLASHYEKLKGSPEDNEQKQLFVEQHKHYLDEIIEQISEFSKRVILADANLDKVLSAYNKHRDKPIREQAENIIHLFTLTNLGAPAAFKYFDTTIDRKRYTSTKEVLDATLIHQSITGLYETRIDLSQLGGDGGGGGGGSGSSGGVPWLMKKPLQLTVLVPLHEYQERLLQQTALPKEQKELLQKLFLKYDALWQHWENQVGHRRIKPHNIATGTLAPRPQKQYPINPKAKPSIQIVIDDLLKQGVLIQQNSTMNTPVYPVPKPDGKWRMVLDYREVNKTIPLIAAQNQHSAGILSSIYRGKYKTTLDLTNGFWAHPITPESYWLTAFTWQGKQYCWTRLPQGFLNSPALFTADVVDLLKEIPNVQAYVDDIYISHDDPQEHLEQLEKIFSILLNAGYVVSLKKSEIAQREVEFLGFNITKEGRGLTDTFKQKLLNITPPKDLKQLQSILGLLNFARNFIPNYSELVKPLYTIVANANGKFISWTEDNSNQLQHIISVLNQADNLEERNPETRLIIKVNSSPSAGYIRYYNEGSKRPIMYVNYIFSKAEAKFTQTEKLLTTMHKGLIKAMDLAMGQEILVYSPIVSMTKIQRTPLPERKALPVRWITWMTYLEDPRIQFHYDKSLPELQQIPNVTEDVIAKTKHPSEFAMVFYTDGSAIKHPDVNKSHSAGMGIAQVQFIPEYKIVHQWSIPLGDHTAQLAEIAAVEFACKKALKISGPVLIVTDSFYVAESANKELPYWKSNGFLNNKKKPLRHVSKWKSIAECLQLKPDIIIMHEKGHQQPMTTLHTEGNNLADKLATQGSYVVHAGKRTADGSEFEKRTADGSEFESPKKKAKVE

SEQ ID NO: 6837 - protein, 2085 aa, synthetic construct
MPAAKRVKLDGGDKKYSIGLDIGTNSVGWAVITDEYKVPSKKFKVLGNTDRHSIKKNLIGALLFDSGETAEATRLKRTARRRYTRRKNRICYLQEIFSNEMAKVDDSFFHRLEESFLVEEDKKHERHPIFGNIVDEVAYHEKYPTIYHLRKKLVDSTDKADLRLIYLALAHMIKFRGHFLIEGDLNPDNSDVDKLFIQLVQTYNQLFEENPINASGVDAKAILSARLSKSRRLENLIAQLPGEKKNGLFGNLIALSLGLTPNFKSNFDLAEDAKLQLSKDTYDDDLDNLLAQIGDQYADLFLAAKNLSDAILLSDILRVNTEITKAPLSASMIKRYDEHHQDLTLLKALVRQQLPEKYKEIFFDQSKNGYAGYIDGGASQEEFYKFIKPILEKMDGTEELLVKLNREDLLRKQRTFDNGSIPHQIHLGELHAILRRQEDFYPFLKDNREKIEKILTFRIPYYVGPLARGNSRFAWMTRKSEETITPWNFEEVVDKGASAQSFIERMTNFDKNLPNEKVLPKHSLLYEYFTVYNELTKVKYVTEGMRKPAFLSGEQKKAIVDLLFKTNRKVTVKQLKEDYFKKIECFDSVEISGVEDRFNASLGTYHDLLKIIKDKDFLDNEENEDILEDIVLTLTLFEDREMIEERLKTYAHLFDDKVMKQLKRRRYTGWGRLSRKLINGIRDKQSGKTILDFLKSDGFANRNFMQLIHDDSLTFKEDIQKAQVSGQGDSLHEHIANLAGSPAIKKGILQTVKVVDELVKVMGRHKPENIVIEMARENQTTQKGQKNSRERMKRIEEGIKELGSQILKEHPVENTQLQNEKLYLYYLQNGRDMYVDQELDINRLSDYDVDHIVPQSFLKDDSIDNKVLTRSDKARGKSDNVPSEEVVKKMKNYWRQLLNAKLITQRKFDNLTKAERGGLSELDKAGFIKRQLVETRQITKHVAQILDSRMNTKYDENDKLIREVKVITLKSKLVSDFRKDFQFYKVREINNYHHAHDAYLNAVVGTALIKKYPKLESEFVYGDYKVYDVRKMIAKSEQEIGKATAKYFFYSNIMNFFKTEITLANGEIRKRPLIETNGETGEIVWDKGRDFATVRKVLSMPQVNIVKKTEVQTGGFSKESILPKRNSDKLIARKKDWDPKKYGGFDSPTVAYSVLVVAKVEKGKSKKLKSVKELLGITIMERSSFEKNPIDFLEAKGYKEVKKDLIIKLPKYSLFELENGRKRMLASAGELQKGNELALPSKYVNFLYLASHYEKLKGSPEDNEQKQLFVEQHKHYLDEIIEQISEFSKRVILADANLDKVLSAYNKHRDKPIREQAENIIHLFTLTNLGAPAAFKYFDTTIDRKRYTSTKEVLDATLIHQSITGLYETRIDLSQLGGDGGGGGGGSGSSGGVPWLMKKPLQLTVLVPLHEYQERLLQQTALPKEQKELLQKLFLKYDALWQHWENQVGHRRIKPHNIATGTLAPRPQKQYPINPKAKPSIQIVIDDLLKQGVLIQQNSTMNTPVYPVPKPDGKWRMVLDYREVNKTIPLIAAQNQHSAGILSSIYRGKYKTTLDLTNGFWAHPITPESYWLTAFTWQGKQYCWTRLPQGFLNSPALFNADVVDLLKEIPNVQAYVDDIYISHDDPQEHLEQLEKIFSILLNAGYVVSLKKSEIAQREVEFLGFNITKEGRGLTDTFKQKLLNITPPKDLKQLQSILGLLNFARNFIPNYSELVKPLYTIVAPANGKFISWTEDNSNQLQHIISVLNQADNLEERNPETRLIIKVNSSPSAGYIRYYNEGSKRPIMYVNYIFSKAEAKFTQTEKLLTTMHKGLIKAMDLAMGQEILVYSPIVSMTKIQRTPLPERKALPVRWITWMTYLEDPRIQFHYDKSLPELQQIPNVTEDVIAKTKHPSEFAMVFYTDGSAIKHPDVNKSHSAGMGIAQVQFIPEYKIVHQWSIPLGDHTAQLAEIAAVEFACKKALKISGPVLIVTDSFYVAESANKELPYWKSNGFLNNKKKPLRHVSKWKSIAECLQLKPDIIIMHEKGHQQPMTTLHTEGNNLADKLATQGSYVVHAGKRTADGSEFEKRTADGSEFESPKKKAKVE

SEQ ID NO: 6838 - protein, 2174 aa, synthetic construct
MPAAKRVKLDGGDKKYSIGLDIGTNSVGWAVITDEYKVPSKKFKVLGNTDRHSIKKNLIGALLFDSGETAEATRLKRTARRRYTRRKNRICYLQEIFSNEMAKVDDSFFHRLEESFLVEEDKKHERHPIFGNIVDEVAYHEKYPTIYHLRKKLVDSTDKADLRLIYLALAHMIKFRGHFLIEGDLNPDNSDVDKLFIQLVQTYNQLFEENPINASGVDAKAILSARLSKSRRLENLIAQLPGEKKNGLFGNLIALSLGLTPNFKSNFDLAEDAKLQLSKDTYDDDLDNLLAQIGDQYADLFLAAKNLSDAILLSDILRVNTEITKAPLSASMIKRYDEHHQDLTLLKALVRQQLPEKYKEIFFDQSKNGYAGYIDGGASQEEFYKFIKPILEKMDGTEELLVKLNREDLLRKQRTFDNGSIPHQIHLGELHAILRRQEDFYPFLKDNREKIEKILTFRIPYYVGPLARGNSRFAWMTRKSEETITPWNFEEVVDKGASAQSFIERMTNFDKNLPNEKVLPKHSLLYEYFTVYNELTKVKYVTEGMRKPAFLSGEQKKAIVDLLFKTNRKVTVKQLKEDYFKKIECFDSVEISGVEDRFNASLGTYHDLLKIIKDKDFLDNEENEDILEDIVLTLTLFEDREMIEERLKTYAHLFDDKVMKQLKRRRYTGWGRLSRKLINGIRDKQSGKTILDFLKSDGFANRNFMQLIHDDSLTFKEDIQKAQVSGQGDSLHEHIANLAGSPAIKKGILQTVKVVDELVKVMGRHKPENIVIEMARENQTTQKGQKNSRERMKRIEEGIKELGSQILKEHPVENTQLQNEKLYLYYLQNGRDMYVDQELDINRLSDYDVDHIVPQSFLKDDSIDNKVLTRSDKARGKSDNVPSEEVVKKMKNYWRQLLNAKLITQRKFDNLTKAERGGLSELDKAGFIKRQLVETRQITKHVAQILDSRMNTKYDENDKLIREVKVITLKSKLVSDFRKDFQFYKVREINNYHHAHDAYLNAVVGTALIKKYPKLESEFVYGDYKVYDVRKMIAKSEQEIGKATAKYFFYSNIMNFFKTEITLANGEIRKRPLIETNGETGEIVWDKGRDFATVRKVLSMPQVNIVKKTEVQTGGFSKESILPKRNSDKLIARKKDWDPKKYGGFDSPTVAYSVLVVAKVEKGKSKKLKSVKELLGITIMERSSFEKNPIDFLEAKGYKEVKKDLIIKLPKYSLFELENGRKRMLASAGELQKGNELALPSKYVNFLYLASHYEKLKGSPEDNEQKQLFVEQHKHYLDEIIEQISEFSKRVILADANLDKVLSAYNKHRDKPIREQAENIIHLFTLTNLGAPAAFKYFDTTIDRKRYTSTKEVLDATLIHQSITGLYETRIDLSQLGGDGGGGGGGSGSSGGMDPLQLLQPLEAEIKGTKLKAHWNSGATITCVPQAFLEEEVPIKNIWIKTIHGEKEQPVYYLTFKIQGRKVEAEVISSPYDYILVSPSDIPWLMKKPLQLTTLVPLQEYEERLLKQTMLTGSYKEKLQSLFLKYDALWQHWENQVGHRRIKPHHIATGTVNPRPQKQYPINPKAKASIQTVINDLLKQGVLIQQNSIMNTPVYPVPKPDGKWRMVLDYREVNKTIPLIAAQNQHSAGILSSIFRGKYKTTLDLSNGFWAHSITPESYWLTAFTWLGQQYCWTRLPQGFLNSPALFNADVVDLLKEVPNVQVYVDDIYISHDDPREHLEQLEKVFSLLLNAGYVVSLKKSEIAQHEVEFLGFNITKEGRGLTETFKQKLLNITPPRDLKQLQSILGLLNFARNFIPNFSELVKPLYNIIATAPGKYITWTTDNSQQLQNIISMLNSAENLEERNPEVRLIMKVNTSPSAGYIRFYNEFAKRPIMYLNYVYTKAEVKFTNTEKLLTTIHKGLIKALDLGMGQEILVYSPIVSMTKIQKTPLPERKALPIRWITWMSYLEDPRIQFHYDKTLPELQQVPTVTDDIIAKIKHPSEFSMVFYTDGSAIKHPNVNKSHNAGMGIAQVQFKPEFTVINTWSIPLGDHTAQLAEVAAVEFACKKALKIDGPVLIVTDSFYVAESVNKELPYWQSNGFFNNKKKPLKHVSKWKSIADCIQLKPDIIIIHEKGHQPTASTFHTEGNNLADKLATQGSYVVNAGKRTADGSEFEKRTADGSEFESPKKKAKVE

SEQ ID NO: 6839 - protein, 2092 aa, synthetic construct
MPAAKRVKLDGGDKKYSIGLDIGTNSVGWAVITDEYKVPSKKFKVLGNTDRHSIKKNLIGALLFDSGETAEATRLKRTARRRYTRRKNRICYLQEIFSNEMAKVDDSFFHRLEESFLVEEDKKHERHPIFGNIVDEVAYHEKYPTIYHLRKKLVDSTDKADLRLIYLALAHMIKFRGHFLIEGDLNPDNSDVDKLFIQLVQTYNQLFEENPINASGVDAKAILSARLSKSRRLENLIAQLPGEKKNGLFGNLIALSLGLTPNFKSNFDLAEDAKLQLSKDTYDDDLDNLLAQIGDQYADLFLAAKNLSDAILLSDILRVNTEITKAPLSASMIKRYDEHHQDLTLLKALVRQQLPEKYKEIFFDQSKNGYAGYIDGGASQEEFYKFIKPILEKMDGTEELLVKLNREDLLRKQRTFDNGSIPHQIHLGELHAILRRQEDFYPFLKDNREKIEKILTFRIPYYVGPLARGNSRFAWMTRKSEETITPWNFEEVVDKGASAQSFIERMTNFDKNLPNEKVLPKHSLLYEYFTVYNELTKVKYVTEGMRKPAFLSGEQKKAIVDLLFKTNRKVTVKQLKEDYFKKIECFDSVEISGVEDRFNASLGTYHDLLKIIKDKDFLDNEENEDILEDIVLTLTLFEDREMIEERLKTYAHLFDDKVMKQLKRRRYTGWGRLSRKLINGIRDKQSGKTILDFLKSDGFANRNFMQLIHDDSLTFKEDIQKAQVSGQGDSLHEHIANLAGSPAIKKGILQTVKVVDELVKVMGRHKPENIVIEMARENQTTQKGQKNSRERMKRIEEGIKELGSQILKEHPVENTQLQNEKLYLYYLQNGRDMYVDQELDINRLSDYDVDHIVPQSFLKDDSIDNKVLTRSDKARGKSDNVPSEEVVKKMKNYWRQLLNAKLITQRKFDNLTKAERGGLSELDKAGFIKRQLVETRQITKHVAQILDSRMNTKYDENDKLIREVKVITLKSKLVSDFRKDFQFYKVREINNYHHAHDAYLNAVVGTALIKKYPKLESEFVYGDYKVYDVRKMIAKSEQEIGKATAKYFFYSNIMNFFKTEITLANGEIRKRPLIETNGETGEIVWDKGRDFATVRKVLSMPQVNIVKKTEVQTGGFSKESILPKRNSDKLIARKKDWDPKKYGGFDSPTVAYSVLVVAKVEKGKSKKLKSVKELLGITIMERSSFEKNPIDFLEAKGYKEVKKDLIIKLPKYSLFELENGRKRMLASAGELQKGNELALPSKYVNFLYLASHYEKLKGSPEDNEQKQLFVEQHKHYLDEIIEQISEFSKRVILADANLDKVLSAYNKHRDKPIREQAENIIHLFTLTNLGAPAAFKYFDTTIDRKRYTSTKEVLDATLIHQSITGLYETRIDLSQLGGDGGGGGGGSGSSGGVLNLEEEYRLHEKPVPSSIDPSWLQLFPTVWAERAGMGLANQVPPVVVELRSGASPVAVRQYPMSKEAREGIRPHIQRFLDLGVLVPCQSPWNTPLLPVKKPGTNDYRPVQDLREINKRVQDIHPTVPNPYNLLSSLPPSHTWYSVLDLKDAFFCLKLHPNSQPLFAFEWRDPEKGNTGQLTWTRLPQGFKNSPTLFNEALHRDLAPFRALNPQVVLLQYVDDLLVAAPTYRDCKEGTQKLLQELSKLGYRVSAKKAQLCQKEVTYLGYLLKEGKRWLTPARKATVMKIPPPTTPRQVREFLGTAGFCRLWIPGFASLAAPLYPLTKPSIPFIWTEEHQKAFDRIKEALLSAPALALPDLTKPFTLYVDERAGVARGVLTQTLGPWRRPVAYLSKKLDPVASGWPTCLKAVAAVALLLKDADKLTLGQNVTVIASHSLESIVRQPPDRWMTNARMTHYQSLLLNERVSFAPPAVLNPATLLPVESEATPVHRCSEILAEETGTRRDLKDQPLPGVPAWYTDGSSFIAEGKRRAGAAIVDGKRTVWASSLPEGTSAQKAELVALTQALRLAEGKDINIYTDSRYAFATAHIHGAIYKQRGWLTSAGKDIKNKEEILALLEAIHLPKRVAIIHCPGHQKGNDPVATGNRRADEAAKQAALSTRVLAETTKPAGKRTADGSEFEKRTADGSEFESPKKKAKVE

SEQ ID NO: 6840 - protein, 2096 aa, synthetic construct
MPAAKRVKLDGGDKKYSIGLDIGTNSVGWAVITDEYKVPSKKFKVLGNTDRHSIKKNLIGALLFDSGETAEATRLKRTARRRYTRRKNRICYLQEIFSNEMAKVDDSFFHRLEESFLVEEDKKHERHPIFGNIVDEVAYHEKYPTIYHLRKKLVDSTDKADLRLIYLALAHMIKFRGHFLIEGDLNPDNSDVDKLFIQLVQTYNQLFEENPINASGVDAKAILSARLSKSRRLENLIAQLPGEKKNGLFGNLIALSLGLTPNFKSNFDLAEDAKLQLSKDTYDDDLDNLLAQIGDQYADLFLAAKNLSDAILLSDILRVNTEITKAPLSASMIKRYDEHHQDLTLLKALVRQQLPEKYKEIFFDQSKNGYAGYIDGGASQEEFYKFIKPILEKMDGTEELLVKLNREDLLRKQRTFDNGSIPHQIHLGELHAILRRQEDFYPFLKDNREKIEKILTFRIPYYVGPLARGNSRFAWMTRKSEETITPWNFEEVVDKGASAQSFIERMTNFDKNLPNEKVLPKHSLLYEYFTVYNELTKVKYVTEGMRKPAFLSGEQKKAIVDLLFKTNRKVTVKQLKEDYFKKIECFDSVEISGVEDRFNASLGTYHDLLKIIKDKDFLDNEENEDILEDIVLTLTLFEDREMIEERLKTYAHLFDDKVMKQLKRRRYTGWGRLSRKLINGIRDKQSGKTILDFLKSDGFANRNFMQLIHDDSLTFKEDIQKAQVSGQGDSLHEHIANLAGSPAIKKGILQTVKVVDELVKVMGRHKPENIVIEMARENQTTQKGQKNSRERMKRIEEGIKELGSQILKEHPVENTQLQNEKLYLYYLQNGRDMYVDQELDINRLSDYDVDHIVPQSFLKDDSIDNKVLTRSDKARGKSDNVPSEEVVKKMKNYWRQLLNAKLITQRKFDNLTKAERGGLSELDKAGFIKRQLVETRQITKHVAQILDSRMNTKYDENDKLIREVKVITLKSKLVSDFRKDFQFYKVREINNYHHAHDAYLNAVVGTALIKKYPKLESEFVYGDYKVYDVRKMIAKSEQEIGKATAKYFFYSNIMNFFKTEITLANGEIRKRPLIETNGETGEIVWDKGRDFATVRKVLSMPQVNIVKKTEVQTGGFSKESILPKRNSDKLIARKKDWDPKKYGGFDSPTVAYSVLVVAKVEKGKSKKLKSVKELLGITIMERSSFEKNPIDFLEAKGYKEVKKDLIIKLPKYSLFELENGRKRMLASAGELQKGNELALPSKYVNFLYLASHYEKLKGSPEDNEQKQLFVEQHKHYLDEIIEQISEFSKRVILADANLDKVLSAYNKHRDKPIREQAENIIHLFTLTNLGAPAAFKYFDTTIDRKRYTSTKEVLDATLIHQSITGLYETRIDLSQLGGDGGGGGGSSGGSGGTAPLEEEYRLFLEAPIQNVTLLEQWKREIPKVWAEINPPGLASTQAPIHVQLLSTALPVRVRQYPITLEAKRSLRETIRKFRAAGILRPVHSPWNTPLLPVRKSGTSEYRMVQDLREVNKRVETIHPTVPNPYTLLSLLPPDRIWYSVLDLKDAFFCIPLAPESQLIFAFEWADAEEGESGQLTWTRLPQGFKNSPTLFDEALNRDLQGFRLDHPSVSLLQYVDDLLIAADTQAACLSATRDLLMTLAELGYRVSGKKAQLCQEEVTYLGFKIHKGSRSLSNSRTQAILQIPVPKTKRQVREFLGTIGYCRLWIPGFAELAQPLYAATRGGNDPLVWGEKEEEAFQSLKLALTQPPALALPSLDKPFQLFVEETSGAAKGVLTQALGPWKRPVAYLSKRLDPVAAGWPRCLRAIAAAALLTREASKLTFGQDIEITSSHNLESLLRSPPDKWLTNARITQYQVLLLDPPRVRFKQTAALNPATLLPETDDTLPIHHCLDTLDSLTSTRPDLTDQPLAQAEATLFTDGSSYIRDGKRYAGAAVVTLDSVIWAEPLPIGTSAQKAELIALTKALEWSKDKSVNIYTDSRYAFATLHVHGMIYRERGLLTAGGKAIKNAPEILALLTAVWLPKRVAVMHCKGHQKDDAPTSTGNRRADEVAREVAIRPLSTQATISAGKRTADGSEFEKRTADGSEFESPKKKAKVE

SEQ ID NO: 6841 - protein, 2096 aa, synthetic construct
MPAAKRVKLDGGDKKYSIGLDIGTNSVGWAVITDEYKVPSKKFKVLGNTDRHSIKKNLIGALLFDSGETAEATRLKRTARRRYTRRKNRICYLQEIFSNEMAKVDDSFFHRLEESFLVEEDKKHERHPIFGNIVDEVAYHEKYPTIYHLRKKLVDSTDKADLRLIYLALAHMIKFRGHFLIEGDLNPDNSDVDKLFIQLVQTYNQLFEENPINASGVDAKAILSARLSKSRRLENLIAQLPGEKKNGLFGNLIALSLGLTPNFKSNFDLAEDAKLQLSKDTYDDDLDNLLAQIGDQYADLFLAAKNLSDAILLSDILRVNTEITKAPLSASMIKRYDEHHQDLTLLKALVRQQLPEKYKEIFFDQSKNGYAGYIDGGASQEEFYKFIKPILEKMDGTEELLVKLNREDLLRKQRTFDNGSIPHQIHLGELHAILRRQEDFYPFLKDNREKIEKILTFRIPYYVGPLARGNSRFAWMTRKSEETITPWNFEEVVDKGASAQSFIERMTNFDKNLPNEKVLPKHSLLYEYFTVYNELTKVKYVTEGMRKPAFLSGEQKKAIVDLLFKTNRKVTVKQLKEDYFKKIECFDSVEISGVEDRFNASLGTYHDLLKIIKDKDFLDNEENEDILEDIVLTLTLFEDREMIEERLKTYAHLFDDKVMKQLKRRRYTGWGRLSRKLINGIRDKQSGKTILDFLKSDGFANRNFMQLIHDDSLTFKEDIQKAQVSGQGDSLHEHIANLAGSPAIKKGILQTVKVVDELVKVMGRHKPENIVIEMARENQTTQKGQKNSRERMKRIEEGIKELGSQILKEHPVENTQLQNEKLYLYYLQNGRDMYVDQELDINRLSDYDVDHIVPQSFLKDDSIDNKVLTRSDKARGKSDNVPSEEVVKKMKNYWRQLLNAKLITQRKFDNLTKAERGGLSELDKAGFIKRQLVETRQITKHVAQILDSRMNTKYDENDKLIREVKVITLKSKLVSDFRKDFQFYKVREINNYHHAHDAYLNAVVGTALIKKYPKLESEFVYGDYKVYDVRKMIAKSEQEIGKATAKYFFYSNIMNFFKTEITLANGEIRKRPLIETNGETGEIVWDKGRDFATVRKVLSMPQVNIVKKTEVQTGGFSKESILPKRNSDKLIARKKDWDPKKYGGFDSPTVAYSVLVVAKVEKGKSKKLKSVKELLGITIMERSSFEKNPIDFLEAKGYKEVKKDLIIKLPKYSLFELENGRKRMLASAGELQKGNELALPSKYVNFLYLASHYEKLKGSPEDNEQKQLFVEQHKHYLDEIIEQISEFSKRVILADANLDKVLSAYNKHRDKPIREQAENIIHLFTLTNLGAPAAFKYFDTTIDRKRYTSTKEVLDATLIHQSITGLYETRIDLSQLGGDGGGGGGSSGGSGGTAPLEEEYRLFLEAPIQNVTLLEQWKREIPKVWAEINPPGLASTQAPIHVQLLSTALPVRVRQYPITLEAKRSLRETIRKFRAAGILRPVHSPWNTPLLPVRKSGTSEYRMVQDLREVNKRVETIHPTVPNPYTLLSLLPPDRIWYSVLDLKDAFFCIPLAPESQLIFAFEWADAEEGESGQLTWTRLPQGFKNSPTLFNEALNRDLQGFRLDHPSVSLLQYVDDLLIAADTQAACLSATRDLLMTLAELGYRVSGKKAQLCQEEVTYLGFKIHKGSRSLSNSRTQAILQIPVPKTKRQVREFLGTIGYCRLWIPGFAELAQPLYAATRPGNDPLVWGEKEEEAFQSLKLALTQPPALALPSLDKPFQLFVEETSGAAKGVLTQALGPWKRPVAYLSKRLDPVAAGWPRCLRAIAAAALLTREASKLTFGQDIEITSSHNLESLLRSPPDKWLTNARITQYQVLLLDPPRVRFKQTAALNPATLLPETDDTLPIHHCLDTLDSLTSTRPDLTDQPLAQAEATLFTDGSSYIRDGKRYAGAAVVTLDSVIWAEPLPIGTSAQKAELIALTKALEWSKDKSVNIYTDSRYAFATLHVHGMIYRERGWLTAGGKAIKNAPEILALLTAVWLPKRVAVMHCKGHQKDDAPTSTGNRRADEVAREVAIRPLSTQATISAGKRTADGSEFEKRTADGSEFESPKKKAKVE

SEQ ID NO: 6842 - protein, 2100 aa, synthetic construct
MPAAKRVKLDGGDKKYSIGLDIGTNSVGWAVITDEYKVPSKKFKVLGNTDRHSIKKNLIGALLFDSGETAEATRLKRTARRRYTRRKNRICYLQEIFSNEMAKVDDSFFHRLEESFLVEEDKKHERHPIFGNIVDEVAYHEKYPTIYHLRKKLVDSTDKADLRLIYLALAHMIKFRGHFLIEGDLNPDNSDVDKLFIQLVQTYNQLFEENPINASGVDAKAILSARLSKSRRLENLIAQLPGEKKNGLFGNLIALSLGLTPNFKSNFDLAEDAKLQLSKDTYDDDLDNLLAQIGDQYADLFLAAKNLSDAILLSDILRVNTEITKAPLSASMIKRYDEHHQDLTLLKALVRQQLPEKYKEIFFDQSKNGYAGYIDGGASQEEFYKFIKPILEKMDGTEELLVKLNREDLLRKQRTFDNGSIPHQIHLGELHAILRRQEDFYPFLKDNREKIEKILTFRIPYYVGPLARGNSRFAWMTRKSEETITPWNFEEVVDKGASAQSFIERMTNFDKNLPNEKVLPKHSLLYEYFTVYNELTKVKYVTEGMRKPAFLSGEQKKAIVDLLFKTNRKVTVKQLKEDYFKKIECFDSVEISGVEDRFNASLGTYHDLLKIIKDKDFLDNEENEDILEDIVLTLTLFEDREMIEERLKTYAHLFDDKVMKQLKRRRYTGWGRLSRKLINGIRDKQSGKTILDFLKSDGFANRNFMQLIHDDSLTFKEDIQKAQVSGQGDSLHEHIANLAGSPAIKKGILQTVKVVDELVKVMGRHKPENIVIEMARENQTTQKGQKNSRERMKRIEEGIKELGSQILKEHPVENTQLQNEKLYLYYLQNGRDMYVDQELDINRLSDYDVDHIVPQSFLKDDSIDNKVLTRSDKARGKSDNVPSEEVVKKMKNYWRQLLNAKLITQRKFDNLTKAERGGLSELDKAGFIKRQLVETRQITKHVAQILDSRMNTKYDENDKLIREVKVITLKSKLVSDFRKDFQFYKVREINNYHHAHDAYLNAVVGTALIKKYPKLESEFVYGDYKVYDVRKMIAKSEQEIGKATAKYFFYSNIMNFFKTEITLANGEIRKRPLIETNGETGEIVWDKGRDFATVRKVLSMPQVNIVKKTEVQTGGFSKESILPKRNSDKLIARKKDWDPKKYGGFDSPTVAYSVLVVAKVEKGKSKKLKSVKELLGITIMERSSFEKNPIDFLEAKGYKEVKKDLIIKLPKYSLFELENGRKRMLASAGELQKGNELALPSKYVNFLYLASHYEKLKGSPEDNEQKQLFVEQHKHYLDEIIEQISEFSKRVILADANLDKVLSAYNKHRDKPIREQAENIIHLFTLTNLGAPAAFKYFDTTIDRKRYTSTKEVLDATLIHQSITGLYETRIDLSQLGGDGGGGGGSSGGSGGTVSLQDEHRLFDIPVTTSLPDVWLQDFPQAWAETGGLGRAKCQAPIIIDLKPTAVPVSIKQYPMSLEAHMGIRQHIIKFLELGVLRPCRSPWNTPLLPVKKPGTQDYRPVQDLREINKRTVDIHPTVPNPYNLLSTLKPDYSWYTVLDLKDAFFCLPLAPQSQELFAFEWKDPERGISGQLTWTRLPQGFKNSPTLFNEALHRDLTDFRTQHPEVTLLQYVDDLLLAAPTKKACTQGTRHLLQELGEKGYRASAKKAQICQTKVTYLGYILSEGKRWLTPGRIETVARIPPPRNPREVREFLGTAGFCRLWIPGFAELAAPLYALTKPSTPFTWQTEHQLAFEALKKALLSAPALGLPDTSKPFTLFLDERQGIAKGVLTQKLGPWKRPVAYLSKKLDPVAAGWPPCLRIMAATAMLVKDSAKLTLGQPLTVITPHTLEAIVRQPPDRWITNARLTHYQALLLDTDRVQFGPPVTLNPATLLPVPENQPSPHDCRQVLAETHGTREDLKDQELPDADHTWYTDGSSYLDSGTRRAGAAVVDGHNTIWAQSLPPGTSAQKAELIALTKALELSKGKKANIYTDSRYAFATAHTHGSIYERRGWLTSEGKEIKNKAEIIALLKALFLPQEVAIIHCPGHQKGQDPVAVGNRQADRVARQAAMAEVLTLATEPDNTSHITAGKRTADGSEFEKRTADGSEFESPKKKAKVE

SEQ ID NO: 6843 - protein, 2085 aa, synthetic construct
MPAAKRVKLDGGDKKYSIGLDIGTNSVGWAVITDEYKVPSKKFKVLGNTDRHSIKKNLIGALLFDSGETAEATRLKRTARRRYTRRKNRICYLQEIFSNEMAKVDDSFFHRLEESFLVEEDKKHERHPIFGNIVDEVAYHEKYPTIYHLRKKLVDSTDKADLRLIYLALAHMIKFRGHFLIEGDLNPDNSDVDKLFIQLVQTYNQLFEENPINASGVDAKAILSARLSKSRRLENLIAQLPGEKKNGLFGNLIALSLGLTPNFKSNFDLAEDAKLQLSKDTYDDDLDNLLAQIGDQYADLFLAAKNLSDAILLSDILRVNTEITKAPLSASMIKRYDEHHQDLTLLKALVRQQLPEKYKEIFFDQSKNGYAGYIDGGASQEEFYKFIKPILEKMDGTEELLVKLNREDLLRKQRTFDNGSIPHQIHLGELHAILRRQEDFYPFLKDNREKIEKILTFRIPYYVGPLARGNSRFAWMTRKSEETITPWNFEEVVDKGASAQSFIERMTNFDKNLPNEKVLPKHSLLYEYFTVYNELTKVKYVTEGMRKPAFLSGEQKKAIVDLLFKTNRKVTVKQLKEDYFKKIECFDSVEISGVEDRFNASLGTYHDLLKIIKDKDFLDNEENEDILEDIVLTLTLFEDREMIEERLKTYAHLFDDKVMKQLKRRRYTGWGRLSRKLINGIRDKQSGKTILDFLKSDGFANRNFMQLIHDDSLTFKEDIQKAQVSGQGDSLHEHIANLAGSPAIKKGILQTVKVVDELVKVMGRHKPENIVIEMARENQTTQKGQKNSRERMKRIEEGIKELGSQILKEHPVENTQLQNEKLYLYYLQNGRDMYVDQELDINRLSDYDVDHIVPQSFLKDDSIDNKVLTRSDKARGKSDNVPSEEVVKKMKNYWRQLLNAKLITQRKFDNLTKAERGGLSELDKAGFIKRQLVETRQITKHVAQILDSRMNTKYDENDKLIREVKVITLKSKLVSDFRKDFQFYKVREINNYHHAHDAYLNAVVGTALIKKYPKLESEFVYGDYKVYDVRKMIAKSEQEIGKATAKYFFYSNIMNFFKTEITLANGEIRKRPLIETNGETGEIVWDKGRDFATVRKVLSMPQVNIVKKTEVQTGGFSKESILPKRNSDKLIARKKDWDPKKYGGFDSPTVAYSVLVVAKVEKGKSKKLKSVKELLGITIMERSSFEKNPIDFLEAKGYKEVKKDLIIKLPKYSLFELENGRKRMLASAGELQKGNELALPSKYVNFLYLASHYEKLKGSPEDNEQKQLFVEQHKHYLDEIIEQISEFSKRVILADANLDKVLSAYNKHRDKPIREQAENIIHLFTLTNLGAPAAFKYFDTTIDRKRYTSTKEVLDATLIHQSITGLYETRIDLSQLGGDGGGGGGSSGGSGGVPWILKKPLELTIKLDLEEQQGTLLNNSILSKKGKEELKQLFEKYSALWQSWENQVGHRRIRPHKIATGTVKPTPQKQYHINPKAKPDIQIVINDLLKQGVLIQKESTMNTPVYPVPKPNGRWRMVLDYRAVNKVTPLIAVQNQHSYGILGSLFKGRYKTTIDLSNGFWAHPIVPEDYWITAFTWQGKQYCWTVLPQGFLNSPGLFTGDVVDLLQGIPNVEVYVDDVYISHDSEKEHLEYLDILFNRLKEAGYIISLKKSNIANSIVDFLGFQITNEGRGLTDTFKEKLENITAPTTLKQLQSILGLLNFARNFIPDFTELIAPLYALIPKSTKNYVPWQIEHSTTLETLITKLNGAEYLQGRKGDKTLIMKVNASYTTGYIRYYNEGEKKPISYVSIVFSKTELKFTELEKLLTTVHKGLLKALDLSMGQNIHVYSPIVSMQNIQKTPQTAKKALASRWLSWLSYLEDPRIRFFYDPQMPALKDLPAVDTGKDNKKHPSNFQHIFYTDGSAITSPTKEGHLNAGMGIVYFINKDGNLQKQQEWSISLGNHTAQFAEIAAFEFALKKCLPLGGNILVVTDSNYVAKAYNEELDVWASNGFVNNRKKPLKHISKWKSVADLKRLRPDVVVTHEPGHQKLDSSPHAYGNNLADQLATQASFKVHAGKRTADGSEFEKRTADGSEFESPKKKAKVE

SEQ ID NO: 6844 - protein, 2093 aa, synthetic construct
MPAAKRVKLDGGDKKYSIGLDIGTNSVGWAVITDEYKVPSKKFKVLGNTDRHSIKKNLIGALLFDSGETAEATRLKRTARRRYTRRKNRICYLQEIFSNEMAKVDDSFFHRLEESFLVEEDKKHERHPIFGNIVDEVAYHEKYPTIYHLRKKLVDSTDKADLRLIYLALAHMIKFRGHFLIEGDLNPDNSDVDKLFIQLVQTYNQLFEENPINASGVDAKAILSARLSKSRRLENLIAQLPGEKKNGLFGNLIALSLGLTPNFKSNFDLAEDAKLQLSKDTYDDDLDNLLAQIGDQYADLFLAAKNLSDAILLSDILRVNTEITKAPLSASMIKRYDEHHQDLTLLKALVRQQLPEKYKEIFFDQSKNGYAGYIDGGASQEEFYKFIKPILEKMDGTEELLVKLNREDLLRKQRTFDNGSIPHQIHLGELHAILRRQEDFYPFLKDNREKIEKILTFRIPYYVGPLARGNSRFAWMTRKSEETITPWNFEEVVDKGASAQSFIERMTNFDKNLPNEKVLPKHSLLYEYFTVYNELTKVKYVTEGMRKPAFLSGEQKKAIVDLLFKTNRKVTVKQLKEDYFKKIECFDSVEISGVEDRFNASLGTYHDLLKIIKDKDFLDNEENEDILEDIVLTLTLFEDREMIEERLKTYAHLFDDKVMKQLKRRRYTGWGRLSRKLINGIRDKQSGKTILDFLKSDGFANRNFMQLIHDDSLTFKEDIQKAQVSGQGDSLHEHIANLAGSPAIKKGILQTVKVVDELVKVMGRHKPENIVIEMARENQTTQKGQKNSRERMKRIEEGIKELGSQILKEHPVENTQLQNEKLYLYYLQNGRDMYVDQELDINRLSDYDVDHIVPQSFLKDDSIDNKVLTRSDKARGKSDNVPSEEVVKKMKNYWRQLLNAKLITQRKFDNLTKAERGGLSELDKAGFIKRQLVETRQITKHVAQILDSRMNTKYDENDKLIREVKVITLKSKLVSDFRKDFQFYKVREINNYHHAHDAYLNAVVGTALIKKYPKLESEFVYGDYKVYDVRKMIAKSEQEIGKATAKYFFYSNIMNFFKTEITLANGEIRKRPLIETNGETGEIVWDKGRDFATVRKVLSMPQVNIVKKTEVQTGGFSKESILPKRNSDKLIARKKDWDPKKYGGFDSPTVAYSVLVVAKVEKGKSKKLKSVKELLGITIMERSSFEKNPIDFLEAKGYKEVKKDLIIKLPKYSLFELENGRKRMLASAGELQKGNELALPSKYVNFLYLASHYEKLKGSPEDNEQKQLFVEQHKHYLDEIIEQISEFSKRVILADANLDKVLSAYNKHRDKPIREQAENIIHLFTLTNLGAPAAFKYFDTTIDRKRYTSTKEVLDATLIHQSITGLYETRIDLSQLGGDGGGGGGSSGGSGGTLQLEEEYRLFEPESTQKQEMDIWLKNFPQAWAETGGMGTAHCQAPVLIQLKATATPISIRQYPMPHEAYQGIKPHIRRMLDQGILKPCQSPWNTPLLPVKKPGTEDYRPVQDLREVNKRVEDIHPTVPNPYNLLSTLPPSHPWYTVLDLKDAFFCLRLHSESQLLFAFEWRDPEIGLSGQLTWTRLPQGFKNSPTLFNEALHSDLADFRVRYPALVLLQYVDDLLLAAATRTECLEGTKALLETLGNKGYRASAKKAQICLQEVTYLGYSLKDGQRWLTKARKEAILSIPVPKNSRQVREFLGTAGYCRLWIPGFAELAAPLYPLTRPGTLFQWGTEQQLAFEDIKKALLSSPALGLPDITKPFELFIDENSGFAKGVLVQKLGPWKRPVAYLSKKLDTVASGWPPCLRMVAAIAILVKDAGKLTLGQPLTILTSHPVEALVRQPPNKWLSNARMTHYQAMLLDAERVHFGPTVSLNPATLLPLPSGGNHHDCLQILAETHGTRPDLTDQPLPDADLTWYTDGSSFIRNGEREAGAAVTTESEVIWAAPLPPGTSAQRAELIALTQALKMAEGKKLTVYTDSRYAFATTHVHGEIYRRRGWLTSEGKEIKNKNEILALLEALFLPKRLSIIHCPGHQKGDSPQAKGNRLADDTAKKAATETHSSLTVLPAGKRTADGSEFEKRTADGSEFESPKKKAKVE

SEQ ID NO: 6845 - protein, 2125 aa, synthetic construct
MPAAKRVKLDGGDKKYSIGLDIGTNSVGWAVITDEYKVPSKKFKVLGNTDRHSIKKNLIGALLFDSGETAEATRLKRTARRRYTRRKNRICYLQEIFSNEMAKVDDSFFHRLEESFLVEEDKKHERHPIFGNIVDEVAYHEKYPTIYHLRKKLVDSTDKADLRLIYLALAHMIKFRGHFLIEGDLNPDNSDVDKLFIQLVQTYNQLFEENPINASGVDAKAILSARLSKSRRLENLIAQLPGEKKNGLFGNLIALSLGLTPNFKSNFDLAEDAKLQLSKDTYDDDLDNLLAQIGDQYADLFLAAKNLSDAILLSDILRVNTEITKAPLSASMIKRYDEHHQDLTLLKALVRQQLPEKYKEIFFDQSKNGYAGYIDGGASQEEFYKFIKPILEKMDGTEELLVKLNREDLLRKQRTFDNGSIPHQIHLGELHAILRRQEDFYPFLKDNREKIEKILTFRIPYYVGPLARGNSRFAWMTRKSEETITPWNFEEVVDKGASAQSFIERMTNFDKNLPNEKVLPKHSLLYEYFTVYNELTKVKYVTEGMRKPAFLSGEQKKAIVDLLFKTNRKVTVKQLKEDYFKKIECFDSVEISGVEDRFNASLGTYHDLLKIIKDKDFLDNEENEDILEDIVLTLTLFEDREMIEERLKTYAHLFDDKVMKQLKRRRYTGWGRLSRKLINGIRDKQSGKTILDFLKSDGFANRNFMQLIHDDSLTFKEDIQKAQVSGQGDSLHEHIANLAGSPAIKKGILQTVKVVDELVKVMGRHKPENIVIEMARENQTTQKGQKNSRERMKRIEEGIKELGSQILKEHPVENTQLQNEKLYLYYLQNGRDMYVDQELDINRLSDYDVDHIVPQSFLKDDSIDNKVLTRSDKARGKSDNVPSEEVVKKMKNYWRQLLNAKLITQRKFDNLTKAERGGLSELDKAGFIKRQLVETRQITKHVAQILDSRMNTKYDENDKLIREVKVITLKSKLVSDFRKDFQFYKVREINNYHHAHDAYLNAVVGTALIKKYPKLESEFVYGDYKVYDVRKMIAKSEQEIGKATAKYFFYSNIMNFFKTEITLANGEIRKRPLIETNGETGEIVWDKGRDFATVRKVLSMPQVNIVKKTEVQTGGFSKESILPKRNSDKLIARKKDWDPKKYGGFDSPTVAYSVLVVAKVEKGKSKKLKSVKELLGITIMERSSFEKNPIDFLEAKGYKEVKKDLIIKLPKYSLFELENGRKRMLASAGELQKGNELALPSKYVNFLYLASHYEKLKGSPEDNEQKQLFVEQHKHYLDEIIEQISEFSKRVILADANLDKVLSAYNKHRDKPIREQAENIIHLFTLTNLGAPAAFKYFDTTIDRKRYTSTKEVLDATLIHQSITGLYETRIDLSQLGGDGGGGGGSSGGSGGLLGRDLLTKLKAQIQFSTEGPQVTWEDRPAMCLVLNLEEEYRLHEKPVPPSIDPSWLQLFPMVWAEKAGMGLANQVPPVVVELKSDASPVAVRQYPMSKEAREGIRPHIQRFLDLGILVPCQSPWNTPLLPVKKPGTNDYRPVQDLREVNKRVQDIHPTVPNPYNLLSSLPPSHTWYSVLDLKDAFFCLKLHPNSQPLFAFEWRDPEKGNTGQLTWTRLPQGFKNSPTLFNEALHRDLASFRALNPQVVMLQYVDDLLVAAPTYRDCKEGTRRLLQELSKLGYRVSAKKAQLCREEVTYLGYLLKGGKRWLTPARKATVMKIPTPTTPRQVREFLGTAGFCRLWIPGFASLAAPLYPLTRPKVPFTWTEAHQEAFGRIKEALLSAPALALPDLTKPFALYVDEKEGVARGVLTQTLGPWRRPVAYLSKKLDPVASGWPTCLKAIAAVALLLKDADKLTLGQNVLVIAPHNLESIVRQPPDRWMTNARMTHYQSLLLNERVSFAPPAILNPATLLPVESDDTPIHICSEILAEETGTRPDLRDQPLPGVPAWYTDGSSFIMDGRRQAGAAIVDNKRTVWASNLPEGTSAQKAELIALTQALRLAEGKSINIYTDSRYAFATAHVHGAIYKQRGWLTSAGKDIKNKEEILALLEAIHLPKRVAIIHCPGHQRGTDPVATGNRKADEAAKQAAQSTRILTETTKNAGKRTADGSEFEKRTADGSEFESPKKKAKVE

SEQ ID NO: 6846 - protein, 2125 aa, synthetic construct
MPAAKRVKLDGGDKKYSIGLDIGTNSVGWAVITDEYKVPSKKFKVLGNTDRHSIKKNLIGALLFDSGETAEATRLKRTARRRYTRRKNRICYLQEIFSNEMAKVDDSFFHRLEESFLVEEDKKHERHPIFGNIVDEVAYHEKYPTIYHLRKKLVDSTDKADLRLIYLALAHMIKFRGHFLIEGDLNPDNSDVDKLFIQLVQTYNQLFEENPINASGVDAKAILSARLSKSRRLENLIAQLPGEKKNGLFGNLIALSLGLTPNFKSNFDLAEDAKLQLSKDTYDDDLDNLLAQIGDQYADLFLAAKNLSDAILLSDILRVNTEITKAPLSASMIKRYDEHHQDLTLLKALVRQQLPEKYKEIFFDQSKNGYAGYIDGGASQEEFYKFIKPILEKMDGTEELLVKLNREDLLRKQRTFDNGSIPHQIHLGELHAILRRQEDFYPFLKDNREKIEKILTFRIPYYVGPLARGNSRFAWMTRKSEETITPWNFEEVVDKGASAQSFIERMTNFDKNLPNEKVLPKHSLLYEYFTVYNELTKVKYVTEGMRKPAFLSGEQKKAIVDLLFKTNRKVTVKQLKEDYFKKIECFDSVEISGVEDRFNASLGTYHDLLKIIKDKDFLDNEENEDILEDIVLTLTLFEDREMIEERLKTYAHLFDDKVMKQLKRRRYTGWGRLSRKLINGIRDKQSGKTILDFLKSDGFANRNFMQLIHDDSLTFKEDIQKAQVSGQGDSLHEHIANLAGSPAIKKGILQTVKVVDELVKVMGRHKPENIVIEMARENQTTQKGQKNSRERMKRIEEGIKELGSQILKEHPVENTQLQNEKLYLYYLQNGRDMYVDQELDINRLSDYDVDHIVPQSFLKDDSIDNKVLTRSDKARGKSDNVPSEEVVKKMKNYWRQLLNAKLITQRKFDNLTKAERGGLSELDKAGFIKRQLVETRQITKHVAQILDSRMNTKYDENDKLIREVKVITLKSKLVSDFRKDFQFYKVREINNYHHAHDAYLNAVVGTALIKKYPKLESEFVYGDYKVYDVRKMIAKSEQEIGKATAKYFFYSNIMNFFKTEITLANGEIRKRPLIETNGETGEIVWDKGRDFATVRKVLSMPQVNIVKKTEVQTGGFSKESILPKRNSDKLIARKKDWDPKKYGGFDSPTVAYSVLVVAKVEKGKSKKLKSVKELLGITIMERSSFEKNPIDFLEAKGYKEVKKDLIIKLPKYSLFELENGRKRMLASAGELQKGNELALPSKYVNFLYLASHYEKLKGSPEDNEQKQLFVEQHKHYLDEIIEQISEFSKRVILADANLDKVLSAYNKHRDKPIREQAENIIHLFTLTNLGAPAAFKYFDTTIDRKRYTSTKEVLDATLIHQSITGLYETRIDLSQLGGDGGGGGGSSGGSGGLLGRDLLTKLKAQIQFSTEGPQVTWEDRPAMCLVLNLEEEYRLHEKPVPPSIDPSWLQLFPMVWAEKAGMGLANQVPPVVVELKSDASPVAVRQYPMSKEAREGIRPHIQRFLDLGILVPCQSPWNTPLLPVKKPGTNDYRPVQDLREVNKRVQDIHPTVPNPYNLLSSLPPSHTWYSVLDLKDAFFCLKLHPNSQPLFAFEWRDPEKGNTGQLTWTRLPQGFKNSPTLFNEALHRDLASFRALNPQVVMLQYVDDLLVAAPTYRDCKEGTRRLLQELSKLGYRVSAKKAQLCREEVTYLGYLLKGGKRWLTPARKATVMKIPTPTTPRQVREFLGKAGFCRLFIPGFASLAAPLYPLTRPKVPFTWTEAHQEAFGRIKEALLSAPALALPDLTKPFALYVDEKEGVARGVLTQTLGPWRRPVAYLSKKLDPVASGWPTCLKAIAAVALLLKDADKLTLGQNVLVIAPHNLESIVRQPPDRWMTNARMTHYQSLLLNERVSFAPPAILNPATLLPVESDDTPIHICSEILAEETGTRPDLRDQPLPGVPAWYTDGSSFIMDGRRQAGAAIVDNKRTVWASNLPEGTSAQKAELIALTQALRLAEGKSINIYTDSRYAFATAHVHGAIYKQRGWLTSAGKDIKNKEEILALLEAIHLPKRVAIIHCPGHQRGTDPVATGNRKADEAAKQAAQSTRILTETTKNAGKRTADGSEFEKRTADGSEFESPKKKAKVE

SEQ ID NO: 6847 - protein, 2216 aa, synthetic construct
MPAAKRVKLDGGDKKYSIGLDIGTNSVGWAVITDEYKVPSKKFKVLGNTDRHSIKKNLIGALLFDSGETAEATRLKRTARRRYTRRKNRICYLQEIFSNEMAKVDDSFFHRLEESFLVEEDKKHERHPIFGNIVDEVAYHEKYPTIYHLRKKLVDSTDKADLRLIYLALAHMIKFRGHFLIEGDLNPDNSDVDKLFIQLVQTYNQLFEENPINASGVDAKAILSARLSKSRRLENLIAQLPGEKKNGLFGNLIALSLGLTPNFKSNFDLAEDAKLQLSKDTYDDDLDNLLAQIGDQYADLFLAAKNLSDAILLSDILRVNTEITKAPLSASMIKRYDEHHQDLTLLKALVRQQLPEKYKEIFFDQSKNGYAGYIDGGASQEEFYKFIKPILEKMDGTEELLVKLNREDLLRKQRTFDNGSIPHQIHLGELHAILRRQEDFYPFLKDNREKIEKILTFRIPYYVGPLARGNSRFAWMTRKSEETITPWNFEEVVDKGASAQSFIERMTNFDKNLPNEKVLPKHSLLYEYFTVYNELTKVKYVTEGMRKPAFLSGEQKKAIVDLLFKTNRKVTVKQLKEDYFKKIECFDSVEISGVEDRFNASLGTYHDLLKIIKDKDFLDNEENEDILEDIVLTLTLFEDREMIEERLKTYAHLFDDKVMKQLKRRRYTGWGRLSRKLINGIRDKQSGKTILDFLKSDGFANRNFMQLIHDDSLTFKEDIQKAQVSGQGDSLHEHIANLAGSPAIKKGILQTVKVVDELVKVMGRHKPENIVIEMARENQTTQKGQKNSRERMKRIEEGIKELGSQILKEHPVENTQLQNEKLYLYYLQNGRDMYVDQELDINRLSDYDVDHIVPQSFLKDDSIDNKVLTRSDKARGKSDNVPSEEVVKKMKNYWRQLLNAKLITQRKFDNLTKAERGGLSELDKAGFIKRQLVETRQITKHVAQILDSRMNTKYDENDKLIREVKVITLKSKLVSDFRKDFQFYKVREINNYHHAHDAYLNAVVGTALIKKYPKLESEFVYGDYKVYDVRKMIAKSEQEIGKATAKYFFYSNIMNFFKTEITLANGEIRKRPLIETNGETGEIVWDKGRDFATVRKVLSMPQVNIVKKTEVQTGGFSKESILPKRNSDKLIARKKDWDPKKYGGFDSPTVAYSVLVVAKVEKGKSKKLKSVKELLGITIMERSSFEKNPIDFLEAKGYKEVKKDLIIKLPKYSLFELENGRKRMLASAGELQKGNELALPSKYVNFLYLASHYEKLKGSPEDNEQKQLFVEQHKHYLDEIIEQISEFSKRVILADANLDKVLSAYNKHRDKPIREQAENIIHLFTLTNLGAPAAFKYFDTTIDRKRYTSTKEVLDATLIHQSITGLYETRIDLSQLGGDGGGGGGSSGGSGGTLGDQGSRGSDPLPEPRVTLTVEGIPTEFLVNTGAEHSVLTKPMGKMGSKRTVVAGATGSKVYPWTTKRLLKIGQKQVTHSFLVIPECPAPLLGRDLLTKLKAQIQFSTEGPQVTWEDRPAMCLVLNLEEEYRLHEKPVPPSIDPSWLQLFPMVWAEKAGMGLANQVPPVVVELKSDASPVAVRQYPMSKEAREGIRPHIQRFLDLGILVPCQSPWNTPLLPVKKPGTNDYRPVQDLREVNKRVQDIHPTVPNPYNLLSSLPPSHTWYSVLDLKDAFFCLKLHPNSQPLFAFEWRDPEKGNTGQLTWTRLPQGFKNSPTLFNEALHRDLASFRALNPQVVMLQYVDDLLVAAPTYRDCKEGTRRLLQELSKLGYRVSAKKAQLCREEVTYLGYLLKGGKRWLTPARKATVMKIPTPTTPRQVREFLGKAGFCRLFIPGFASLAAPLYPLTRPKVPFTWTEAHQEAFGRIKEALLSAPALALPDLTKPFALYVDEKEGVARGVLTQTLGPWRRPVAYLSKKLDPVASGWPTCLKAIAAVALLLKDADKLTLGQNVLVIAPHNLESIVRQPPDRWMTNARMTHYQSLLLNERVSFAPPAILNPATLLPVESDDTPIHICSEILAEETGTRPDLRDQPLPGVPAWYTDGSSFIMDGRRQAGAAIVDNKRTVWASNLPEGTSAQKAELIALTQALRLAEGKSINIYTDSRYAFATAHVHGAIYKQRGWLTSAGKDIKNKEEILALLEAIHLPKRVAIIHCPGHQRGTDPVATGNRKADEAAKQAAQSTRILTETTKNAGKRTADGSEFEKRTADGSEFESPKKKAKVE

SEQ ID NO: 6848 - protein, 2094 aa, synthetic construct
MPAAKRVKLDGGDKKYSIGLDIGTNSVGWAVITDEYKVPSKKFKVLGNTDRHSIKKNLIGALLFDSGETAEATRLKRTARRRYTRRKNRICYLQEIFSNEMAKVDDSFFHRLEESFLVEEDKKHERHPIFGNIVDEVAYHEKYPTIYHLRKKLVDSTDKADLRLIYLALAHMIKFRGHFLIEGDLNPDNSDVDKLFIQLVQTYNQLFEENPINASGVDAKAILSARLSKSRRLENLIAQLPGEKKNGLFGNLIALSLGLTPNFKSNFDLAEDAKLQLSKDTYDDDLDNLLAQIGDQYADLFLAAKNLSDAILLSDILRVNTEITKAPLSASMIKRYDEHHQDLTLLKALVRQQLPEKYKEIFFDQSKNGYAGYIDGGASQEEFYKFIKPILEKMDGTEELLVKLNREDLLRKQRTFDNGSIPHQIHLGELHAILRRQEDFYPFLKDNREKIEKILTFRIPYYVGPLARGNSRFAWMTRKSEETITPWNFEEVVDKGASAQSFIERMTNFDKNLPNEKVLPKHSLLYEYFTVYNELTKVKYVTEGMRKPAFLSGEQKKAIVDLLFKTNRKVTVKQLKEDYFKKIECFDSVEISGVEDRFNASLGTYHDLLKIIKDKDFLDNEENEDILEDIVLTLTLFEDREMIEERLKTYAHLFDDKVMKQLKRRRYTGWGRLSRKLINGIRDKQSGKTILDFLKSDGFANRNFMQLIHDDSLTFKEDIQKAQVSGQGDSLHEHIANLAGSPAIKKGILQTVKVVDELVKVMGRHKPENIVIEMARENQTTQKGQKNSRERMKRIEEGIKELGSQILKEHPVENTQLQNEKLYLYYLQNGRDMYVDQELDINRLSDYDVDHIVPQSFLKDDSIDNKVLTRSDKARGKSDNVPSEEVVKKMKNYWRQLLNAKLITQRKFDNLTKAERGGLSELDKAGFIKRQLVETRQITKHVAQILDSRMNTKYDENDKLIREVKVITLKSKLVSDFRKDFQFYKVREINNYHHAHDAYLNAVVGTALIKKYPKLESEFVYGDYKVYDVRKMIAKSEQEIGKATAKYFFYSNIMNFFKTEITLANGEIRKRPLIETNGETGEIVWDKGRDFATVRKVLSMPQVNIVKKTEVQTGGFSKESILPKRNSDKLIARKKDWDPKKYGGFDSPTVAYSVLVVAKVEKGKSKKLKSVKELLGITIMERSSFEKNPIDFLEAKGYKEVKKDLIIKLPKYSLFELENGRKRMLASAGELQKGNELALPSKYVNFLYLASHYEKLKGSPEDNEQKQLFVEQHKHYLDEIIEQISEFSKRVILADANLDKVLSAYNKHRDKPIREQAENIIHLFTLTNLGAPAAFKYFDTTIDRKRYTSTKEVLDATLIHQSITGLYETRIDLSQLGGDGGGGGGSSGGSGGTLGIEDEYRLHETSTEPDVSLGSTWLSDFPQAWAETGGMGLAVRQAPLIIPLKATSTPVSIQQYPMSHEARLGIKPHIQRLLDQGILVPCQSPWNTPLLPVKKPGTNDYRPVQDLREVNKRVEDIHPTVPNPYNLLSGLPPSHQWYTVLDLKDAFFCLRLHPTSQPLFAFEWRDPGMGISGQLTWTRLPQGFKNSPTLFNEALHRDLADFRIQHPDLILLQYVDDILLAATSELDCQQGTRALLQTLGDLGYRASAKKAQICQKQVKYLGYLLREGQRWLTEARKETVMGQPVPKTPRQLREFLGTAGFCRLWIPGFAEMAAPLYPLTKPGTLFSWGPDQQKAYQEIKQALLTAPALGLPDLTKPFELFVDEKQGYAKGVLTQKLGPWRRPVAYLSKKLDPVAAGWPPCLRMVAAIAVLTKDAGKLTMGQPLVILAPHAVEALVKQPPDRWLSNARMTHYQAMLLDTDRVQFGPVVALNPATLLPLPEEGAPHDCLEILAETHGTRPDLTDQPIPDADHTWYTDGSSFLQEGQRKAGAAVTTETEVIWAGALPAGTSAQRAELIALTQALKMAEGKRLNVYTDSRYAFATAHIHGEIYRRRGWLTSEGREIKNKSEILALLKALFLPKRLSIIHCLGHQKGDSAEARGNRLADQAAREAAIKTPPDTSTLLAGKRTADGSEFEKRTADGSEFESPKKKAKVE

SEQ ID NO: 6849 - protein, 2094 aa, synthetic construct
MPAAKRVKLDGGDKKYSIGLDIGTNSVGWAVITDEYKVPSKKFKVLGNTDRHSIKKNLIGALLFDSGETAEATRLKRTARRRYTRRKNRICYLQEIFSNEMAKVDDSFFHRLEESFLVEEDKKHERHPIFGNIVDEVAYHEKYPTIYHLRKKLVDSTDKADLRLIYLALAHMIKFRGHFLIEGDLNPDNSDVDKLFIQLVQTYNQLFEENPINASGVDAKAILSARLSKSRRLENLIAQLPGEKKNGLFGNLIALSLGLTPNFKSNFDLAEDAKLQLSKDTYDDDLDNLLAQIGDQYADLFLAAKNLSDAILLSDILRVNTEITKAPLSASMIKRYDEHHQDLTLLKALVRQQLPEKYKEIFFDQSKNGYAGYIDGGASQEEFYKFIKPILEKMDGTEELLVKLNREDLLRKQRTFDNGSIPHQIHLGELHAILRRQEDFYPFLKDNREKIEKILTFRIPYYVGPLARGNSRFAWMTRKSEETITPWNFEEVVDKGASAQSFIERMTNFDKNLPNEKVLPKHSLLYEYFTVYNELTKVKYVTEGMRKPAFLSGEQKKAIVDLLFKTNRKVTVKQLKEDYFKKIECFDSVEISGVEDRFNASLGTYHDLLKIIKDKDFLDNEENEDILEDIVLTLTLFEDREMIEERLKTYAHLFDDKVMKQLKRRRYTGWGRLSRKLINGIRDKQSGKTILDFLKSDGFANRNFMQLIHDDSLTFKEDIQKAQVSGQGDSLHEHIANLAGSPAIKKGILQTVKVVDELVKVMGRHKPENIVIEMARENQTTQKGQKNSRERMKRIEEGIKELGSQILKEHPVENTQLQNEKLYLYYLQNGRDMYVDQELDINRLSDYDVDHIVPQSFLKDDSIDNKVLTRSDKARGKSDNVPSEEVVKKMKNYWRQLLNAKLITQRKFDNLTKAERGGLSELDKAGFIKRQLVETRQITKHVAQILDSRMNTKYDENDKLIREVKVITLKSKLVSDFRKDFQFYKVREINNYHHAHDAYLNAVVGTALIKKYPKLESEFVYGDYKVYDVRKMIAKSEQEIGKATAKYFFYSNIMNFFKTEITLANGEIRKRPLIETNGETGEIVWDKGRDFATVRKVLSMPQVNIVKKTEVQTGGFSKESILPKRNSDKLIARKKDWDPKKYGGFDSPTVAYSVLVVAKVEKGKSKKLKSVKELLGITIMERSSFEKNPIDFLEAKGYKEVKKDLIIKLPKYSLFELENGRKRMLASAGELQKGNELALPSKYVNFLYLASHYEKLKGSPEDNEQKQLFVEQHKHYLDEIIEQISEFSKRVILADANLDKVLSAYNKHRDKPIREQAENIIHLFTLTNLGAPAAFKYFDTTIDRKRYTSTKEVLDATLIHQSITGLYETRIDLSQLGGDGGGGGGSSGGSGGTLNIEDEYRLHETSKEPDVSLGSTWLSDFPQAWAETGGMGLAVRQAPLIIPLKATSTPVSIKQYPMSQEARLGIKPHIQRLLDQGILVPCQSPWNTPLLPVKKPGTNDYRPVQDLREVNKRVEDIHPTVPNPYNLLSGLPPSHQWYTVLDLKDAFFCLRLHPTSQPLFAFEWRDPEMGISGQLTWTRLPQGFKNSPTLFNEALHRDLAGFRIQHPDLILLQYVDDLLLAATSELDCQQGTRALLQTLGDLGYRASAKKAQICQKQVKYLGYLLKEGQRWLTEARKETVMGQPIPKTPRQLREFLGTAGFCRLWIPGFAEMAAPLYPLTKPGTLFNWGPDQQKAFQEIKQALLTAPALGLPDLTKPFELFVDEKQGYAKGVLTQKLGPWRRPVAYLSKKLDPVAAGWPPCLRMVAAIAVLTKDAGKLTMGQPLVILAPHAVEALVKQPPDRWLSNARMTHYQALLLDTDRVQFGPVVALNPATLLPLPEEGLQHDCLDILAEAHGTRSDLMDQPLPDADHTWYTDGSSFLQEGQRKAGAAVTTETEVIWARALPAGTSAQRAELIALTQALKMAEGKKLNVYTDSRYAFATAHIHGEIYRRRGWLTSEGKEIKNKDEILALLKALFLPKRLSIIHCPGHQKGNSAEARGNRMADQAAREVATRETPETSTLLAGKRTADGSEFEKRTADGSEFESPKKKAKVE

SEQ ID NO: 6850 - protein, 2094 aa, synthetic construct
MPAAKRVKLDGGDKKYSIGLDIGTNSVGWAVITDEYKVPSKKFKVLGNTDRHSIKKNLIGALLFDSGETAEATRLKRTARRRYTRRKNRICYLQEIFSNEMAKVDDSFFHRLEESFLVEEDKKHERHPIFGNIVDEVAYHEKYPTIYHLRKKLVDSTDKADLRLIYLALAHMIKFRGHFLIEGDLNPDNSDVDKLFIQLVQTYNQLFEENPINASGVDAKAILSARLSKSRRLENLIAQLPGEKKNGLFGNLIALSLGLTPNFKSNFDLAEDAKLQLSKDTYDDDLDNLLAQIGDQYADLFLAAKNLSDAILLSDILRVNTEITKAPLSASMIKRYDEHHQDLTLLKALVRQQLPEKYKEIFFDQSKNGYAGYIDGGASQEEFYKFIKPILEKMDGTEELLVKLNREDLLRKQRTFDNGSIPHQIHLGELHAILRRQEDFYPFLKDNREKIEKILTFRIPYYVGPLARGNSRFAWMTRKSEETITPWNFEEVVDKGASAQSFIERMTNFDKNLPNEKVLPKHSLLYEYFTVYNELTKVKYVTEGMRKPAFLSGEQKKAIVDLLFKTNRKVTVKQLKEDYFKKIECFDSVEISGVEDRFNASLGTYHDLLKIIKDKDFLDNEENEDILEDIVLTLTLFEDREMIEERLKTYAHLFDDKVMKQLKRRRYTGWGRLSRKLINGIRDKQSGKTILDFLKSDGFANRNFMQLIHDDSLTFKEDIQKAQVSGQGDSLHEHIANLAGSPAIKKGILQTVKVVDELVKVMGRHKPENIVIEMARENQTTQKGQKNSRERMKRIEEGIKELGSQILKEHPVENTQLQNEKLYLYYLQNGRDMYVDQELDINRLSDYDVDHIVPQSFLKDDSIDNKVLTRSDKARGKSDNVPSEEVVKKMKNYWRQLLNAKLITQRKFDNLTKAERGGLSELDKAGFIKRQLVETRQITKHVAQILDSRMNTKYDENDKLIREVKVITLKSKLVSDFRKDFQFYKVREINNYHHAHDAYLNAVVGTALIKKYPKLESEFVYGDYKVYDVRKMIAKSEQEIGKATAKYFFYSNIMNFFKTEITLANGEIRKRPLIETNGETGEIVWDKGRDFATVRKVLSMPQVNIVKKTEVQTGGFSKESILPKRNSDKLIARKKDWDPKKYGGFDSPTVAYSVLVVAKVEKGKSKKLKSVKELLGITIMERSSFEKNPIDFLEAKGYKEVKKDLIIKLPKYSLFELENGRKRMLASAGELQKGNELALPSKYVNFLYLASHYEKLKGSPEDNEQKQLFVEQHKHYLDEIIEQISEFSKRVILADANLDKVLSAYNKHRDKPIREQAENIIHLFTLTNLGAPAAFKYFDTTIDRKRYTSTKEVLDATLIHQSITGLYETRIDLSQLGGDGGGGGGSSGGSGGTLNIEDEYRLHETSKGPDVPLGSTWLSDFPQAWAETGGMGLAVRQAPLIIPLKATSTPVSIKQYPMSQEARLGIKPHIQRLLDQGILVPCQSPWNTPLLPVKKPGTNDYRPVQDLREVNKRVEDIHPTVPNPYNLLSGLPPSHQWYTVLDLKDAFFCLRLHPTSQSLFAFEWRDPEMGISGQLTWTRLPQGFKNSPTLFNEALHRDLADFRIQHPDLILLQYVDDLLLAATSELDCQQGTRALLQTLGDLGYRASAKKAQICQKQVKYLGYLLKEGQRWLTEARKETVMGQPTPKTPRQLREFLGTAGFCRLWIPGFAEMAAPLYPLTKPGTLFEWGPDQQKAYQEIKQALLTAPALGLPDLTKPFELFVDEKQGYAKGVLTQKLGPWRRPVAYLSKKLDPVAAGWPPCLRMVAAIAVLTKDAGKLTMGQPLVILAPHAVEALVKQPPDRWLSNARMTHYQALLLDTDRVQFGPIVALNPATLLPLPEEGLQHDCLDILAEAHGTRPDLTDQPLPDADHTWYTDGSSFLQEGQRKAGAAVTTETEVVWAKALPAGTSAQRAELIALTQALKMAEGKKLNVYTDSRYAFATAHIHGEIYRRRGWLTSEGKEIKNKDEILALLKALFLPKRLSIIHCPGHQKGNRAEARGNRMADQAAREVATRETPETSTLLAGKRTADGSEFEKRTADGSEFESPKKKAKVE

SEQ ID NO: 6851 - protein, 2114 aa, synthetic construct
MPAAKRVKLDGGDKKYSIGLDIGTNSVGWAVITDEYKVPSKKFKVLGNTDRHSIKKNLIGALLFDSGETAEATRLKRTARRRYTRRKNRICYLQEIFSNEMAKVDDSFFHRLEESFLVEEDKKHERHPIFGNIVDEVAYHEKYPTIYHLRKKLVDSTDKADLRLIYLALAHMIKFRGHFLIEGDLNPDNSDVDKLFIQLVQTYNQLFEENPINASGVDAKAILSARLSKSRRLENLIAQLPGEKKNGLFGNLIALSLGLTPNFKSNFDLAEDAKLQLSKDTYDDDLDNLLAQIGDQYADLFLAAKNLSDAILLSDILRVNTEITKAPLSASMIKRYDEHHQDLTLLKALVRQQLPEKYKEIFFDQSKNGYAGYIDGGASQEEFYKFIKPILEKMDGTEELLVKLNREDLLRKQRTFDNGSIPHQIHLGELHAILRRQEDFYPFLKDNREKIEKILTFRIPYYVGPLARGNSRFAWMTRKSEETITPWNFEEVVDKGASAQSFIERMTNFDKNLPNEKVLPKHSLLYEYFTVYNELTKVKYVTEGMRKPAFLSGEQKKAIVDLLFKTNRKVTVKQLKEDYFKKIECFDSVEISGVEDRFNASLGTYHDLLKIIKDKDFLDNEENEDILEDIVLTLTLFEDREMIEERLKTYAHLFDDKVMKQLKRRRYTGWGRLSRKLINGIRDKQSGKTILDFLKSDGFANRNFMQLIHDDSLTFKEDIQKAQVSGQGDSLHEHIANLAGSPAIKKGILQTVKVVDELVKVMGRHKPENIVIEMARENQTTQKGQKNSRERMKRIEEGIKELGSQILKEHPVENTQLQNEKLYLYYLQNGRDMYVDQELDINRLSDYDVDHIVPQSFLKDDSIDNKVLTRSDKARGKSDNVPSEEVVKKMKNYWRQLLNAKLITQRKFDNLTKAERGGLSELDKAGFIKRQLVETRQITKHVAQILDSRMNTKYDENDKLIREVKVITLKSKLVSDFRKDFQFYKVREINNYHHAHDAYLNAVVGTALIKKYPKLESEFVYGDYKVYDVRKMIAKSEQEIGKATAKYFFYSNIMNFFKTEITLANGEIRKRPLIETNGETGEIVWDKGRDFATVRKVLSMPQVNIVKKTEVQTGGFSKESILPKRNSDKLIARKKDWDPKKYGGFDSPTVAYSVLVVAKVEKGKSKKLKSVKELLGITIMERSSFEKNPIDFLEAKGYKEVKKDLIIKLPKYSLFELENGRKRMLASAGELQKGNELALPSKYVNFLYLASHYEKLKGSPEDNEQKQLFVEQHKHYLDEIIEQISEFSKRVILADANLDKVLSAYNKHRDKPIREQAENIIHLFTLTNLGAPAAFKYFDTTIDRKRYTSTKEVLDATLIHQSITGLYETRIDLSQLGGDGGGGGGSSGGSGGVQEISDSRPMLHIYLNGRRFLGLLDTGADKTCIAGRDWPANWPIHQTESSLQGLGMACGVARSSQPLRWQHEDKSGIIHPFVIPTLPFTLWGRDIMKDIKVRLMTDSPDDSQDLMIGAIESNLFADQISWKSDQPVWLNQWPLKQEKLQALQQLVTEQLQLGHLEESNSPWNTPVFVIKKKSGKWRLLQDLRAVNATMHDMGALQPGLPSPPAVPKGWEIIIIDLQDCFFNIKLHPEDCKRFAFSVPSPNFKRPYQRFQWKVLPQGMKNSPTLCQKFVDKAILTVRDKYQDSYIVHYMDDILLAHPSRSIVDEILTSMIQALNKHGLVVSTEKIQKYDNLKYLGTHIQGDSVSYQKLQIRTDKLRTLNDFQKLLGNINWIRPFLKLTTGELKPLFEILNPDSNPISTRKLTPEACKALQLMNERLSTARVKRLDLSQPWSLCILKTEYTPTACLWQDGVVEWIHLPHISPKVITPYDIFCTQLIIKGRHRSKELFSKDPDYIVVPYTKVQFDLLLQEKEDWPISLLGFLGEVHFHLPKDPLLTFTLQTAIIFPHMTSTTPLEKGIVIFTDGSANGRSVTYIQGREPIIKENTQNTAQQAEIVAVITAFEEVSQPFNLYTDSKYVTGLFPEIETATLSPRTKIYTELKHLQRLIHKRQEKFYIGHIRGHTGLPGPLAQGNAYADSLTRILTAAGKRTADGSEFEKRTADGSEFESPKKKAKVE

SEQ ID NO: 6852 - protein, 2088 aa, synthetic construct
MPAAKRVKLDGGDKKYSIGLDIGTNSVGWAVITDEYKVPSKKFKVLGNTDRHSIKKNLIGALLFDSGETAEATRLKRTARRRYTRRKNRICYLQEIFSNEMAKVDDSFFHRLEESFLVEEDKKHERHPIFGNIVDEVAYHEKYPTIYHLRKKLVDSTDKADLRLIYLALAHMIKFRGHFLIEGDLNPDNSDVDKLFIQLVQTYNQLFEENPINASGVDAKAILSARLSKSRRLENLIAQLPGEKKNGLFGNLIALSLGLTPNFKSNFDLAEDAKLQLSKDTYDDDLDNLLAQIGDQYADLFLAAKNLSDAILLSDILRVNTEITKAPLSASMIKRYDEHHQDLTLLKALVRQQLPEKYKEIFFDQSKNGYAGYIDGGASQEEFYKFIKPILEKMDGTEELLVKLNREDLLRKQRTFDNGSIPHQIHLGELHAILRRQEDFYPFLKDNREKIEKILTFRIPYYVGPLARGNSRFAWMTRKSEETITPWNFEEVVDKGASAQSFIERMTNFDKNLPNEKVLPKHSLLYEYFTVYNELTKVKYVTEGMRKPAFLSGEQKKAIVDLLFKTNRKVTVKQLKEDYFKKIECFDSVEISGVEDRFNASLGTYHDLLKIIKDKDFLDNEENEDILEDIVLTLTLFEDREMIEERLKTYAHLFDDKVMKQLKRRRYTGWGRLSRKLINGIRDKQSGKTILDFLKSDGFANRNFMQLIHDDSLTFKEDIQKAQVSGQGDSLHEHIANLAGSPAIKKGILQTVKVVDELVKVMGRHKPENIVIEMARENQTTQKGQKNSRERMKRIEEGIKELGSQILKEHPVENTQLQNEKLYLYYLQNGRDMYVDQELDINRLSDYDVDHIVPQSFLKDDSIDNKVLTRSDKARGKSDNVPSEEVVKKMKNYWRQLLNAKLITQRKFDNLTKAERGGLSELDKAGFIKRQLVETRQITKHVAQILDSRMNTKYDENDKLIREVKVITLKSKLVSDFRKDFQFYKVREINNYHHAHDAYLNAVVGTALIKKYPKLESEFVYGDYKVYDVRKMIAKSEQEIGKATAKYFFYSNIMNFFKTEITLANGEIRKRPLIETNGETGEIVWDKGRDFATVRKVLSMPQVNIVKKTEVQTGGFSKESILPKRNSDKLIARKKDWDPKKYGGFDSPTVAYSVLVVAKVEKGKSKKLKSVKELLGITIMERSSFEKNPIDFLEAKGYKEVKKDLIIKLPKYSLFELENGRKRMLASAGELQKGNELALPSKYVNFLYLASHYEKLKGSPEDNEQKQLFVEQHKHYLDEIIEQISEFSKRVILADANLDKVLSAYNKHRDKPIREQAENIIHLFTLTNLGAPAAFKYFDTTIDRKRYTSTKEVLDATLIHQSITGLYETRIDLSQLGGDGGGGGGSSGGSGGTLQLDDEYRLYSPLVKPDQNIQFWLEQFPQAWAETAGMGLAKQVPPQVIQLKASATPVSVRQYPLSKEAQEGIRPHVQRLIQQGILVPVQSPWNTPLLPVRKPGTNDYRPVQDLREVNKRVQDIHPTVPNPYNLLCALPPQRSWYTVLDLKDAFFCLRLHPTSQPLFAFEWRDPGTGRTGQLTWTRLPQGFKNSPTIFDEALHRDLANFRIQHPQVTLLQYVDDLLLAGATKQDCLEGTKALLLELSDLGYRASAKKAQICRREVTYLGYSLRDGQRWLTEARKKTVVQIPAPTTAKQVREFLGTAGFCRLWIPGFATLAAPLYPLTKEKGEFSWAPEHQKAFDAIKKALLSAPALALPDVTKPFTLYVDERKGVARGVLTQTLGPWRRPVAYLSKKLDPVASGWPVCLKAIAAVAILVKDADKLTLGQNITVIAPHALENIVRQPPDRWMTNARMTHYQSLLLTERVTFAPPAALNPATLLPEETDEPVTHDCHQLLIEETGVRKDLTDIPLTGEVLTWFTDGSSYVVEGKRMAGAAVVDGTRTIWASSLPEGTSAQKAELMALTQALRLAEGKSINIYTDSRYAFATAHVHGAIYKQRGLLTSAGREIKNKEEILSLLEALHLPKRLAIIHCPGHQKAKDPISRGNQMADRVAKQAAQGVNLLAGKRTADGSEFEKRTADGSEFESPKKKAKVE

SEQ ID NO: 6853 - protein, 2085 aa, synthetic construct
MPAAKRVKLDGGDKKYSIGLDIGTNSVGWAVITDEYKVPSKKFKVLGNTDRHSIKKNLIGALLFDSGETAEATRLKRTARRRYTRRKNRICYLQEIFSNEMAKVDDSFFHRLEESFLVEEDKKHERHPIFGNIVDEVAYHEKYPTIYHLRKKLVDSTDKADLRLIYLALAHMIKFRGHFLIEGDLNPDNSDVDKLFIQLVQTYNQLFEENPINASGVDAKAILSARLSKSRRLENLIAQLPGEKKNGLFGNLIALSLGLTPNFKSNFDLAEDAKLQLSKDTYDDDLDNLLAQIGDQYADLFLAAKNLSDAILLSDILRVNTEITKAPLSASMIKRYDEHHQDLTLLKALVRQQLPEKYKEIFFDQSKNGYAGYIDGGASQEEFYKFIKPILEKMDGTEELLVKLNREDLLRKQRTFDNGSIPHQIHLGELHAILRRQEDFYPFLKDNREKIEKILTFRIPYYVGPLARGNSRFAWMTRKSEETITPWNFEEVVDKGASAQSFIERMTNFDKNLPNEKVLPKHSLLYEYFTVYNELTKVKYVTEGMRKPAFLSGEQKKAIVDLLFKTNRKVTVKQLKEDYFKKIECFDSVEISGVEDRFNASLGTYHDLLKIIKDKDFLDNEENEDILEDIVLTLTLFEDREMIEERLKTYAHLFDDKVMKQLKRRRYTGWGRLSRKLINGIRDKQSGKTILDFLKSDGFANRNFMQLIHDDSLTFKEDIQKAQVSGQGDSLHEHIANLAGSPAIKKGILQTVKVVDELVKVMGRHKPENIVIEMARENQTTQKGQKNSRERMKRIEEGIKELGSQILKEHPVENTQLQNEKLYLYYLQNGRDMYVDQELDINRLSDYDVDHIVPQSFLKDDSIDNKVLTRSDKARGKSDNVPSEEVVKKMKNYWRQLLNAKLITQRKFDNLTKAERGGLSELDKAGFIKRQLVETRQITKHVAQILDSRMNTKYDENDKLIREVKVITLKSKLVSDFRKDFQFYKVREINNYHHAHDAYLNAVVGTALIKKYPKLESEFVYGDYKVYDVRKMIAKSEQEIGKATAKYFFYSNIMNFFKTEITLANGEIRKRPLIETNGETGEIVWDKGRDFATVRKVLSMPQVNIVKKTEVQTGGFSKESILPKRNSDKLIARKKDWDPKKYGGFDSPTVAYSVLVVAKVEKGKSKKLKSVKELLGITIMERSSFEKNPIDFLEAKGYKEVKKDLIIKLPKYSLFELENGRKRMLASAGELQKGNELALPSKYVNFLYLASHYEKLKGSPEDNEQKQLFVEQHKHYLDEIIEQISEFSKRVILADANLDKVLSAYNKHRDKPIREQAENIIHLFTLTNLGAPAAFKYFDTTIDRKRYTSTKEVLDATLIHQSITGLYETRIDLSQLGGDGGGGGGSSGGSGGIPWLMKKPLQLTTLVPLQEYEERLLKQTMLTGSYKEKLQSLFLKYDALWQHWENQVGHRRIKPHHIATGTVNPRPQKQYPINPKAKASIQTVINDLLKQGVLIQQNSIMNTPVYPVPKPDGKWRMVLDYREVNKTIPLIAAQNQHSAGILSSIFRGKYKTTLDLSNGFWAHSITPESYWLTAFTWLGQQYCWTRLPQGFLNSPALFNADVVDLLKEVPNVQVYVDDIYISHDDPREHLEQLEKVFSLLLNAGYVVSLKKSEIAQHEVEFLGFNITKEGRGLTETFKQKLLNITPPRDLKQLQSILGKLNFARNFIPNFSELVKPLYNIIATAPGKYITWTTDNSQQLQNIISMLNSAENLEERNPEVRLIMKVNTSPSAGYIRFYNEFAKRPIMYLNYVYTKAEVKFTNTEKLLTTIHKGLIKALDLGMGQEILVYSPIVSMTKIQKTPLPERKALPIRWITWMSYLEDPRIQFHYDKTLPELQQVPTVTDDIIAKIKHPSEFSMVFYTDGSAIKHPNVNKSHNAGMGIAQVQFKPEFTVINTWSIPLGDHTAQLAEVAAVEFACKKALKIDGPVLIVTDSFYVAESVNKELPYWQSNGFFNNKKKPLKHVSKWKSIADCIQLKPDIIIIHEKGHQPTASTFHTEGNNLADKLATQGSYVVNAGKRTADGSEFEKRTADGSEFESPKKKAKVE

SEQ ID NO: 6854 - protein, 2174 aa, synthetic construct
MPAAKRVKLDGGDKKYSIGLDIGTNSVGWAVITDEYKVPSKKFKVLGNTDRHSIKKNLIGALLFDSGETAEATRLKRTARRRYTRRKNRICYLQEIFSNEMAKVDDSFFHRLEESFLVEEDKKHERHPIFGNIVDEVAYHEKYPTIYHLRKKLVDSTDKADLRLIYLALAHMIKFRGHFLIEGDLNPDNSDVDKLFIQLVQTYNQLFEENPINASGVDAKAILSARLSKSRRLENLIAQLPGEKKNGLFGNLIALSLGLTPNFKSNFDLAEDAKLQLSKDTYDDDLDNLLAQIGDQYADLFLAAKNLSDAILLSDILRVNTEITKAPLSASMIKRYDEHHQDLTLLKALVRQQLPEKYKEIFFDQSKNGYAGYIDGGASQEEFYKFIKPILEKMDGTEELLVKLNREDLLRKQRTFDNGSIPHQIHLGELHAILRRQEDFYPFLKDNREKIEKILTFRIPYYVGPLARGNSRFAWMTRKSEETITPWNFEEVVDKGASAQSFIERMTNFDKNLPNEKVLPKHSLLYEYFTVYNELTKVKYVTEGMRKPAFLSGEQKKAIVDLLFKTNRKVTVKQLKEDYFKKIECFDSVEISGVEDRFNASLGTYHDLLKIIKDKDFLDNEENEDILEDIVLTLTLFEDREMIEERLKTYAHLFDDKVMKQLKRRRYTGWGRLSRKLINGIRDKQSGKTILDFLKSDGFANRNFMQLIHDDSLTFKEDIQKAQVSGQGDSLHEHIANLAGSPAIKKGILQTVKVVDELVKVMGRHKPENIVIEMARENQTTQKGQKNSRERMKRIEEGIKELGSQILKEHPVENTQLQNEKLYLYYLQNGRDMYVDQELDINRLSDYDVDHIVPQSFLKDDSIDNKVLTRSDKARGKSDNVPSEEVVKKMKNYWRQLLNAKLITQRKFDNLTKAERGGLSELDKAGFIKRQLVETRQITKHVAQILDSRMNTKYDENDKLIREVKVITLKSKLVSDFRKDFQFYKVREINNYHHAHDAYLNAVVGTALIKKYPKLESEFVYGDYKVYDVRKMIAKSEQEIGKATAKYFFYSNIMNFFKTEITLANGEIRKRPLIETNGETGEIVWDKGRDFATVRKVLSMPQVNIVKKTEVQTGGFSKESILPKRNSDKLIARKKDWDPKKYGGFDSPTVAYSVLVVAKVEKGKSKKLKSVKELLGITIMERSSFEKNPIDFLEAKGYKEVKKDLIIKLPKYSLFELENGRKRMLASAGELQKGNELALPSKYVNFLYLASHYEKLKGSPEDNEQKQLFVEQHKHYLDEIIEQISEFSKRVILADANLDKVLSAYNKHRDKPIREQAENIIHLFTLTNLGAPAAFKYFDTTIDRKRYTSTKEVLDATLIHQSITGLYETRIDLSQLGGDGGGGGGSSGGSGGMDPLQLLQPLEAEIKGTKLKAHWNSGATITCVPQAFLEEEVPIKNIWIKTIHGEKEQPVYYLTFKIQGRKVEAEVISSPYDYILVSPSDIPWLMKKPLQLTTLVPLQEYEERLLKQTMLTGSYKEKLQSLFLKYDALWQHWENQVGHRRIKPHHIATGTVNPRPQKQYPINPKAKASIQTVINDLLKQGVLIQQNSIMNTPVYPVPKPDGKWRMVLDYREVNKTIPLIAAQNQHSAGILSSIFRGKYKTTLDLSNGFWAHSITPESYWLTAFTWLGQQYCWTRLPQGFLNSPALFNADVVDLLKEVPNVQVYVDDIYISHDDPREHLEQLEKVFSLLLNAGYVVSLKKSEIAQHEVEFLGFNITKEGRGLTETFKQKLLNITPPRDLKQLQSILGLLNFARNFIPNFSELVKPLYNIIATAPGKYITWTTDNSQQLQNIISMLNSAENLEERNPEVRLIMKVNTSPSAGYIRFYNEFAKRPIMYLNYVYTKAEVKFTNTEKLLTTIHKGLIKALDLGMGQEILVYSPIVSMTKIQKTPLPERKALPIRWITWMSYLEDPRIQFHYDKTLPELQQVPTVTDDIIAKIKHPSEFSMVFYTDGSAIKHPNVNKSHNAGMGIAQVQFKPEFTVINTWSIPLGDHTAQLAEVAAVEFACKKALKIDGPVLIVTDSFYVAESVNKELPYWQSNGFFNNKKKPLKHVSKWKSIADCIQLKPDIIIIHEKGHQPTASTFHTEGNNLADKLATQGSYVVNAGKRTADGSEFEKRTADGSEFESPKKKAKVE

SEQ ID NO: 6855 - protein, 2094 aa, synthetic construct
MPAAKRVKLDGGDKKYSIGLDIGTNSVGWAVITDEYKVPSKKFKVLGNTDRHSIKKNLIGALLFDSGETAEATRLKRTARRRYTRRKNRICYLQEIFSNEMAKVDDSFFHRLEESFLVEEDKKHERHPIFGNIVDEVAYHEKYPTIYHLRKKLVDSTDKADLRLIYLALAHMIKFRGHFLIEGDLNPDNSDVDKLFIQLVQTYNQLFEENPINASGVDAKAILSARLSKSRRLENLIAQLPGEKKNGLFGNLIALSLGLTPNFKSNFDLAEDAKLQLSKDTYDDDLDNLLAQIGDQYADLFLAAKNLSDAILLSDILRVNTEITKAPLSASMIKRYDEHHQDLTLLKALVRQQLPEKYKEIFFDQSKNGYAGYIDGGASQEEFYKFIKPILEKMDGTEELLVKLNREDLLRKQRTFDNGSIPHQIHLGELHAILRRQEDFYPFLKDNREKIEKILTFRIPYYVGPLARGNSRFAWMTRKSEETITPWNFEEVVDKGASAQSFIERMTNFDKNLPNEKVLPKHSLLYEYFTVYNELTKVKYVTEGMRKPAFLSGEQKKAIVDLLFKTNRKVTVKQLKEDYFKKIECFDSVEISGVEDRFNASLGTYHDLLKIIKDKDFLDNEENEDILEDIVLTLTLFEDREMIEERLKTYAHLFDDKVMKQLKRRRYTGWGRLSRKLINGIRDKQSGKTILDFLKSDGFANRNFMQLIHDDSLTFKEDIQKAQVSGQGDSLHEHIANLAGSPAIKKGILQTVKVVDELVKVMGRHKPENIVIEMARENQTTQKGQKNSRERMKRIEEGIKELGSQILKEHPVENTQLQNEKLYLYYLQNGRDMYVDQELDINRLSDYDVDHIVPQSFLKDDSIDNKVLTRSDKARGKSDNVPSEEVVKKMKNYWRQLLNAKLITQRKFDNLTKAERGGLSELDKAGFIKRQLVETRQITKHVAQILDSRMNTKYDENDKLIREVKVITLKSKLVSDFRKDFQFYKVREINNYHHAHDAYLNAVVGTALIKKYPKLESEFVYGDYKVYDVRKMIAKSEQEIGKATAKYFFYSNIMNFFKTEITLANGEIRKRPLIETNGETGEIVWDKGRDFATVRKVLSMPQVNIVKKTEVQTGGFSKESILPKRNSDKLIARKKDWDPKKYGGFDSPTVAYSVLVVAKVEKGKSKKLKSVKELLGITIMERSSFEKNPIDFLEAKGYKEVKKDLIIKLPKYSLFELENGRKRMLASAGELQKGNELALPSKYVNFLYLASHYEKLKGSPEDNEQKQLFVEQHKHYLDEIIEQISEFSKRVILADANLDKVLSAYNKHRDKPIREQAENIIHLFTLTNLGAPAAFKYFDTTIDRKRYTSTKEVLDATLIHQSITGLYETRIDLSQLGGDGGGGGGSSGGSGGTLNIEDEYRLHETSKEPDVPLGSTWLSDFPQAWAETGGMGLAVRQAPLIIPLKATSTPVSIKQYPMSQEARLGIKPHIQRLLDQGILVPCQSPWNTPLLPVKKPGTNDYRPVQDLREVNKRVEDIHPTVPNPYNLLSGLPPSHQWYTVLDLKDAFFCLRLHPTSQPLFAFEWRDPEMGISGQLTWTRLPQGFKNSPTLFNEALHRDLADFRIQHPDLILLQYVDDLLLAATSEQDCQRGTRALLQTLGNLGYRASAKKAQICQKQVKYLGYLLKEGQRWLTEARKETVMGQPTPKTPRQLREFLGTAGFCRLWIPGFAEMAAPLYPLTKPGTLFNWGPDQQKAYQEIKQALLTAPALGLPDLTKPFELFVDEKQGYAKGVLTQKLGPWRRPVAYLSKKLDPVAAGWPPCLRMVAAIAVLTKDAGKLTMGQPLVILAPHAVEALVKQPPDRWLSNARMTHYQAMLLDTDRVQFGPVVALNPATLLPLPEKEAPHDCLEILAETHGTRPDLTDQPIPDADYTWYTDGSSFLQEGQRRAGAAVTTETEVIWARALPAGTSAQRAELIALTQALKMAEGKKLNVYTDSRYAFATAHVHGEIYRRRGWLTSEGREIKNKNEILALLKALFLPKRLSIIHCPGHQKGNSAEARGNRMADQAAREAAMKAVLETSTLLAGKRTADGSEFEKRTADGSEFESPKKKAKVE

SEQ ID NO: 6856 - protein, 2171 aa, synthetic construct
MPAAKRVKLDGGDKKYSIGLDIGTNSVGWAVITDEYKVPSKKFKVLGNTDRHSIKKNLIGALLFDSGETAEATRLKRTARRRYTRRKNRICYLQEIFSNEMAKVDDSFFHRLEESFLVEEDKKHERHPIFGNIVDEVAYHEKYPTIYHLRKKLVDSTDKADLRLIYLALAHMIKFRGHFLIEGDLNPDNSDVDKLFIQLVQTYNQLFEENPINASGVDAKAILSARLSKSRRLENLIAQLPGEKKNGLFGNLIALSLGLTPNFKSNFDLAEDAKLQLSKDTYDDDLDNLLAQIGDQYADLFLAAKNLSDAILLSDILRVNTEITKAPLSASMIKRYDEHHQDLTLLKALVRQQLPEKYKEIFFDQSKNGYAGYIDGGASQEEFYKFIKPILEKMDGTEELLVKLNREDLLRKQRTFDNGSIPHQIHLGELHAILRRQEDFYPFLKDNREKIEKILTFRIPYYVGPLARGNSRFAWMTRKSEETITPWNFEEVVDKGASAQSFIERMTNFDKNLPNEKVLPKHSLLYEYFTVYNELTKVKYVTEGMRKPAFLSGEQKKAIVDLLFKTNRKVTVKQLKEDYFKKIECFDSVEISGVEDRFNASLGTYHDLLKIIKDKDFLDNEENEDILEDIVLTLTLFEDREMIEERLKTYAHLFDDKVMKQLKRRRYTGWGRLSRKLINGIRDKQSGKTILDFLKSDGFANRNFMQLIHDDSLTFKEDIQKAQVSGQGDSLHEHIANLAGSPAIKKGILQTVKVVDELVKVMGRHKPENIVIEMARENQTTQKGQKNSRERMKRIEEGIKELGSQILKEHPVENTQLQNEKLYLYYLQNGRDMYVDQELDINRLSDYDVDHIVPQSFLKDDSIDNKVLTRSDKARGKSDNVPSEEVVKKMKNYWRQLLNAKLITQRKFDNLTKAERGGLSELDKAGFIKRQLVETRQITKHVAQILDSRMNTKYDENDKLIREVKVITLKSKLVSDFRKDFQFYKVREINNYHHAHDAYLNAVVGTALIKKYPKLESEFVYGDYKVYDVRKMIAKSEQEIGKATAKYFFYSNIMNFFKTEITLANGEIRKRPLIETNGETGEIVWDKGRDFATVRKVLSMPQVNIVKKTEVQTGGFSKESILPKRNSDKLIARKKDWDPKKYGGFDSPTVAYSVLVVAKVEKGKSKKLKSVKELLGITIMERSSFEKNPIDFLEAKGYKEVKKDLIIKLPKYSLFELENGRKRMLASAGELQKGNELALPSKYVNFLYLASHYEKLKGSPEDNEQKQLFVEQHKHYLDEIIEQISEFSKRVILADANLDKVLSAYNKHRDKPIREQAENIIHLFTLTNLGAPAAFKYFDTTIDRKRYTSTKEVLDATLIHQSITGLYETRIDLSQLGGDGGGSSGGSGGGGGMDLLKPLTVERKGVKIKGYWNSQADITCVPKDLLQGEEPVRQQNVTTIHGTQEGDVYYVNLKIDGRRINTEVIGTTLDYAIITPGDVPWILKKPLELTIKLDLEEQQGTLLNNSILSKKGKEELKQLFEKYSALWQSWENQVGHRRIRPHKIATGTVKPTPQKQYHINPKAKPDIQIVINDLLKQGVLIQKESTMNTPVYPVPKPNGRWRMVLDYRAVNKVTPLIAVQNQHSYGILGSLFKGRYKTTIDLSNGFWAHPIVPEDYWITAFTWQGKQYCWTVLPQGFLNSPGLFTGDVVDLLQGIPNVEVYVDDVYISHDSEKEHLEYLDILFNRLKEAGYIISLKKSNIANSIVDFLGFQITNEGRGLTDTFKEKLENITAPTTLKQLQSILGLLNFARNFIPDFTELIAPLYALIPKSTKNYVPWQIEHSTTLETLITKLNGAEYLQGRKGDKTLIMKVNASYTTGYIRYYNEGEKKPISYVSIVFSKTELKFTELEKLLTTVHKGLLKALDLSMGQNIHVYSPIVSMQNIQKTPQTAKKALASRWLSWLSYLEDPRIRFFYDPQMPALKDLPAVDTGKDNKKHPSNFQHIFYTDGSAITSPTKEGHLNAGMGIVYFINKDGNLQKQQEWSISLGNHTAQFAEIAAFEFALKKCLPLGGNILVVTDSNYVAKAYNEELDVWASNGFVNNRKKPLKHISKWKSVADLKRLRPDVVVTHEPGHQKLDSSPHAYGNNLADQLATQASFKVHAGKRTADGSEFEKRTADGSEFESPKKKAKVE

SEQ ID NO: 6857 - protein, 2093 aa, synthetic construct
MPAAKRVKLDGGDKKYSIGLDIGTNSVGWAVITDEYKVPSKKFKVLGNTDRHSIKKNLIGALLFDSGETAEATRLKRTARRRYTRRKNRICYLQEIFSNEMAKVDDSFFHRLEESFLVEEDKKHERHPIFGNIVDEVAYHEKYPTIYHLRKKLVDSTDKADLRLIYLALAHMIKFRGHFLIEGDLNPDNSDVDKLFIQLVQTYNQLFEENPINASGVDAKAILSARLSKSRRLENLIAQLPGEKKNGLFGNLIALSLGLTPNFKSNFDLAEDAKLQLSKDTYDDDLDNLLAQIGDQYADLFLAAKNLSDAILLSDILRVNTEITKAPLSASMIKRYDEHHQDLTLLKALVRQQLPEKYKEIFFDQSKNGYAGYIDGGASQEEFYKFIKPILEKMDGTEELLVKLNREDLLRKQRTFDNGSIPHQIHLGELHAILRRQEDFYPFLKDNREKIEKILTFRIPYYVGPLARGNSRFAWMTRKSEETITPWNFEEVVDKGASAQSFIERMTNFDKNLPNEKVLPKHSLLYEYFTVYNELTKVKYVTEGMRKPAFLSGEQKKAIVDLLFKTNRKVTVKQLKEDYFKKIECFDSVEISGVEDRFNASLGTYHDLLKIIKDKDFLDNEENEDILEDIVLTLTLFEDREMIEERLKTYAHLFDDKVMKQLKRRRYTGWGRLSRKLINGIRDKQSGKTILDFLKSDGFANRNFMQLIHDDSLTFKEDIQKAQVSGQGDSLHEHIANLAGSPAIKKGILQTVKVVDELVKVMGRHKPENIVIEMARENQTTQKGQKNSRERMKRIEEGIKELGSQILKEHPVENTQLQNEKLYLYYLQNGRDMYVDQELDINRLSDYDVDHIVPQSFLKDDSIDNKVLTRSDKARGKSDNVPSEEVVKKMKNYWRQLLNAKLITQRKFDNLTKAERGGLSELDKAGFIKRQLVETRQITKHVAQILDSRMNTKYDENDKLIREVKVITLKSKLVSDFRKDFQFYKVREINNYHHAHDAYLNAVVGTALIKKYPKLESEFVYGDYKVYDVRKMIAKSEQEIGKATAKYFFYSNIMNFFKTEITLANGEIRKRPLIETNGETGEIVWDKGRDFATVRKVLSMPQVNIVKKTEVQTGGFSKESILPKRNSDKLIARKKDWDPKKYGGFDSPTVAYSVLVVAKVEKGKSKKLKSVKELLGITIMERSSFEKNPIDFLEAKGYKEVKKDLIIKLPKYSLFELENGRKRMLASAGELQKGNELALPSKYVNFLYLASHYEKLKGSPEDNEQKQLFVEQHKHYLDEIIEQISEFSKRVILADANLDKVLSAYNKHRDKPIREQAENIIHLFTLTNLGAPAAFKYFDTTIDRKRYTSTKEVLDATLIHQSITGLYETRIDLSQLGGDGGGSSGGSGGGGGTLQLEEEYRLFEPESTQKQEMDIWLKNFPQAWAETGGMGTAHCQAPVLIQLKATATPISIRQYPMPHEAYQGIKPHIRRMLDQGILKPCQSPWNTPLLPVKKPGTEDYRPVQDLREVNKRVEDIHPTVPNPYNLLSTLPPSHPWYTVLDLKDAFFCLRLHSESQLLFAFEWRDPEIGLSGQLTWTRLPQGFKNSPTLFNEALHSDLADFRVRYPALVLLQYVDDLLLAAATRTECLEGTKALLETLGNKGYRASAKKAQICLQEVTYLGYSLKDGQRWLTKARKEAILSIPVPKNSRQVREFLGKAGYCRLFIPGFAELAAPLYPLTRPGTLFQWGTEQQLAFEDIKKALLSSPALGLPDITKPFELFIDENSGFAKGVLVQKLGPWKRPVAYLSKKLDTVASGWPPCLRMVAAIAILVKDAGKLTLGQPLTILTSHPVEALVRQPPNKWLSNARMTHYQAMLLDAERVHFGPTVSLNPATLLPLPSGGNHHDCLQILAETHGTRPDLTDQPLPDADLTWYTDGSSFIRNGEREAGAAVTTESEVIWAAPLPPGTSAQRAELIALTQALKMAEGKKLTVYTDSRYAFATTHVHGEIYRRRGWLTSEGKEIKNKNEILALLEALFLPKRLSIIHCPGHQKGDSPQAKGNRLADDTAKKAATETHSSLTVLPAGKRTADGSEFEKRTADGSEFESPKKKAKVE

SEQ ID NO: 6858 - protein, 2216 aa, synthetic construct
MPAAKRVKLDGGDKKYSIGLDIGTNSVGWAVITDEYKVPSKKFKVLGNTDRHSIKKNLIGALLFDSGETAEATRLKRTARRRYTRRKNRICYLQEIFSNEMAKVDDSFFHRLEESFLVEEDKKHERHPIFGNIVDEVAYHEKYPTIYHLRKKLVDSTDKADLRLIYLALAHMIKFRGHFLIEGDLNPDNSDVDKLFIQLVQTYNQLFEENPINASGVDAKAILSARLSKSRRLENLIAQLPGEKKNGLFGNLIALSLGLTPNFKSNFDLAEDAKLQLSKDTYDDDLDNLLAQIGDQYADLFLAAKNLSDAILLSDILRVNTEITKAPLSASMIKRYDEHHQDLTLLKALVRQQLPEKYKEIFFDQSKNGYAGYIDGGASQEEFYKFIKPILEKMDGTEELLVKLNREDLLRKQRTFDNGSIPHQIHLGELHAILRRQEDFYPFLKDNREKIEKILTFRIPYYVGPLARGNSRFAWMTRKSEETITPWNFEEVVDKGASAQSFIERMTNFDKNLPNEKVLPKHSLLYEYFTVYNELTKVKYVTEGMRKPAFLSGEQKKAIVDLLFKTNRKVTVKQLKEDYFKKIECFDSVEISGVEDRFNASLGTYHDLLKIIKDKDFLDNEENEDILEDIVLTLTLFEDREMIEERLKTYAHLFDDKVMKQLKRRRYTGWGRLSRKLINGIRDKQSGKTILDFLKSDGFANRNFMQLIHDDSLTFKEDIQKAQVSGQGDSLHEHIANLAGSPAIKKGILQTVKVVDELVKVMGRHKPENIVIEMARENQTTQKGQKNSRERMKRIEEGIKELGSQILKEHPVENTQLQNEKLYLYYLQNGRDMYVDQELDINRLSDYDVDHIVPQSFLKDDSIDNKVLTRSDKARGKSDNVPSEEVVKKMKNYWRQLLNAKLITQRKFDNLTKAERGGLSELDKAGFIKRQLVETRQITKHVAQILDSRMNTKYDENDKLIREVKVITLKSKLVSDFRKDFQFYKVREINNYHHAHDAYLNAVVGTALIKKYPKLESEFVYGDYKVYDVRKMIAKSEQEIGKATAKYFFYSNIMNFFKTEITLANGEIRKRPLIETNGETGEIVWDKGRDFATVRKVLSMPQVNIVKKTEVQTGGFSKESILPKRNSDKLIARKKDWDPKKYGGFDSPTVAYSVLVVAKVEKGKSKKLKSVKELLGITIMERSSFEKNPIDFLEAKGYKEVKKDLIIKLPKYSLFELENGRKRMLASAGELQKGNELALPSKYVNFLYLASHYEKLKGSPEDNEQKQLFVEQHKHYLDEIIEQISEFSKRVILADANLDKVLSAYNKHRDKPIREQAENIIHLFTLTNLGAPAAFKYFDTTIDRKRYTSTKEVLDATLIHQSITGLYETRIDLSQLGGDGGGSSGGSGGGGGTLGDQGSRGSDPLPEPRVTLTVEGIPTEFLVNTGAEHSVLTKPMGKMGSKRTVVAGATGSKVYPWTTKRLLKIGQKQVTHSFLVIPECPAPLLGRDLLTKLKAQIQFSTEGPQVTWEDRPAMCLVLNLEEEYRLHEKPVPPSIDPSWLQLFPMVWAEKAGMGLANQVPPVVVELKSDASPVAVRQYPMSKEAREGIRPHIQRFLDLGILVPCQSPWNTPLLPVKKPGTNDYRPVQDLREVNKRVQDIHPTVPNPYNLLSSLPPSHTWYSVLDLKDAFFCLKLHPNSQPLFAFEWRDPEKGNTGQLTWTRLPQGFKNSPTLFDEALHRDLASFRALNPQVVMLQYVDDLLVAAPTYRDCKEGTRRLLQELSKLGYRVSAKKAQLCREEVTYLGYLLKGGKRWLTPARKATVMKIPTPTTPRQVREFLGTAGFCRLWIPGFASLAAPLYPLTREKVPFTWTEAHQEAFGRIKEALLSAPALALPDLTKPFALYVDEKEGVARGVLTQTLGPWRRPVAYLSKKLDPVASGWPTCLKAIAAVALLLKDADKLTLGQNVLVIAPHNLESIVRQPPDRWMTNARMTHYQSLLLNERVSFAPPAILNPATLLPVESDDTPIHICSEILAEETGTRPDLRDQPLPGVPAWYTDGSSFIMDGRRQAGAAIVDNKRTVWASNLPEGTSAQKAELIALTQALRLAEGKSINIYTDSRYAFATAHVHGAIYKQRGLLTSAGKDIKNKEEILALLEAIHLPKRVAIIHCPGHQRGTDPVATGNRKADEAAKQAAQSTRILTETTKNAGKRTADGSEFEKRTADGSEFESPKKKAKVE

SEQ ID NO: 6859 - protein, 2125 aa, synthetic construct
MPAAKRVKLDGGDKKYSIGLDIGTNSVGWAVITDEYKVPSKKFKVLGNTDRHSIKKNLIGALLFDSGETAEATRLKRTARRRYTRRKNRICYLQEIFSNEMAKVDDSFFHRLEESFLVEEDKKHERHPIFGNIVDEVAYHEKYPTIYHLRKKLVDSTDKADLRLIYLALAHMIKFRGHFLIEGDLNPDNSDVDKLFIQLVQTYNQLFEENPINASGVDAKAILSARLSKSRRLENLIAQLPGEKKNGLFGNLIALSLGLTPNFKSNFDLAEDAKLQLSKDTYDDDLDNLLAQIGDQYADLFLAAKNLSDAILLSDILRVNTEITKAPLSASMIKRYDEHHQDLTLLKALVRQQLPEKYKEIFFDQSKNGYAGYIDGGASQEEFYKFIKPILEKMDGTEELLVKLNREDLLRKQRTFDNGSIPHQIHLGELHAILRRQEDFYPFLKDNREKIEKILTFRIPYYVGPLARGNSRFAWMTRKSEETITPWNFEEVVDKGASAQSFIERMTNFDKNLPNEKVLPKHSLLYEYFTVYNELTKVKYVTEGMRKPAFLSGEQKKAIVDLLFKTNRKVTVKQLKEDYFKKIECFDSVEISGVEDRFNASLGTYHDLLKIIKDKDFLDNEENEDILEDIVLTLTLFEDREMIEERLKTYAHLFDDKVMKQLKRRRYTGWGRLSRKLINGIRDKQSGKTILDFLKSDGFANRNFMQLIHDDSLTFKEDIQKAQVSGQGDSLHEHIANLAGSPAIKKGILQTVKVVDELVKVMGRHKPENIVIEMARENQTTQKGQKNSRERMKRIEEGIKELGSQILKEHPVENTQLQNEKLYLYYLQNGRDMYVDQELDINRLSDYDVDHIVPQSFLKDDSIDNKVLTRSDKARGKSDNVPSEEVVKKMKNYWRQLLNAKLITQRKFDNLTKAERGGLSELDKAGFIKRQLVETRQITKHVAQILDSRMNTKYDENDKLIREVKVITLKSKLVSDFRKDFQFYKVREINNYHHAHDAYLNAVVGTALIKKYPKLESEFVYGDYKVYDVRKMIAKSEQEIGKATAKYFFYSNIMNFFKTEITLANGEIRKRPLIETNGETGEIVWDKGRDFATVRKVLSMPQVNIVKKTEVQTGGFSKESILPKRNSDKLIARKKDWDPKKYGGFDSPTVAYSVLVVAKVEKGKSKKLKSVKELLGITIMERSSFEKNPIDFLEAKGYKEVKKDLIIKLPKYSLFELENGRKRMLASAGELQKGNELALPSKYVNFLYLASHYEKLKGSPEDNEQKQLFVEQHKHYLDEIIEQISEFSKRVILADANLDKVLSAYNKHRDKPIREQAENIIHLFTLTNLGAPAAFKYFDTTIDRKRYTSTKEVLDATLIHQSITGLYETRIDLSQLGGDGGGSSGGSGGGGGLLGRDLLTKLKAQIQFSTEGPQVTWEDRPAMCLVLNLEEEYRLHEKPVPPSIDPSWLQLFPMVWAEKAGMGLANQVPPVVVELKSDASPVAVRQYPMSKEAREGIRPHIQRFLDLGILVPCQSPWNTPLLPVKKPGTNDYRPVQDLREVNKRVQDIHPTVPNPYNLLSSLPPSHTWYSVLDLKDAFFCLKLHPNSQPLFAFEWRDPEKGNTGQLTWTRLPQGFKNSPTLFNEALHRDLASFRALNPQVVMLQYVDDLLVAAPTYRDCKEGTRRLLQELSKLGYRVSAKKAQLCREEVTYLGYLLKGGKRWLTPARKATVMKIPTPTTPRQVREFLGTAGFCRLWIPGFASLAAPLYPLTRPKVPFTWTEAHQEAFGRIKEALLSAPALALPDLTKPFALYVDEKEGVARGVLTQTLGPWRRPVAYLSKKLDPVASGWPTCLKAIAAVALLLKDADKLTLGQNVLVIAPHNLESIVRQPPDRWMTNARMTHYQSLLLNERVSFAPPAILNPATLLPVESDDTPIHICSEILAEETGTRPDLRDQPLPGVPAWYTDGSSFIMDGRRQAGAAIVDNKRTVWASNLPEGTSAQKAELIALTQALRLAEGKSINIYTDSRYAFATAHVHGAIYKQRGWLTSAGKDIKNKEEILALLEAIHLPKRVAIIHCPGHQRGTDPVATGNRKADEAAKQAAQSTRILTETTKNAGKRTADGSEFEKRTADGSEFESPKKKAKVE

SEQ ID NO: 6860 - protein, 2125 aa, synthetic construct
MPAAKRVKLDGGDKKYSIGLDIGTNSVGWAVITDEYKVPSKKFKVLGNTDRHSIKKNLIGALLFDSGETAEATRLKRTARRRYTRRKNRICYLQEIFSNEMAKVDDSFFHRLEESFLVEEDKKHERHPIFGNIVDEVAYHEKYPTIYHLRKKLVDSTDKADLRLIYLALAHMIKFRGHFLIEGDLNPDNSDVDKLFIQLVQTYNQLFEENPINASGVDAKAILSARLSKSRRLENLIAQLPGEKKNGLFGNLIALSLGLTPNFKSNFDLAEDAKLQLSKDTYDDDLDNLLAQIGDQYADLFLAAKNLSDAILLSDILRVNTEITKAPLSASMIKRYDEHHQDLTLLKALVRQQLPEKYKEIFFDQSKNGYAGYIDGGASQEEFYKFIKPILEKMDGTEELLVKLNREDLLRKQRTFDNGSIPHQIHLGELHAILRRQEDFYPFLKDNREKIEKILTFRIPYYVGPLARGNSRFAWMTRKSEETITPWNFEEVVDKGASAQSFIERMTNFDKNLPNEKVLPKHSLLYEYFTVYNELTKVKYVTEGMRKPAFLSGEQKKAIVDLLFKTNRKVTVKQLKEDYFKKIECFDSVEISGVEDRFNASLGTYHDLLKIIKDKDFLDNEENEDILEDIVLTLTLFEDREMIEERLKTYAHLFDDKVMKQLKRRRYTGWGRLSRKLINGIRDKQSGKTILDFLKSDGFANRNFMQLIHDDSLTFKEDIQKAQVSGQGDSLHEHIANLAGSPAIKKGILQTVKVVDELVKVMGRHKPENIVIEMARENQTTQKGQKNSRERMKRIEEGIKELGSQILKEHPVENTQLQNEKLYLYYLQNGRDMYVDQELDINRLSDYDVDHIVPQSFLKDDSIDNKVLTRSDKARGKSDNVPSEEVVKKMKNYWRQLLNAKLITQRKFDNLTKAERGGLSELDKAGFIKRQLVETRQITKHVAQILDSRMNTKYDENDKLIREVKVITLKSKLVSDFRKDFQFYKVREINNYHHAHDAYLNAVVGTALIKKYPKLESEFVYGDYKVYDVRKMIAKSEQEIGKATAKYFFYSNIMNFFKTEITLANGEIRKRPLIETNGETGEIVWDKGRDFATVRKVLSMPQVNIVKKTEVQTGGFSKESILPKRNSDKLIARKKDWDPKKYGGFDSPTVAYSVLVVAKVEKGKSKKLKSVKELLGITIMERSSFEKNPIDFLEAKGYKEVKKDLIIKLPKYSLFELENGRKRMLASAGELQKGNELALPSKYVNFLYLASHYEKLKGSPEDNEQKQLFVEQHKHYLDEIIEQISEFSKRVILADANLDKVLSAYNKHRDKPIREQAENIIHLFTLTNLGAPAAFKYFDTTIDRKRYTSTKEVLDATLIHQSITGLYETRIDLSQLGGDGGGSSGGSGGGGGLLGRDLLTKLKAQIQFSTEGPQVTWEDRPAMCLVLNLEEEYRLHEKPVPPSIDPSWLQLFPMVWAEKAGMGLANQVPPVVVELKSDASPVAVRQYPMSKEAREGIRPHIQRFLDLGILVPCQSPWNTPLLPVKKPGTNDYRPVQDLREVNKRVQDIHPTVPNPYNLLSSLPPSHTWYSVLDLKDAFFCLKLHPNSQPLFAFEWRDPEKGNTGQLTWTRLPQGFKNSPTLFNEALHRDLASFRALNPQVVMLQYVDDLLVAAPTYRDCKEGTRRLLQELSKLGYRVSAKKAQLCREEVTYLGYLLKGGKRWLTPARKATVMKIPTPTTPRQVREFLGKAGFCRLFIPGFASLAAPLYPLTRPKVPFTWTEAHQEAFGRIKEALLSAPALALPDLTKPFALYVDEKEGVARGVLTQTLGPWRRPVAYLSKKLDPVASGWPTCLKAIAAVALLLKDADKLTLGQNVLVIAPHNLESIVRQPPDRWMTNARMTHYQSLLLNERVSFAPPAILNPATLLPVESDDTPIHICSEILAEETGTRPDLRDQPLPGVPAWYTDGSSFIMDGRRQAGAAIVDNKRTVWASNLPEGTSAQKAELIALTQALRLAEGKSINIYTDSRYAFATAHVHGAIYKQRGWLTSAGKDIKNKEEILALLEAIHLPKRVAIIHCPGHQRGTDPVATGNRKADEAAKQAAQSTRILTETTKNAGKRTADGSEFEKRTADGSEFESPKKKAKVE

SEQ ID NO: 6861 - protein, 2216 aa, synthetic construct
MPAAKRVKLDGGDKKYSIGLDIGTNSVGWAVITDEYKVPSKKFKVLGNTDRHSIKKNLIGALLFDSGETAEATRLKRTARRRYTRRKNRICYLQEIFSNEMAKVDDSFFHRLEESFLVEEDKKHERHPIFGNIVDEVAYHEKYPTIYHLRKKLVDSTDKADLRLIYLALAHMIKFRGHFLIEGDLNPDNSDVDKLFIQLVQTYNQLFEENPINASGVDAKAILSARLSKSRRLENLIAQLPGEKKNGLFGNLIALSLGLTPNFKSNFDLAEDAKLQLSKDTYDDDLDNLLAQIGDQYADLFLAAKNLSDAILLSDILRVNTEITKAPLSASMIKRYDEHHQDLTLLKALVRQQLPEKYKEIFFDQSKNGYAGYIDGGASQEEFYKFIKPILEKMDGTEELLVKLNREDLLRKQRTFDNGSIPHQIHLGELHAILRRQEDFYPFLKDNREKIEKILTFRIPYYVGPLARGNSRFAWMTRKSEETITPWNFEEVVDKGASAQSFIERMTNFDKNLPNEKVLPKHSLLYEYFTVYNELTKVKYVTEGMRKPAFLSGEQKKAIVDLLFKTNRKVTVKQLKEDYFKKIECFDSVEISGVEDRFNASLGTYHDLLKIIKDKDFLDNEENEDILEDIVLTLTLFEDREMIEERLKTYAHLFDDKVMKQLKRRRYTGWGRLSRKLINGIRDKQSGKTILDFLKSDGFANRNFMQLIHDDSLTFKEDIQKAQVSGQGDSLHEHIANLAGSPAIKKGILQTVKVVDELVKVMGRHKPENIVIEMARENQTTQKGQKNSRERMKRIEEGIKELGSQILKEHPVENTQLQNEKLYLYYLQNGRDMYVDQELDINRLSDYDVDHIVPQSFLKDDSIDNKVLTRSDKARGKSDNVPSEEVVKKMKNYWRQLLNAKLITQRKFDNLTKAERGGLSELDKAGFIKRQLVETRQITKHVAQILDSRMNTKYDENDKLIREVKVITLKSKLVSDFRKDFQFYKVREINNYHHAHDAYLNAVVGTALIKKYPKLESEFVYGDYKVYDVRKMIAKSEQEIGKATAKYFFYSNIMNFFKTEITLANGEIRKRPLIETNGETGEIVWDKGRDFATVRKVLSMPQVNIVKKTEVQTGGFSKESILPKRNSDKLIARKKDWDPKKYGGFDSPTVAYSVLVVAKVEKGKSKKLKSVKELLGITIMERSSFEKNPIDFLEAKGYKEVKKDLIIKLPKYSLFELENGRKRMLASAGELQKGNELALPSKYVNFLYLASHYEKLKGSPEDNEQKQLFVEQHKHYLDEIIEQISEFSKRVILADANLDKVLSAYNKHRDKPIREQAENIIHLFTLTNLGAPAAFKYFDTTIDRKRYTSTKEVLDATLIHQSITGLYETRIDLSQLGGDGGGSSGGSGGGGGTLGDQGSRGSDPLPEPRVTLTVEGIPTEFLVNTGAEHSVLTKPMGKMGSKRTVVAGATGSKVYPWTTKRLLKIGQKQVTHSFLVIPECPAPLLGRDLLTKLKAQIQFSTEGPQVTWEDRPAMCLVLNLEEEYRLHEKPVPPSIDPSWLQLFPMVWAEKAGMGLANQVPPVVVELKSDASPVAVRQYPMSKEAREGIRPHIQRFLDLGILVPCQSPWNTPLLPVKKPGTNDYRPVQDLREVNKRVQDIHPTVPNPYNLLSSLPPSHTWYSVLDLKDAFFCLKLHPNSQPLFAFEWRDPEKGNTGQLTWTRLPQGFKNSPTLFNEALHRDLASFRALNPQVVMLQYVDDLLVAAPTYRDCKEGTRRLLQELSKLGYRVSAKKAQLCREEVTYLGYLLKGGKRWLTPARKATVMKIPTPTTPRQVREFLGTAGFCRLWIPGFASLAAPLYPLTRPKVPFTWTEAHQEAFGRIKEALLSAPALALPDLTKPFALYVDEKEGVARGVLTQTLGPWRRPVAYLSKKLDPVASGWPTCLKAIAAVALLLKDADKLTLGQNVLVIAPHNLESIVRQPPDRWMTNARMTHYQSLLLNERVSFAPPAILNPATLLPVESDDTPIHICSEILAEETGTRPDLRDQPLPGVPAWYTDGSSFIMDGRRQAGAAIVDNKRTVWASNLPEGTSAQKAELIALTQALRLAEGKSINIYTDSRYAFATAHVHGAIYKQRGWLTSAGKDIKNKEEILALLEAIHLPKRVAIIHCPGHQRGTDPVATGNRKADEAAKQAAQSTRILTETTKNAGKRTADGSEFEKRTADGSEFESPKKKAKVE

SEQ ID NO: 6862 - protein, 2216 aa, synthetic construct
MPAAKRVKLDGGDKKYSIGLDIGTNSVGWAVITDEYKVPSKKFKVLGNTDRHSIKKNLIGALLFDSGETAEATRLKRTARRRYTRRKNRICYLQEIFSNEMAKVDDSFFHRLEESFLVEEDKKHERHPIFGNIVDEVAYHEKYPTIYHLRKKLVDSTDKADLRLIYLALAHMIKFRGHFLIEGDLNPDNSDVDKLFIQLVQTYNQLFEENPINASGVDAKAILSARLSKSRRLENLIAQLPGEKKNGLFGNLIALSLGLTPNFKSNFDLAEDAKLQLSKDTYDDDLDNLLAQIGDQYADLFLAAKNLSDAILLSDILRVNTEITKAPLSASMIKRYDEHHQDLTLLKALVRQQLPEKYKEIFFDQSKNGYAGYIDGGASQEEFYKFIKPILEKMDGTEELLVKLNREDLLRKQRTFDNGSIPHQIHLGELHAILRRQEDFYPFLKDNREKIEKILTFRIPYYVGPLARGNSRFAWMTRKSEETITPWNFEEVVDKGASAQSFIERMTNFDKNLPNEKVLPKHSLLYEYFTVYNELTKVKYVTEGMRKPAFLSGEQKKAIVDLLFKTNRKVTVKQLKEDYFKKIECFDSVEISGVEDRFNASLGTYHDLLKIIKDKDFLDNEENEDILEDIVLTLTLFEDREMIEERLKTYAHLFDDKVMKQLKRRRYTGWGRLSRKLINGIRDKQSGKTILDFLKSDGFANRNFMQLIHDDSLTFKEDIQKAQVSGQGDSLHEHIANLAGSPAIKKGILQTVKVVDELVKVMGRHKPENIVIEMARENQTTQKGQKNSRERMKRIEEGIKELGSQILKEHPVENTQLQNEKLYLYYLQNGRDMYVDQELDINRLSDYDVDHIVPQSFLKDDSIDNKVLTRSDKARGKSDNVPSEEVVKKMKNYWRQLLNAKLITQRKFDNLTKAERGGLSELDKAGFIKRQLVETRQITKHVAQILDSRMNTKYDENDKLIREVKVITLKSKLVSDFRKDFQFYKVREINNYHHAHDAYLNAVVGTALIKKYPKLESEFVYGDYKVYDVRKMIAKSEQEIGKATAKYFFYSNIMNFFKTEITLANGEIRKRPLIETNGETGEIVWDKGRDFATVRKVLSMPQVNIVKKTEVQTGGFSKESILPKRNSDKLIARKKDWDPKKYGGFDSPTVAYSVLVVAKVEKGKSKKLKSVKELLGITIMERSSFEKNPIDFLEAKGYKEVKKDLIIKLPKYSLFELENGRKRMLASAGELQKGNELALPSKYVNFLYLASHYEKLKGSPEDNEQKQLFVEQHKHYLDEIIEQISEFSKRVILADANLDKVLSAYNKHRDKPIREQAENIIHLFTLTNLGAPAAFKYFDTTIDRKRYTSTKEVLDATLIHQSITGLYETRIDLSQLGGDGGGSSGGSGGGGGTLGDQGSRGSDPLPEPRVTLTVEGIPTEFLVNTGAEHSVLTKPMGKMGSKRTVVAGATGSKVYPWTTKRLLKIGQKQVTHSFLVIPECPAPLLGRDLLTKLKAQIQFSTEGPQVTWEDRPAMCLVLNLEEEYRLHEKPVPPSIDPSWLQLFPMVWAEKAGMGLANQVPPVVVELKSDASPVAVRQYPMSKEAREGIRPHIQRFLDLGILVPCQSPWNTPLLPVKKPGTNDYRPVQDLREVNKRVQDIHPTVPNPYNLLSSLPPSHTWYSVLDLKDAFFCLKLHPNSQPLFAFEWRDPEKGNTGQLTWTRLPQGFKNSPTLFNEALHRDLASFRALNPQVVMLQYVDDLLVAAPTYRDCKEGTRRLLQELSKLGYRVSAKKAQLCREEVTYLGYLLKGGKRWLTPARKATVMKIPTPTTPRQVREFLGKAGFCRLFIPGFASLAAPLYPLTRPKVPFTWTEAHQEAFGRIKEALLSAPALALPDLTKPFALYVDEKEGVARGVLTQTLGPWRRPVAYLSKKLDPVASGWPTCLKAIAAVALLLKDADKLTLGQNVLVIAPHNLESIVRQPPDRWMTNARMTHYQSLLLNERVSFAPPAILNPATLLPVESDDTPIHICSEILAEETGTRPDLRDQPLPGVPAWYTDGSSFIMDGRRQAGAAIVDNKRTVWASNLPEGTSAQKAELIALTQALRLAEGKSINIYTDSRYAFATAHVHGAIYKQRGWLTSAGKDIKNKEEILALLEAIHLPKRVAIIHCPGHQRGTDPVATGNRKADEAAKQAAQSTRILTETTKNAGKRTADGSEFEKRTADGSEFESPKKKAKVE

SEQ ID NO: 6863 - protein, 2094 aa, synthetic construct
MPAAKRVKLDGGDKKYSIGLDIGTNSVGWAVITDEYKVPSKKFKVLGNTDRHSIKKNLIGALLFDSGETAEATRLKRTARRRYTRRKNRICYLQEIFSNEMAKVDDSFFHRLEESFLVEEDKKHERHPIFGNIVDEVAYHEKYPTIYHLRKKLVDSTDKADLRLIYLALAHMIKFRGHFLIEGDLNPDNSDVDKLFIQLVQTYNQLFEENPINASGVDAKAILSARLSKSRRLENLIAQLPGEKKNGLFGNLIALSLGLTPNFKSNFDLAEDAKLQLSKDTYDDDLDNLLAQIGDQYADLFLAAKNLSDAILLSDILRVNTEITKAPLSASMIKRYDEHHQDLTLLKALVRQQLPEKYKEIFFDQSKNGYAGYIDGGASQEEFYKFIKPILEKMDGTEELLVKLNREDLLRKQRTFDNGSIPHQIHLGELHAILRRQEDFYPFLKDNREKIEKILTFRIPYYVGPLARGNSRFAWMTRKSEETITPWNFEEVVDKGASAQSFIERMTNFDKNLPNEKVLPKHSLLYEYFTVYNELTKVKYVTEGMRKPAFLSGEQKKAIVDLLFKTNRKVTVKQLKEDYFKKIECFDSVEISGVEDRFNASLGTYHDLLKIIKDKDFLDNEENEDILEDIVLTLTLFEDREMIEERLKTYAHLFDDKVMKQLKRRRYTGWGRLSRKLINGIRDKQSGKTILDFLKSDGFANRNFMQLIHDDSLTFKEDIQKAQVSGQGDSLHEHIANLAGSPAIKKGILQTVKVVDELVKVMGRHKPENIVIEMARENQTTQKGQKNSRERMKRIEEGIKELGSQILKEHPVENTQLQNEKLYLYYLQNGRDMYVDQELDINRLSDYDVDHIVPQSFLKDDSIDNKVLTRSDKARGKSDNVPSEEVVKKMKNYWRQLLNAKLITQRKFDNLTKAERGGLSELDKAGFIKRQLVETRQITKHVAQILDSRMNTKYDENDKLIREVKVITLKSKLVSDFRKDFQFYKVREINNYHHAHDAYLNAVVGTALIKKYPKLESEFVYGDYKVYDVRKMIAKSEQEIGKATAKYFFYSNIMNFFKTEITLANGEIRKRPLIETNGETGEIVWDKGRDFATVRKVLSMPQVNIVKKTEVQTGGFSKESILPKRNSDKLIARKKDWDPKKYGGFDSPTVAYSVLVVAKVEKGKSKKLKSVKELLGITIMERSSFEKNPIDFLEAKGYKEVKKDLIIKLPKYSLFELENGRKRMLASAGELQKGNELALPSKYVNFLYLASHYEKLKGSPEDNEQKQLFVEQHKHYLDEIIEQISEFSKRVILADANLDKVLSAYNKHRDKPIREQAENIIHLFTLTNLGAPAAFKYFDTTIDRKRYTSTKEVLDATLIHQSITGLYETRIDLSQLGGDGGGSSGGSGGGGGTLNLEDEYRLYETSAEPEVSPGSTWLSDFPQAWAETGGMGLAVRQAPLIIPLKATSTPVSIKQYPMSQEAKLGIKPHIQRLLDQGILVPCQSPWNTPLLPVKKPGTNDYRPVQDLREVNKRVEDIHPTVPNPYNLLSGLPPSHRWYTVLDLKDAFFCLRLHPTSQPLFAFEWRDPGMGISGQLTWTRLPQGFKNSPTLFNEALHRDLADFRIQHPDLILLQYVDDILLAATSELDCQQGTRALLLTLGNLGYRASAKKAQLCQKQVKYLGYLLKEGQRWLTEARKETVMGQPTPKTPRQLREFLGTAGFCRLWIPGFAEMAAPLYPLTKPGTLFNWGPDQQKAYQEIKQALLTAPALGLPDLTKPFELFVDEKQGYAKGVLTQKLGPWRRPVAYLSKKLDPVAAGWPPCLRMVAAIAVLRKDAGKLTMGQPLVILAPHAVEALVKQPPDRWLSNARMTHYQAMLLDTDRVQFGPVVALNPATLLPLPEEGAPHDCLEILAETHGTRPDLTDQPIPDADHTWYTDGSSFLQEGQRKAGAAVTTETEVIWARALPAGTSAQRAELIALTQALKMAEGKRLNVYTDSRYAFATAHIHGEIYRRRGWLTSEGREIKNKSEILALLKALFLPKRLSIIHCLGHQKGDSAEARGNRLADQAAREAAIKTPPDTSTLLAGKRTADGSEFEKRTADGSEFESPKKKAKVE

SEQ ID NO: 6864 - protein, 2094 aa, synthetic construct
MPAAKRVKLDGGDKKYSIGLDIGTNSVGWAVITDEYKVPSKKFKVLGNTDRHSIKKNLIGALLFDSGETAEATRLKRTARRRYTRRKNRICYLQEIFSNEMAKVDDSFFHRLEESFLVEEDKKHERHPIFGNIVDEVAYHEKYPTIYHLRKKLVDSTDKADLRLIYLALAHMIKFRGHFLIEGDLNPDNSDVDKLFIQLVQTYNQLFEENPINASGVDAKAILSARLSKSRRLENLIAQLPGEKKNGLFGNLIALSLGLTPNFKSNFDLAEDAKLQLSKDTYDDDLDNLLAQIGDQYADLFLAAKNLSDAILLSDILRVNTEITKAPLSASMIKRYDEHHQDLTLLKALVRQQLPEKYKEIFFDQSKNGYAGYIDGGASQEEFYKFIKPILEKMDGTEELLVKLNREDLLRKQRTFDNGSIPHQIHLGELHAILRRQEDFYPFLKDNREKIEKILTFRIPYYVGPLARGNSRFAWMTRKSEETITPWNFEEVVDKGASAQSFIERMTNFDKNLPNEKVLPKHSLLYEYFTVYNELTKVKYVTEGMRKPAFLSGEQKKAIVDLLFKTNRKVTVKQLKEDYFKKIECFDSVEISGVEDRFNASLGTYHDLLKIIKDKDFLDNEENEDILEDIVLTLTLFEDREMIEERLKTYAHLFDDKVMKQLKRRRYTGWGRLSRKLINGIRDKQSGKTILDFLKSDGFANRNFMQLIHDDSLTFKEDIQKAQVSGQGDSLHEHIANLAGSPAIKKGILQTVKVVDELVKVMGRHKPENIVIEMARENQTTQKGQKNSRERMKRIEEGIKELGSQILKEHPVENTQLQNEKLYLYYLQNGRDMYVDQELDINRLSDYDVDHIVPQSFLKDDSIDNKVLTRSDKARGKSDNVPSEEVVKKMKNYWRQLLNAKLITQRKFDNLTKAERGGLSELDKAGFIKRQLVETRQITKHVAQILDSRMNTKYDENDKLIREVKVITLKSKLVSDFRKDFQFYKVREINNYHHAHDAYLNAVVGTALIKKYPKLESEFVYGDYKVYDVRKMIAKSEQEIGKATAKYFFYSNIMNFFKTEITLANGEIRKRPLIETNGETGEIVWDKGRDFATVRKVLSMPQVNIVKKTEVQTGGFSKESILPKRNSDKLIARKKDWDPKKYGGFDSPTVAYSVLVVAKVEKGKSKKLKSVKELLGITIMERSSFEKNPIDFLEAKGYKEVKKDLIIKLPKYSLFELENGRKRMLASAGELQKGNELALPSKYVNFLYLASHYEKLKGSPEDNEQKQLFVEQHKHYLDEIIEQISEFSKRVILADANLDKVLSAYNKHRDKPIREQAENIIHLFTLTNLGAPAAFKYFDTTIDRKRYTSTKEVLDATLIHQSITGLYETRIDLSQLGGDGGGSSGGSGGGGGTLNIEDEHRLHETSKEPDVSLGSTWLSDFPQAWAETGGMGLAVRQAPLIIPLKATSTPVSIKQYPMSQEARLGIKPHIQRLLDQGILVPCQSPWNTPLLPVKKPGTNDYRPVQDLREVNKRVEDIHPTVPNPYNLLSGLPPSHQWYTVLDLKDAFFCLRLHPTSQPLFAFEWRDPEMGISGQLTWTRLPQGFKNSPTLFNEALHRDLADFRIQHPDLILLQYVDDLLLAATSELDCQQGTRALLQTLGNLGYRASAKKAQICQKQVKYLGYLLKEGQRWLTEARKETVMGQPTPKTPRQLREFLGTAGFCRLWIPGFAEMAAPLYPLTKPGTLFNWGPDQQKAYQEIKQALLTAPALGLPDLTKPFELFVDEKQGYAKGVLTQKLGPWRRPVAYLSKKLDPVAAGWPPCLRMVAAIAVLTKDAGKLTMGQPLVILAPHAVEALVKQPPDRWLSNARMTHYQALLLDTDRVQFGPVVALNPATLLPLPEEGLQHNCLDILAEAHGTRPDLTDQPLPDADHTWYTDGSSLLQEGQRKAGAAVTTETEVIWAKALPAGTSAQRAELIALTQALKMAEGKKLNVYTDSRYAFATAHIHGEIYRRRGWLTSEGKEIKNKDEILALLKALFLPKRLSIIHCPGHQKGHSAEARGNRMADQAARKAAITETPDTSTLLAGKRTADGSEFEKRTADGSEFESPKKKAKVE

SEQ ID NO: 6865 - protein, 2094 aa, synthetic construct
MPAAKRVKLDGGDKKYSIGLDIGTNSVGWAVITDEYKVPSKKFKVLGNTDRHSIKKNLIGALLFDSGETAEATRLKRTARRRYTRRKNRICYLQEIFSNEMAKVDDSFFHRLEESFLVEEDKKHERHPIFGNIVDEVAYHEKYPTIYHLRKKLVDSTDKADLRLIYLALAHMIKFRGHFLIEGDLNPDNSDVDKLFIQLVQTYNQLFEENPINASGVDAKAILSARLSKSRRLENLIAQLPGEKKNGLFGNLIALSLGLTPNFKSNFDLAEDAKLQLSKDTYDDDLDNLLAQIGDQYADLFLAAKNLSDAILLSDILRVNTEITKAPLSASMIKRYDEHHQDLTLLKALVRQQLPEKYKEIFFDQSKNGYAGYIDGGASQEEFYKFIKPILEKMDGTEELLVKLNREDLLRKQRTFDNGSIPHQIHLGELHAILRRQEDFYPFLKDNREKIEKILTFRIPYYVGPLARGNSRFAWMTRKSEETITPWNFEEVVDKGASAQSFIERMTNFDKNLPNEKVLPKHSLLYEYFTVYNELTKVKYVTEGMRKPAFLSGEQKKAIVDLLFKTNRKVTVKQLKEDYFKKIECFDSVEISGVEDRFNASLGTYHDLLKIIKDKDFLDNEENEDILEDIVLTLTLFEDREMIEERLKTYAHLFDDKVMKQLKRRRYTGWGRLSRKLINGIRDKQSGKTILDFLKSDGFANRNFMQLIHDDSLTFKEDIQKAQVSGQGDSLHEHIANLAGSPAIKKGILQTVKVVDELVKVMGRHKPENIVIEMARENQTTQKGQKNSRERMKRIEEGIKELGSQILKEHPVENTQLQNEKLYLYYLQNGRDMYVDQELDINRLSDYDVDHIVPQSFLKDDSIDNKVLTRSDKARGKSDNVPSEEVVKKMKNYWRQLLNAKLITQRKFDNLTKAERGGLSELDKAGFIKRQLVETRQITKHVAQILDSRMNTKYDENDKLIREVKVITLKSKLVSDFRKDFQFYKVREINNYHHAHDAYLNAVVGTALIKKYPKLESEFVYGDYKVYDVRKMIAKSEQEIGKATAKYFFYSNIMNFFKTEITLANGEIRKRPLIETNGETGEIVWDKGRDFATVRKVLSMPQVNIVKKTEVQTGGFSKESILPKRNSDKLIARKKDWDPKKYGGFDSPTVAYSVLVVAKVEKGKSKKLKSVKELLGITIMERSSFEKNPIDFLEAKGYKEVKKDLIIKLPKYSLFELENGRKRMLASAGELQKGNELALPSKYVNFLYLASHYEKLKGSPEDNEQKQLFVEQHKHYLDEIIEQISEFSKRVILADANLDKVLSAYNKHRDKPIREQAENIIHLFTLTNLGAPAAFKYFDTTIDRKRYTSTKEVLDATLIHQSITGLYETRIDLSQLGGDGGGSSGGSGGGGGTLNIEDEHRLHETSKEPDVSLGSTWLSDFPQAWAETGGMGLAVRQAPLIIPLKATSTPVSIKQYPMSQEARLGIKPHIQRLLDQGILVPCQSPWNTPLLPVKKPGTNDYRPVQDLREVNKRVEDIHPTVPNPYNLLSGLPPSHQWYTVLDLKDAFFCLRLHPTSQPLFAFEWRDPEMGISGQLTWTRLPQGFKNSPTLFDEALHRDLADFRIQHPDLILLQYVDDLLLAATSELDCQQGTRALLQTLGNLGYRASAKKAQICQKQVKYLGYLLKEGQRWLTEARKETVMGQPTPKTPRQLREFLGTAGFCRLWIPGFAEMAAPLYPLTKTGTLFNWGPDQQKAYQEIKQALLTAPALGLPDLTKPFELFVDEKQGYAKGVLTQKLGPWRRPVAYLSKKLDPVAAGWPPCLRMVAAIAVLTKDAGKLTMGQPLVILAPHAVEALVKQPPDRWLSNARMTHYQALLLDTDRVQFGPVVALNPATLLPLPEEGLQHNCLDILAEAHGTRPDLTDQPLPDADHTWYTDGSSLLQEGQRKAGAAVTTETEVIWAKALPAGTSAQRAELIALTQALKMAEGKKLNVYTDSRYAFATAHIHGEIYRRRGLLTSEGKEIKNKDEILALLKALFLPKRLSIIHCPGHQKGHSAEARGNRMADQAARKAAITETPDTSTLLAGKRTADGSEFEKRTADGSEFESPKKKAKVE

SEQ ID NO: 6866 - protein, 2094 aa, synthetic construct; identical to SEQ ID NO: 6864

SEQ ID NO: 6867 - protein, 2088 aa, synthetic construct
MPAAKRVKLDGGDKKYSIGLDIGTNSVGWAVITDEYKVPSKKFKVLGNTDRHSIKKNLIGALLFDSGETAEATRLKRTARRRYTRRKNRICYLQEIFSNEMAKVDDSFFHRLEESFLVEEDKKHERHPIFGNIVDEVAYHEKYPTIYHLRKKLVDSTDKADLRLIYLALAHMIKFRGHFLIEGDLNPDNSDVDKLFIQLVQTYNQLFEENPINASGVDAKAILSARLSKSRRLENLIAQLPGEKKNGLFGNLIALSLGLTPNFKSNFDLAEDAKLQLSKDTYDDDLDNLLAQIGDQYADLFLAAKNLSDAILLSDILRVNTEITKAPLSASMIKRYDEHHQDLTLLKALVRQQLPEKYKEIFFDQSKNGYAGYIDGGASQEEFYKFIKPILEKMDGTEELLVKLNREDLLRKQRTFDNGSIPHQIHLGELHAILRRQEDFYPFLKDNREKIEKILTFRIPYYVGPLARGNSRFAWMTRKSEETITPWNFEEVVDKGASAQSFIERMTNFDKNLPNEKVLPKHSLLYEYFTVYNELTKVKYVTEGMRKPAFLSGEQKKAIVDLLFKTNRKVTVKQLKEDYFKKIECFDSVEISGVEDRFNASLGTYHDLLKIIKDKDFLDNEENEDILEDIVLTLTLFEDREMIEERLKTYAHLFDDKVMKQLKRRRYTGWGRLSRKLINGIRDKQSGKTILDFLKSDGFANRNFMQLIHDDSLTFKEDIQKAQVSGQGDSLHEHIANLAGSPAIKKGILQTVKVVDELVKVMGRHKPENIVIEMARENQTTQKGQKNSRERMKRIEEGIKELGSQILKEHPVENTQLQNEKLYLYYLQNGRDMYVDQELDINRLSDYDVDHIVPQSFLKDDSIDNKVLTRSDKARGKSDNVPSEEVVKKMKNYWRQLLNAKLITQRKFDNLTKAERGGLSELDKAGFIKRQLVETRQITKHVAQILDSRMNTKYDENDKLIREVKVITLKSKLVSDFRKDFQFYKVREINNYHHAHDAYLNAVVGTALIKKYPKLESEFVYGDYKVYDVRKMIAKSEQEIGKATAKYFFYSNIMNFFKTEITLANGEIRKRPLIETNGETGEIVWDKGRDFATVRKVLSMPQVNIVKKTEVQTGGFSKESILPKRNSDKLIARKKDWDPKKYGGFDSPTVAYSVLVVAKVEKGKSKKLKSVKELLGITIMERSSFEKNPIDFLEAKGYKEVKKDLIIKLPKYSLFELENGRKRMLASAGELQKGNELALPSKYVNFLYLASHYEKLKGSPEDNEQKQLFVEQHKHYLDEIIEQISEFSKRVILADANLDKVLSAYNKHRDKPIREQAENIIHLFTLTNLGAPAAFKYFDTTIDRKRYTSTKEVLDATLIHQSITGLYETRIDLSQLGGDGGGSSGGSGGGGGTLQLDDEYRLYSPLVKPDQNIQFWLEQFPQAWAETAGMGLAKQVPPQVIQLKASATPVSVRQYPLSKEAQEGIRPHVQRLIQQGILVPVQSPWNTPLLPVRKPGTNDYRPVQDLREVNKRVQDIHPTVPNPYNLLCALPPQRSWYTVLDLKDAFFCLRLHPTSQPLFAFEWRDPGTGRTGQLTWTRLPQGFKNSPTIFDEALHRDLANFRIQHPQVTLLQYVDDLLLAGATKQDCLEGTKALLLELSDLGYRASAKKAQICRREVTYLGYSLRDGQRWLTEARKKTVVQIPAPTTAKQVREFLGTAGFCRLWIPGFATLAAPLYPLTKEKGEFSWAPEHQKAFDAIKKALLSAPALALPDVTKPFTLYVDERKGVARGVLTQTLGPWRRPVAYLSKKLDPVASGWPVCLKAIAAVAILVKDADKLTLGQNITVIAPHALENIVRQPPDRWMTNARMTHYQSLLLTERVTFAPPAALNPATLLPEETDEPVTHDCHQLLIEETGVRKDLTDIPLTGEVLTWFTDGSSYVVEGKRMAGAAVVDGTRTIWASSLPEGTSAQKAELMALTQALRLAEGKSINIYTDSRYAFATAHVHGAIYKQRGLLTSAGREIKNKEEILSLLEALHLPKRLAIIHCPGHQKAKDPISRGNQMADRVAKQAAQGVNLLAGKRTADGSEFEKRTADGSEFESPKKKAKVE

SEQ ID NO: 6868 - protein, 2088 aa, synthetic construct; identical to SEQ ID NO: 6867

SEQ ID NO: 6869 - protein, 2092 aa, synthetic construct
MPAAKRVKLDGGDKKYSIGLDIGTNSVGWAVITDEYKVPSKKFKVLGNTDRHSIKKNLIGALLFDSGETAEATRLKRTARRRYTRRKNRICYLQEIFSNEMAKVDDSFFHRLEESFLVEEDKKHERHPIFGNIVDEVAYHEKYPTIYHLRKKLVDSTDKADLRLIYLALAHMIKFRGHFLIEGDLNPDNSDVDKLFIQLVQTYNQLFEENPINASGVDAKAILSARLSKSRRLENLIAQLPGEKKNGLFGNLIALSLGLTPNFKSNFDLAEDAKLQLSKDTYDDDLDNLLAQIGDQYADLFLAAKNLSDAILLSDILRVNTEITKAPLSASMIKRYDEHHQDLTLLKALVRQQLPEKYKEIFFDQSKNGYAGYIDGGASQEEFYKFIKPILEKMDGTEELLVKLNREDLLRKQRTFDNGSIPHQIHLGELHAILRRQEDFYPFLKDNREKIEKILTFRIPYYVGPLARGNSRFAWMTRKSEETITPWNFEEVVDKGASAQSFIERMTNFDKNLPNEKVLPKHSLLYEYFTVYNELTKVKYVTEGMRKPAFLSGEQKKAIVDLLFKTNRKVTVKQLKEDYFKKIECFDSVEISGVEDRFNASLGTYHDLLKIIKDKDFLDNEENEDILEDIVLTLTLFEDREMIEERLKTYAHLFDDKVMKQLKRRRYTGWGRLSRKLINGIRDKQSGKTILDFLKSDGFANRNFMQLIHDDSLTFKEDIQKAQVSGQGDSLHEHIANLAGSPAIKKGILQTVKVVDELVKVMGRHKPENIVIEMARENQTTQKGQKNSRERMKRIEEGIKELGSQILKEHPVENTQLQNEKLYLYYLQNGRDMYVDQELDINRLSDYDVDHIVPQSFLKDDSIDNKVLTRSDKARGKSDNVPSEEVVKKMKNYWRQLLNAKLITQRKFDNLTKAERGGLSELDKAGFIKRQLVETRQITKHVAQILDSRMNTKYDENDKLIREVKVITLKSKLVSDFRKDFQFYKVREINNYHHAHDAYLNAVVGTALIKKYPKLESEFVYGDYKVYDVRKMIAKSEQEIGKATAKYFFYSNIMNFFKTEITLANGEIRKRPLIETNGETGEIVWDKGRDFATVRKVLSMPQVNIVKKTEVQTGGFSKESILPKRNSDKLIARKKDWDPKKYGGFDSPTVAYSVLVVAKVEKGKSKKLKSVKELLGITIMERSSFEKNPIDFLEAKGYKEVKKDLIIKLPKYSLFELENGRKRMLASAGELQKGNELALPSKYVNFLYLASHYEKLKGSPEDNEQKQLFVEQHKHYLDEIIEQISEFSKRVILADANLDKVLSAYNKHRDKPIREQAENIIHLFTLTNLGAPAAFKYFDTTIDRKRYTSTKEVLDATLIHQSITGLYETRIDLSQLGGDGGGSSGGSGGGGGVLNLEEEYRLHEKPVPSSIDPSWLQLFPTVWAERAGMGLANQVPPVVVELRSGASPVAVRQYPMSKEAREGIRPHIQRFLDLGVLVPCQSPWNTPLLPVKKPGTNDYRPVQDLREINKRVQDIHPTVPNPYNLLSSLPPSHTWYSVLDLKDAFFCLKLHPNSQPLFAFEWRDPEKGNTGQLTWTRLPQGFKNSPTLFNEALHRDLAPFRALNPQVVLLQYVDDLLVAAPTYRDCKEGTQKLLQELSKLGYRVSAKKAQLCQKEVTYLGYLLKEGKRWLTPARKATVMKIPPPTTPRQVREFLGTAGFCRLWIPGFASLAAPLYPLTKPSIPFIWTEEHQKAFDRIKEALLSAPALALPDLTKPFTLYVDERAGVARGVLTQTLGPWRRPVAYLSKKLDPVASGWPTCLKAVAAVALLLKDADKLTLGQNVTVIASHSLESIVRQPPDRWMTNARMTHYQSLLLNERVSFAPPAVLNPATLLPVESEATPVHRCSEILAEETGTRRDLKDQPLPGVPAWYTDGSSFIAEGKRRAGAAIVDGKRTVWASSLPEGTSAQKAELVALTQALRLAEGKDINIYTDSRYAFATAHIHGAIYKQRGWLTSAGKDIKNKEEILALLEAIHLPKRVAIIHCPGHQKGNDPVATGNRRADEAAKQAALSTRVLAETTKPAGKRTADGSEFEKRTADGSEFESPKKKAKVE

SEQ ID NO: 6870 - protein, 2092 aa, synthetic construct
MPAAKRVKLDGGDKKYSIGLDIGTNSVGWAVITDEYKVPSKKFKVLGNTDRHSIKKNLIGALLFDSGETAEATRLKRTARRRYTRRKNRICYLQEIFSNEMAKVDDSFFHRLEESFLVEEDKKHERHPIFGNIVDEVAYHEKYPTIYHLRKKLVDSTDKADLRLIYLALAHMIKFRGHFLIEGDLNPDNSDVDKLFIQLVQTYNQLFEENPINASGVDAKAILSARLSKSRRLENLIAQLPGEKKNGLFGNLIALSLGLTPNFKSNFDLAEDAKLQLSKDTYDDDLDNLLAQIGDQYADLFLAAKNLSDAILLSDILRVNTEITKAPLSASMIKRYDEHHQDLTLLKALVRQQLPEKYKEIFFDQSKNGYAGYIDGGASQEEFYKFIKPILEKMDGTEELLVKLNREDLLRKQRTFDNGSIPHQIHLGELHAILRRQEDFYPFLKDNREKIEKILTFRIPYYVGPLARGNSRFAWMTRKSEETITPWNFEEVVDKGASAQSFIERMTNFDKNLPNEKVLPKHSLLYEYFTVYNELTKVKYVTEGMRKPAFLSGEQKKAIVDLLFKTNRKVTVKQLKEDYFKKIECFDSVEISGVEDRFNASLGTYHDLLKIIKDKDFLDNEENEDILEDIVLTLTLFEDREMIEERLKTYAHLFDDKVMKQLKRRRYTGWGRLSRKLINGIRDKQSGKTILDFLKSDGFANRNFMQLIHDDSLTFKEDIQKAQVSGQGDSLHEHIANLAGSPAIKKGILQTVKVVDELVKVMGRHKPENIVIEMARENQTTQKGQKNSRERMKRIEEGIKELGSQILKEHPVENTQLQNEKLYLYYLQNGRDMYVDQELDINRLSDYDVDHIVPQSFLKDDSIDNKVLTRSDKARGKSDNVPSEEVVKKMKNYWRQLLNAKLITQRKFDNLTKAERGGLSELDKAGFIKRQLVETRQITKHVAQILDSRMNTKYDENDKLIREVKVITLKSKLVSDFRKDFQFYKVREINNYHHAHDAYLNAVVGTALIKKYPKLESEFVYGDYKVYDVRKMIAKSEQEIGKATAKYFFYSNIMNFFKTEITLANGEIRKRPLIETNGETGEIVWDKGRDFATVRKVLSMPQVNIVKKTEVQTGGFSKESILPKRNSDKLIARKKDWDPKKYGGFDSPTVAYSVLVVAKVEKGKSKKLKSVKELLGITIMERSSFEKNPIDFLEAKGYKEVKKDLIIKLPKYSLFELENGRKRMLASAGELQKGNELALPSKYVNFLYLASHYEKLKGSPEDNEQKQLFVEQHKHYLDEIIEQISEFSKRVILADANLDKVLSAYNKHRDKPIREQAENIIHLFTLTNLGAPAAFKYFDTTIDRKRYTSTKEVLDATLIHQSITGLYETRIDLSQLGGDGGGSSGGSGGGGGVLNLEEEYRLHEKPVPSSIDPSWLQLFPTVWAERAGMGLANQVPPVVVELRSGASPVAVRQYPMSKEAREGIRPHIQRFLDLGVLVPCQSPWNTPLLPVKKPGTNDYRPVQDLREINKRVQDIHPTVPNPYNLLSSLPPSHTWYSVLDLKDAFFCLKLHPNSQPLFAFEWRDPEKGNTGQLTWTRLPQGFKNSPTLFNEALHRDLAPFRALNPQVVLLQYVDDLLVAAPTYRDCKEGTQKLLQELSKLGYRVSAKKAQLCQKEVTYLGYLLKEGKRWLTPARKATVMKIPPPTTPRQVREFLGKAGFCRLFIPGFASLAAPLYPLTKPSIPFIWTEEHQKAFDRIKEALLSAPALALPDLTKPFTLYVDERAGVARGVLTQTLGPWRRPVAYLSKKLDPVASGWPTCLKAVAAVALLLKDADKLTLGQNVTVIASHSLESIVRQPPDRWMTNARMTHYQSLLLNERVSFAPPAVLNPATLLPVESEATPVHRCSEILAEETGTRRDLKDQPLPGVPAWYTDGSSFIAEGKRRAGAAIVDGKRTVWASSLPEGTSAQKAELVALTQALRLAEGKDINIYTDSRYAFATAHIHGAIYKQRGWLTSAGKDIKNKEEILALLEAIHLPKRVAIIHCPGHQKGNDPVATGNRRADEAAKQAALSTRVLAETTKPAGKRTADGSEFEKRTADGSEFESPKKKAKVE

SEQ ID NO: 6871 - protein, 2096 aa, synthetic construct
MPAAKRVKLDGGDKKYSIGLDIGTNSVGWAVITDEYKVPSKKFKVLGNTDRHSIKKNLIGALLFDSGETAEATRLKRTARRRYTRRKNRICYLQEIFSNEMAKVDDSFFHRLEESFLVEEDKKHERHPIFGNIVDEVAYHEKYPTIYHLRKKLVDSTDKADLRLIYLALAHMIKFRGHFLIEGDLNPDNSDVDKLFIQLVQTYNQLFEENPINASGVDAKAILSARLSKSRRLENLIAQLPGEKKNGLFGNLIALSLGLTPNFKSNFDLAEDAKLQLSKDTYDDDLDNLLAQIGDQYADLFLAAKNLSDAILLSDILRVNTEITKAPLSASMIKRYDEHHQDLTLLKALVRQQLPEKYKEIFFDQSKNGYAGYIDGGASQEEFYKFIKPILEKMDGTEELLVKLNREDLLRKQRTFDNGSIPHQIHLGELHAILRRQEDFYPFLKDNREKIEKILTFRIPYYVGPLARGNSRFAWMTRKSEETITPWNFEEVVDKGASAQSFIERMTNFDKNLPNEKVLPKHSLLYEYFTVYNELTKVKYVTEGMRKPAFLSGEQKKAIVDLLFKTNRKVTVKQLKEDYFKKIECFDSVEISGVEDRFNASLGTYHDLLKIIKDKDFLDNEENEDILEDIVLTLTLFEDREMIEERLKTYAHLFDDKVMKQLKRRRYTGWGRLSRKLINGIRDKQSGKTILDFLKSDGFANRNFMQLIHDDSLTFKEDIQKAQVSGQGDSLHEHIANLAGSPAIKKGILQTVKVVDELVKVMGRHKPENIVIEMARENQTTQKGQKNSRERMKRIEEGIKELGSQILKEHPVENTQLQNEKLYLYYLQNGRDMYVDQELDINRLSDYDVDHIVPQSFLKDDSIDNKVLTRSDKARGKSDNVPSEEVVKKMKNYWRQLLNAKLITQRKFDNLTKAERGGLSELDKAGFIKRQLVETRQITKHVAQILDSRMNTKYDENDKLIREVKVITLKSKLVSDFRKDFQFYKVREINNYHHAHDAYLNAVVGTALIKKYPKLESEFVYGDYKVYDVRKMIAKSEQEIGKATAKYFFYSNIMNFFKTEITLANGEIRKRPLIETNGETGEIVWDKGRDFATVRKVLSMPQVNIVKKTEVQTGGFSKESILPKRNSDKLIARKKDWDPKKYGGFDSPTVAYSVLVVAKVEKGKSKKLKSVKELLGITIMERSSFEKNPIDFLEAKGYKEVKKDLIIKLPKYSLFELENGRKRMLASAGELQKGNELALPSKYVNFLYLASHYEKLKGSPEDNEQKQLFVEQHKHYLDEIIEQISEFSKRVILADANLDKVLSAYNKHRDKPIREQAENIIHLFTLTNLGAPAAFKYFDTTIDRKRYTSTKEVLDATLIHQSITGLYETRIDLSQLGGDGGGSSGGGGGSGGTAPLEEEYRLFLEAPIQNVTLLEQWKREIPKVWAEINPPGLASTQAPIHVQLLSTALPVRVRQYPITLEAKRSLRETIRKFRAAGILRPVHSPWNTPLLPVRKSGTSEYRMVQDLREVNKRVETIHPTVPNPYTLLSLLPPDRIWYSVLDLKDAFFCIPLAPESQLIFAFEWADAEEGESGQLTWTRLPQGFKNSPTLFNEALNRDLQGFRLDHPSVSLLQYVDDLLIAADTQAACLSATRDLLMTLAELGYRVSGKKAQLCQEEVTYLGFKIHKGSRSLSNSRTQAILQIPVPKTKRQVREFLGTIGYCRLWIPGFAELAQPLYAATRPGNDPLVWGEKEEEAFQSLKLALTQPPALALPSLDKPFQLFVEETSGAAKGVLTQALGPWKRPVAYLSKRLDPVAAGWPRCLRAIAAAALLTREASKLTFGQDIEITSSHNLESLLRSPPDKWLTNARITQYQVLLLDPPRVRFKQTAALNPATLLPETDDTLPIHHCLDTLDSLTSTRPDLTDQPLAQAEATLFTDGSSYIRDGKRYAGAAVVTLDSVIWAEPLPIGTSAQKAELIALTKALEWSKDKSVNIYTDSRYAFATLHVHGMIYRERGWLTAGGKAIKNAPEILALLTAVWLPKRVAVMHCKGHQKDDAPTSTGNRRADEVAREVAIRPLSTQATISAGKRTADGSEFEKRTADGSEFESPKKKAKVE

SEQ ID NO: 6872 - protein, 2100 aa, synthetic construct
MPAAKRVKLDGGDKKYSIGLDIGTNSVGWAVITDEYKVPSKKFKVLGNTDRHSIKKNLIGALLFDSGETAEATRLKRTARRRYTRRKNRICYLQEIFSNEMAKVDDSFFHRLEESFLVEEDKKHERHPIFGNIVDEVAYHEKYPTIYHLRKKLVDSTDKADLRLIYLALAHMIKFRGHFLIEGDLNPDNSDVDKLFIQLVQTYNQLFEENPINASGVDAKAILSARLSKSRRLENLIAQLPGEKKNGLFGNLIALSLGLTPNFKSNFDLAEDAKLQLSKDTYDDDLDNLLAQIGDQYADLFLAAKNLSDAILLSDILRVNTEITKAPLSASMIKRYDEHHQDLTLLKALVRQQLPEKYKEIFFDQSKNGYAGYIDGGASQEEFYKFIKPILEKMDGTEELLVKLNREDLLRKQRTFDNGSIPHQIHLGELHAILRRQEDFYPFLKDNREKIEKILTFRIPYYVGPLARGNSRFAWMTRKSEETITPWNFEEVVDKGASAQSFIERMTNFDKNLPNEKVLPKHSLLYEYFTVYNELTKVKYVTEGMRKPAFLSGEQKKAIVDLLFKTNRKVTVKQLKEDYFKKIECFDSVEISGVEDRFNASLGTYHDLLKIIKDKDFLDNEENEDILEDIVLTLTLFEDREMIEERLKTYAHLFDDKVMKQLKRRRYTGWGRLSRKLINGIRDKQSGKTILDFLKSDGFANRNFMQLIHDDSLTFKEDIQKAQVSGQGDSLHEHIANLAGSPAIKKGILQTVKVVDELVKVMGRHKPENIVIEMARENQTTQKGQKNSRERMKRIEEGIKELGSQILKEHPVENTQLQNEKLYLYYLQNGRDMYVDQELDINRLSDYDVDHIVPQSFLKDDSIDNKVLTRSDKARGKSDNVPSEEVVKKMKNYWRQLLNAKLITQRKFDNLTKAERGGLSELDKAGFIKRQLVETRQITKHVAQILDSRMNTKYDENDKLIREVKVITLKSKLVSDFRKDFQFYKVREINNYHHAHDAYLNAVVGTALIKKYPKLESEFVYGDYKVYDVRKMIAKSEQEIGKATAKYFFYSNIMNFFKTEITLANGEIRKRPLIETNGETGEIVWDKGRDFATVRKVLSMPQVNIVKKTEVQTGGFSKESILPKRNSDKLIARKKDWDPKKYGGFDSPTVAYSVLVVAKVEKGKSKKLKSVKELLGITIMERSSFEKNPIDFLEAKGYKEVKKDLIIKLPKYSLFELENGRKRMLASAGELQKGNELALPSKYVNFLYLASHYEKLKGSPEDNEQKQLFVEQHKHYLDEIIEQISEFSKRVILADANLDKVLSAYNKHRDKPIREQAENIIHLFTLTNLGAPAAFKYFDTTIDRKRYTSTKEVLDATLIHQSITGLYETRIDLSQLGGDGGGSSGGGGGSGGTVSLQDEHRLFDIPVTTSLPDVWLQDFPQAWAETGGLGRAKCQAPIIIDLKPTAVPVSIKQYPMSLEAHMGIRQHIIKFLELGVLRPCRSPWNTPLLPVKKPGTQDYRPVQDLREINKRTVDIHPTVPNPYNLLSTLKPDYSWYTVLDLKDAFFCLPLAPQSQELFAFEWKDPERGISGQLTWTRLPQGFKNSPTLFNEALHRDLTDFRTQHPEVTLLQYVDDLLLAAPTKKACTQGTRHLLQELGEKGYRASAKKAQICQTKVTYLGYILSEGKRWLTPGRIETVARIPPPRNPREVREFLGTAGFCRLWIPGFAELAAPLYALTKPSTPFTWQTEHQLAFEALKKALLSAPALGLPDTSKPFTLFLDERQGIAKGVLTQKLGPWKRPVAYLSKKLDPVAAGWPPCLRIMAATAMLVKDSAKLTLGQPLTVITPHTLEAIVRQPPDRWITNARLTHYQALLLDTDRVQFGPPVTLNPATLLPVPENQPSPHDCRQVLAETHGTREDLKDQELPDADHTWYTDGSSYLDSGTRRAGAAVVDGHNTIWAQSLPPGTSAQKAELIALTKALELSKGKKANIYTDSRYAFATAHTHGSIYERRGWLTSEGKEIKNKAEIIALLKALFLPQEVAIIHCPGHQKGQDPVAVGNRQADRVARQAAMAEVLTLATEPDNTSHITAGKRTADGSEFEKRTADGSEFESPKKKAKVE

SEQ ID NO: 6873 - protein, 2216 aa, synthetic construct
MPAAKRVKLDGGDKKYSIGLDIGTNSVGWAVITDEYKVPSKKFKVLGNTDRHSIKKNLIGALLFDSGETAEATRLKRTARRRYTRRKNRICYLQEIFSNEMAKVDDSFFHRLEESFLVEEDKKHERHPIFGNIVDEVAYHEKYPTIYHLRKKLVDSTDKADLRLIYLALAHMIKFRGHFLIEGDLNPDNSDVDKLFIQLVQTYNQLFEENPINASGVDAKAILSARLSKSRRLENLIAQLPGEKKNGLFGNLIALSLGLTPNFKSNFDLAEDAKLQLSKDTYDDDLDNLLAQIGDQYADLFLAAKNLSDAILLSDILRVNTEITKAPLSASMIKRYDEHHQDLTLLKALVRQQLPEKYKEIFFDQSKNGYAGYIDGGASQEEFYKFIKPILEKMDGTEELLVKLNREDLLRKQRTFDNGSIPHQIHLGELHAILRRQEDFYPFLKDNREKIEKILTFRIPYYVGPLARGNSRFAWMTRKSEETITPWNFEEVVDKGASAQSFIERMTNFDKNLPNEKVLPKHSLLYEYFTVYNELTKVKYVTEGMRKPAFLSGEQKKAIVDLLFKTNRKVTVKQLKEDYFKKIECFDSVEISGVEDRFNASLGTYHDLLKIIKDKDFLDNEENEDILEDIVLTLTLFEDREMIEERLKTYAHLFDDKVMKQLKRRRYTGWGRLSRKLINGIRDKQSGKTILDFLKSDGFANRNFMQLIHDDSLTFKEDIQKAQVSGQGDSLHEHIANLAGSPAIKKGILQTVKVVDELVKVMGRHKPENIVIEMARENQTTQKGQKNSRERMKRIEEGIKELGSQILKEHPVENTQLQNEKLYLYYLQNGRDMYVDQELDINRLSDYDVDHIVPQSFLKDDSIDNKVLTRSDKARGKSDNVPSEEVVKKMKNYWRQLLNAKLITQRKFDNLTKAERGGLSELDKAGFIKRQLVETRQITKHVAQILDSRMNTKYDENDKLIREVKVITLKSKLVSDFRKDFQFYKVREINNYHHAHDAYLNAVVGTALIKKYPKLESEFVYGDYKVYDVRKMIAKSEQEIGKATAKYFFYSNIMNFFKTEITLANGEIRKRPLIETNGETGEIVWDKGRDFATVRKVLSMPQVNIVKKTEVQTGGFSKESILPKRNSDKLIARKKDWDPKKYGGFDSPTVAYSVLVVAKVEKGKSKKLKSVKELLGITIMERSSFEKNPIDFLEAKGYKEVKKDLIIKLPKYSLFELENGRKRMLASAGELQKGNELALPSKYVNFLYLASHYEKLKGSPEDNEQKQLFVEQHKHYLDEIIEQISEFSKRVILADANLDKVLSAYNKHRDKPIREQAENIIHLFTLTNLGAPAAFKYFDTTIDRKRYTSTKEVLDATLIHQSITGLYETRIDLSQLGGDGGGSSGGGGGSGGTLGDQGSRGSDPLPEPRVTLTVEGIPTEFLVNTGAEHSVLTKPMGKMGSKRTVVAGATGSKVYPWTTKRLLKIGQKQVTHSFLVIPECPAPLLGRDLLTKLKAQIQFSTEGPQVTWEDRPAMCLVLNLEEEYRLHEKPVPPSIDPSWLQLFPMVWAEKAGMGLANQVPPVVVELKSDASPVAVRQYPMSKEAREGIRPHIQRFLDLGILVPCQSPWNTPLLPVKKPGTNDYRPVQDLREVNKRVQDIHPTVPNPYNLLSSLPPSHTWYSVLDLKDAFFCLKLHPNSQPLFAFEWRDPEKGNTGQLTWTRLPQGFKNSPTLFDEALHRDLASFRALNPQVVMLQYVDDLLVAAPTYRDCKEGTRRLLQELSKLGYRVSAKKAQLCREEVTYLGYLLKGGKRWLTPARKATVMKIPTPTTPRQVREFLGTAGFCRLWIPGFASLAAPLYPLTREKVPFTWTEAHQEAFGRIKEALLSAPALALPDLTKPFALYVDEKEGVARGVLTQTLGPWRRPVAYLSKKLDPVASGWPTCLKAIAAVALLLKDADKLTLGQNVLVIAPHNLESIVRQPPDRWMTNARMTHYQSLLLNERVSFAPPAILNPATLLPVESDDTPIHICSEILAEETGTRPDLRDQPLPGVPAWYTDGSSFIMDGRRQAGAAIVDNKRTVWASNLPEGTSAQKAELIALTQALRLAEGKSINIYTDSRYAFATAHVHGAIYKQRGLLTSAGKDIKNKEEILALLEAIHLPKRVAIIHCPGHQRGTDPVATGNRKADEAAKQAAQSTRILTETTKNAGKRTADGSEFEKRTADGSEFESPKKKAKVE

SEQ ID NO: 6874 - protein, 2125 aa, synthetic construct
MPAAKRVKLDGGDKKYSIGLDIGTNSVGWAVITDEYKVPSKKFKVLGNTDRHSIKKNLIGALLFDSGETAEATRLKRTARRRYTRRKNRICYLQEIFSNEMAKVDDSFFHRLEESFLVEEDKKHERHPIFGNIVDEVAYHEKYPTIYHLRKKLVDSTDKADLRLIYLALAHMIKFRGHFLIEGDLNPDNSDVDKLFIQLVQTYNQLFEENPINASGVDAKAILSARLSKSRRLENLIAQLPGEKKNGLFGNLIALSLGLTPNFKSNFDLAEDAKLQLSKDTYDDDLDNLLAQIGDQYADLFLAAKNLSDAILLSDILRVNTEITKAPLSASMIKRYDEHHQDLTLLKALVRQQLPEKYKEIFFDQSKNGYAGYIDGGASQEEFYKFIKPILEKMDGTEELLVKLNREDLLRKQRTFDNGSIPHQIHLGELHAILRRQEDFYPFLKDNREKIEKILTFRIPYYVGPLARGNSRFAWMTRKSEETITPWNFEEVVDKGASAQSFIERMTNFDKNLPNEKVLPKHSLLYEYFTVYNELTKVKYVTEGMRKPAFLSGEQKKAIVDLLFKTNRKVTVKQLKEDYFKKIECFDSVEISGVEDRFNASLGTYHDLLKIIKDKDFLDNEENEDILEDIVLTLTLFEDREMIEERLKTYAHLFDDKVMKQLKRRRYTGWGRLSRKLINGIRDKQSGKTILDFLKSDGFANRNFMQLIHDDSLTFKEDIQKAQVSGQGDSLHEHIANLAGSPAIKKGILQTVKVVDELVKVMGRHKPENIVIEMARENQTTQKGQKNSRERMKRIEEGIKELGSQILKEHPVENTQLQNEKLYLYYLQNGRDMYVDQELDINRLSDYDVDHIVPQSFLKDDSIDNKVLTRSDKARGKSDNVPSEEVVKKMKNYWRQLLNAKLITQRKFDNLTKAERGGLSELDKAGFIKRQLVETRQITKHVAQILDSRMNTKYDENDKLIREVKVITLKSKLVSDFRKDFQFYKVREINNYHHAHDAYLNAVVGTALIKKYPKLESEFVYGDYKVYDVRKMIAKSEQEIGKATAKYFFYSNIMNFFKTEITLANGEIRKRPLIETNGETGEIVWDKGRDFATVRKVLSMPQVNIVKKTEVQTGGFSKESILPKRNSDKLIARKKDWDPKKYGGFDSPTVAYSVLVVAKVEKGKSKKLKSVKELLGITIMERSSFEKNPIDFLEAKGYKEVKKDLIIKLPKYSLFELENGRKRMLASAGELQKGNELALPSKYVNFLYLASHYEKLKGSPEDNEQKQLFVEQHKHYLDEIIEQISEFSKRVILADANLDKVLSAYNKHRDKPIREQAENIIHLFTLTNLGAPAAFKYFDTTIDRKRYTSTKEVLDATLIHQSITGLYETRIDLSQLGGDGGGSSGGGGGSGGLLGRDLLTKLKAQIQFSTEGPQVTWEDRPAMCLVLNLEEEYRLHEKPVPPSIDPSWLQLFPMVWAEKAGMGLANQVPPVVVELKSDASPVAVRQYPMSKEAREGIRPHIQRFLDLGILVPCQSPWNTPLLPVKKPGTNDYRPVQDLREVNKRVQDIHPTVPNPYNLLSSLPPSHTWYSVLDLKDAFFCLKLHPNSQPLFAFEWRDPEKGNTGQLTWTRLPQGFKNSPTLFNEALHRDLASFRALNPQVVMLQYVDDLLVAAPTYRDCKEGTRRLLQELSKLGYRVSAKKAQLCREEVTYLGYLLKGGKRWLTPARKATVMKIPTPTTPRQVREFLGTAGFCRLWIPGFASLAAPLYPLTRPKVPFTWTEAHQEAFGRIKEALLSAPALALPDLTKPFALYVDEKEGVARGVLTQTLGPWRRPVAYLSKKLDPVASGWPTCLKAIAAVALLLKDADKLTLGQNVLVIAPHNLESIVRQPPDRWMTNARMTHYQSLLLNERVSFAPPAILNPATLLPVESDDTPIHICSEILAEETGTRPDLRDQPLPGVPAWYTDGSSFIMDGRRQAGAAIVDNKRTVWASNLPEGTSAQKAELIALTQALRLAEGKSINIYTDSRYAFATAHVHGAIYKQRGWLTSAGKDIKNKEEILALLEAIHLPKRVAIIHCPGHQRGTDPVATGNRKADEAAKQAAQSTRILTETTKNAGKRTADGSEFEKRTADGSEFESPKKKAKVE

SEQ ID NO: 6875 - protein, 2094 aa, synthetic construct; identical to SEQ ID NO: 4517

SEQ ID NO: 6876 - protein, 2094 aa, synthetic construct; identical to SEQ ID NO: 4517

SEQ ID NO: 6877 - protein, 2094 aa, synthetic construct
MPAAKRVKLDGGDKKYSIGLDIGTNSVGWAVITDEYKVPSKKFKVLGNTDRHSIKKNLIGALLFDSGETAEATRLKRTARRRYTRRKNRICYLQEIFSNEMAKVDDSFFHRLEESFLVEEDKKHERHPIFGNIVDEVAYHEKYPTIYHLRKKLVDSTDKADLRLIYLALAHMIKFRGHFLIEGDLNPDNSDVDKLFIQLVQTYNQLFEENPINASGVDAKAILSARLSKSRRLENLIAQLPGEKKNGLFGNLIALSLGLTPNFKSNFDLAEDAKLQLSKDTYDDDLDNLLAQIGDQYADLFLAAKNLSDAILLSDILRVNTEITKAPLSASMIKRYDEHHQDLTLLKALVRQQLPEKYKEIFFDQSKNGYAGYIDGGASQEEFYKFIKPILEKMDGTEELLVKLNREDLLRKQRTFDNGSIPHQIHLGELHAILRRQEDFYPFLKDNREKIEKILTFRIPYYVGPLARGNSRFAWMTRKSEETITPWNFEEVVDKGASAQSFIERMTNFDKNLPNEKVLPKHSLLYEYFTVYNELTKVKYVTEGMRKPAFLSGEQKKAIVDLLFKTNRKVTVKQLKEDYFKKIECFDSVEISGVEDRFNASLGTYHDLLKIIKDKDFLDNEENEDILEDIVLTLTLFEDREMIEERLKTYAHLFDDKVMKQLKRRRYTGWGRLSRKLINGIRDKQSGKTILDFLKSDGFANRNFMQLIHDDSLTFKEDIQKAQVSGQGDSLHEHIANLAGSPAIKKGILQTVKVVDELVKVMGRHKPENIVIEMARENQTTQKGQKNSRERMKRIEEGIKELGSQILKEHPVENTQLQNEKLYLYYLQNGRDMYVDQELDINRLSDYDVDHIVPQSFLKDDSIDNKVLTRSDKARGKSDNVPSEEVVKKMKNYWRQLLNAKLITQRKFDNLTKAERGGLSELDKAGFIKRQLVETRQITKHVAQILDSRMNTKYDENDKLIREVKVITLKSKLVSDFRKDFQFYKVREINNYHHAHDAYLNAVVGTALIKKYPKLESEFVYGDYKVYDVRKMIAKSEQEIGKATAKYFFYSNIMNFFKTEITLANGEIRKRPLIETNGETGEIVWDKGRDFATVRKVLSMPQVNIVKKTEVQTGGFSKESILPKRNSDKLIARKKDWDPKKYGGFDSPTVAYSVLVVAKVEKGKSKKLKSVKELLGITIMERSSFEKNPIDFLEAKGYKEVKKDLIIKLPKYSLFELENGRKRMLASAGELQKGNELALPSKYVNFLYLASHYEKLKGSPEDNEQKQLFVEQHKHYLDEIIEQISEFSKRVILADANLDKVLSAYNKHRDKPIREQAENIIHLFTLTNLGAPAAFKYFDTTIDRKRYTSTKEVLDATLIHQSITGLYETRIDLSQLGGDGGGSSGGGGGSGGTLGIEDEYRLHETSTEPDVSLGSTWLSDFPQAWAETGGMGLAVRQAPLIIPLKATSTPVSIQQYPMSHEARLGIKPHIQRLLDQGILVPCQSPWNTPLLPVKKPGTNDYRPVQDLREVNKRVEDIHPTVPNPYNLLSGLPPSHQWYTVLDLKDAFFCLRLHPTSQPLFAFEWRDPGMGISGQLTWTRLPQGFKNSPTLFNEALHRDLADFRIQHPDLILLQYVDDILLAATSELDCQQGTRALLQTLGDLGYRASAKKAQICQKQVKYLGYLLREGQRWLTEARKETVMGQPVPKTPRQLREFLGTAGFCRLWIPGFAEMAAPLYPLTKPGTLFSWGPDQQKAYQEIKQALLTAPALGLPDLTKPFELFVDEKQGYAKGVLTQKLGPWRRPVAYLSKKLDPVAAGWPPCLRMVAAIAVLTKDAGKLTMGQPLVILAPHAVEALVKQPPDRWLSNARMTHYQAMLLDTDRVQFGPVVALNPATLLPLPEEGAPHDCLEILAETHGTRPDLTDQPIPDADHTWYTDGSSFLQEGQRKAGAAVTTETEVIWAGALPAGTSAQRAELIALTQALKMAEGKRLNVYTDSRYAFATAHIHGEIYRRRGWLTSEGREIKNKSEILALLKALFLPKRLSIIHCLGHQKGDSAEARGNRLADQAAREAAIKTPPDTSTLLAGKRTADGSEFEKRTADGSEFESPKKKAKVE

SEQ ID NO: 6878 - protein, 2094 aa, synthetic construct
MPAAKRVKLDGGDKKYSIGLDIGTNSVGWAVITDEYKVPSKKFKVLGNTDRHSIKKNLIGALLFDSGETAEATRLKRTARRRYTRRKNRICYLQEIFSNEMAKVDDSFFHRLEESFLVEEDKKHERHPIFGNIVDEVAYHEKYPTIYHLRKKLVDSTDKADLRLIYLALAHMIKFRGHFLIEGDLNPDNSDVDKLFIQLVQTYNQLFEENPINASGVDAKAILSARLSKSRRLENLIAQLPGEKKNGLFGNLIALSLGLTPNFKSNFDLAEDAKLQLSKDTYDDDLDNLLAQIGDQYADLFLAAKNLSDAILLSDILRVNTEITKAPLSASMIKRYDEHHQDLTLLKALVRQQLPEKYKEIFFDQSKNGYAGYIDGGASQEEFYKFIKPILEKMDGTEELLVKLNREDLLRKQRTFDNGSIPHQIHLGELHAILRRQEDFYPFLKDNREKIEKILTFRIPYYVGPLARGNSRFAWMTRKSEETITPWNFEEVVDKGASAQSFIERMTNFDKNLPNEKVLPKHSLLYEYFTVYNELTKVKYVTEGMRKPAFLSGEQKKAIVDLLFKTNRKVTVKQLKEDYFKKIECFDSVEISGVEDRFNASLGTYHDLLKIIKDKDFLDNEENEDILEDIVLTLTLFEDREMIEERLKTYAHLFDDKVMKQLKRRRYTGWGRLSRKLINGIRDKQSGKTILDFLKSDGFANRNFMQLIHDDSLTFKEDIQKAQVSGQGDSLHEHIANLAGSPAIKKGILQTVKVVDELVKVMGRHKPENIVIEMARENQTTQKGQKNSRERMKRIEEGIKELGSQILKEHPVENTQLQNEKLYLYYLQNGRDMYVDQELDINRLSDYDVDHIVPQSFLKDDSIDNKVLTRSDKARGKSDNVPSEEVVKKMKNYWRQLLNAKLITQRKFDNLTKAERGGLSELDKAGFIKRQLVETRQITKHVAQILDSRMNTKYDENDKLIREVKVITLKSKLVSDFRKDFQFYKVREINNYHHAHDAYLNAVVGTALIKKYPKLESEFVYGDYKVYDVRKMIAKSEQEIGKATAKYFFYSNIMNFFKTEITLANGEIRKRPLIETNGETGEIVWDKGRDFATVRKVLSMPQVNIVKKTEVQTGGFSKESILPKRNSDKLIARKKDWDPKKYGGFDSPTVAYSVLVVAKVEKGKSKKLKSVKELLGITIMERSSFEKNPIDFLEAKGYKEVKKDLIIKLPKYSLFELENGRKRMLASAGELQKGNELALPSKYVNFLYLASHYEKLKGSPEDNEQKQLFVEQHKHYLDEIIEQISEFSKRVILADANLDKVLSAYNKHRDKPIREQAENIIHLFTLTNLGAPAAFKYFDTTIDRKRYTSTKEVLDATLIHQSITGLYETRIDLSQLGGDGGGSSGGGGGSGGTLNIEDEYRLHETSKEPDVSLGSTWLSDFPQAWAETGGMGLAVRQAPLIIPLKATSTPVSIKQYPMSQEARLGIKPHIQRLLDQGILVPCQSPWNTPLLPVKKPGTNDYRPVQDLREVNKRVEDIHPTVPNPYNLLSGLPPSHQWYTVLDLKDAFFCLRLHPTSQPLFAFEWRDPEMGISGQLTWTRLPQGFKNSPTLFNEALHRDLAGFRIQHPDLILLQYVDDLLLAATSELDCQQGTRALLQTLGDLGYRASAKKAQICQKQVKYLGYLLKEGQRWLTEARKETVMGQPIPKTPRQLREFLGTAGFCRLWIPGFAEMAAPLYPLTKPGTLFNWGPDQQKAFQEIKQALLTAPALGLPDLTKPFELFVDEKQGYAKGVLTQKLGPWRRPVAYLSKKLDPVAAGWPPCLRMVAAIAVLTKDAGKLTMGQPLVILAPHAVEALVKQPPDRWLSNARMTHYQALLLDTDRVQFGPVVALNPATLLPLPEEGLQHDCLDILAEAHGTRSDLMDQPLPDADHTWYTDGSSFLQEGQRKAGAAVTTETEVIWARALPAGTSAQRAELIALTQALKMAEGKKLNVYTDSRYAFATAHIHGEIYRRRGWLTSEGKEIKNKDEILALLKALFLPKRLSIIHCPGHQKGNSAEARGNRMADQAAREVATRETPETSTLLAGKRTADGSEFEKRTADGSEFESPKKKAKVE

SEQ ID NO: 6879 - protein, 2094 aa, synthetic construct
MPAAKRVKLDGGDKKYSIGLDIGTNSVGWAVITDEYKVPSKKFKVLGNTDRHSIKKNLIGALLFDSGETAEATRLKRTARRRYTRRKNRICYLQEIFSNEMAKVDDSFFHRLEESFLVEEDKKHERHPIFGNIVDEVAYHEKYPTIYHLRKKLVDSTDKADLRLIYLALAHMIKFRGHFLIEGDLNPDNSDVDKLFIQLVQTYNQLFEENPINASGVDAKAILSARLSKSRRLENLIAQLPGEKKNGLFGNLIALSLGLTPNFKSNFDLAEDAKLQLSKDTYDDDLDNLLAQIGDQYADLFLAAKNLSDAILLSDILRVNTEITKAPLSASMIKRYDEHHQDLTLLKALVRQQLPEKYKEIFFDQSKNGYAGYIDGGASQEEFYKFIKPILEKMDGTEELLVKLNREDLLRKQRTFDNGSIPHQIHLGELHAILRRQEDFYPFLKDNREKIEKILTFRIPYYVGPLARGNSRFAWMTRKSEETITPWNFEEVVDKGASAQSFIERMTNFDKNLPNEKVLPKHSLLYEYFTVYNELTKVKYVTEGMRKPAFLSGEQKKAIVDLLFKTNRKVTVKQLKEDYFKKIECFDSVEISGVEDRFNASLGTYHDLLKIIKDKDFLDNEENEDILEDIVLTLTLFEDREMIEERLKTYAHLFDDKVMKQLKRRRYTGWGRLSRKLINGIRDKQSGKTILDFLKSDGFANRNFMQLIHDDSLTFKEDIQKAQVSGQGDSLHEHIANLAGSPAIKKGILQTVKVVDELVKVMGRHKPENIVIEMARENQTTQKGQKNSRERMKRIEEGIKELGSQILKEHPVENTQLQNEKLYLYYLQNGRDMYVDQELDINRLSDYDVDHIVPQSFLKDDSIDNKVLTRSDKARGKSDNVPSEEVVKKMKNYWRQLLNAKLITQRKFDNLTKAERGGLSELDKAGFIKRQLVETRQITKHVAQILDSRMNTKYDENDKLIREVKVITLKSKLVSDFRKDFQFYKVREINNYHHAHDAYLNAVVGTALIKKYPKLESEFVYGDYKVYDVRKMIAKSEQEIGKATAKYFFYSNIMNFFKTEITLANGEIRKRPLIETNGETGEIVWDKGRDFATVRKVLSMPQVNIVKKTEVQTGGFSKESILPKRNSDKLIARKKDWDPKKYGGFDSPTVAYSVLVVAKVEKGKSKKLKSVKELLGITIMERSSFEKNPIDFLEAKGYKEVKKDLIIKLPKYSLFELENGRKRMLASAGELQKGNELALPSKYVNFLYLASHYEKLKGSPEDNEQKQLFVEQHKHYLDEIIEQISEFSKRVILADANLDKVLSAYNKHRDKPIREQAENIIHLFTLTNLGAPAAFKYFDTTIDRKRYTSTKEVLDATLIHQSITGLYETRIDLSQLGGDGGGSSGGGGGSGGTLNIEDEYRLHETSKEPDVSLGSTWLSDFPQAWAETGGMGLAVRQAPLIIPLKATSTPVSIKQYPMSQEARLGIKPHIQRLLDQGILVPCQSPWNTPLLPVKKPGTNDYRPVQDLREVNKRVEDIHPTVPNPYNLLSGLPPSHQWYTVLDLKDAFFCLRLHPTSQPLFAFEWRDPEMGISGQLTWTRLPQGFKNSPTLFNEALHRDLAGFRIQHPDLILLQYVDDLLLAATSELDCQQGTRALLQTLGDLGYRASAKKAQICQKQVKYLGYLLKEGQRWLTEARKETVMGQPIPKTPRQLREFLGKAGFCRLFIPGFAEMAAPLYPLTKPGTLFNWGPDQQKAFQEIKQALLTAPALGLPDLTKPFELFVDEKQGYAKGVLTQKLGPWRRPVAYLSKKLDPVAAGWPPCLRMVAAIAVLTKDAGKLTMGQPLVILAPHAVEALVKQPPDRWLSNARMTHYQALLLDTDRVQFGPVVALNPATLLPLPEEGLQHDCLDILAEAHGTRSDLMDQPLPDADHTWYTDGSSFLQEGQRKAGAAVTTETEVIWARALPAGTSAQRAELIALTQALKMAEGKKLNVYTDSRYAFATAHIHGEIYRRRGWLTSEGKEIKNKDEILALLKALFLPKRLSIIHCPGHQKGNSAEARGNRMADQAAREVATRETPETSTLLAGKRTADGSEFEKRTADGSEFESPKKKAKVE

SEQ ID NO: 6880 - protein, 2114 aa, synthetic construct
MPAAKRVKLDGGDKKYSIGLDIGTNSVGWAVITDEYKVPSKKFKVLGNTDRHSIKKNLIGALLFDSGETAEATRLKRTARRRYTRRKNRICYLQEIFSNEMAKVDDSFFHRLEESFLVEEDKKHERHPIFGNIVDEVAYHEKYPTIYHLRKKLVDSTDKADLRLIYLALAHMIKFRGHFLIEGDLNPDNSDVDKLFIQLVQTYNQLFEENPINASGVDAKAILSARLSKSRRLENLIAQLPGEKKNGLFGNLIALSLGLTPNFKSNFDLAEDAKLQLSKDTYDDDLDNLLAQIGDQYADLFLAAKNLSDAILLSDILRVNTEITKAPLSASMIKRYDEHHQDLTLLKALVRQQLPEKYKEIFFDQSKNGYAGYIDGGASQEEFYKFIKPILEKMDGTEELLVKLNREDLLRKQRTFDNGSIPHQIHLGELHAILRRQEDFYPFLKDNREKIEKILTFRIPYYVGPLARGNSRFAWMTRKSEETITPWNFEEVVDKGASAQSFIERMTNFDKNLPNEKVLPKHSLLYEYFTVYNELTKVKYVTEGMRKPAFLSGEQKKAIVDLLFKTNRKVTVKQLKEDYFKKIECFDSVEISGVEDRFNASLGTYHDLLKIIKDKDFLDNEENEDILEDIVLTLTLFEDREMIEERLKTYAHLFDDKVMKQLKRRRYTGWGRLSRKLINGIRDKQSGKTILDFLKSDGFANRNFMQLIHDDSLTFKEDIQKAQVSGQGDSLHEHIANLAGSPAIKKGILQTVKVVDELVKVMGRHKPENIVIEMARENQTTQKGQKNSRERMKRIEEGIKELGSQILKEHPVENTQLQNEKLYLYYLQNGRDMYVDQELDINRLSDYDVDHIVPQSFLKDDSIDNKVLTRSDKARGKSDNVPSEEVVKKMKNYWRQLLNAKLITQRKFDNLTKAERGGLSELDKAGFIKRQLVETRQITKHVAQILDSRMNTKYDENDKLIREVKVITLKSKLVSDFRKDFQFYKVREINNYHHAHDAYLNAVVGTALIKKYPKLESEFVYGDYKVYDVRKMIAKSEQEIGKATAKYFFYSNIMNFFKTEITLANGEIRKRPLIETNGETGEIVWDKGRDFATVRKVLSMPQVNIVKKTEVQTGGFSKESILPKRNSDKLIARKKDWDPKKYGGFDSPTVAYSVLVVAKVEKGKSKKLKSVKELLGITIMERSSFEKNPIDFLEAKGYKEVKKDLIIKLPKYSLFELENGRKRMLASAGELQKGNELALPSKYVNFLYLASHYEKLKGSPEDNEQKQLFVEQHKHYLDEIIEQISEFSKRVILADANLDKVLSAYNKHRDKPIREQAENIIHLFTLTNLGAPAAFKYFDTTIDRKRYTSTKEVLDATLIHQSITGLYETRIDLSQLGGDGGGSSGGGGGSGGVQEISDSRPMLHIYLNGRRFLGLLDTGADKTCIAGRDWPANWPIHQTESSLQGLGMACGVARSSQPLRWQHEDKSGIIHPFVIPTLPFTLWGRDIMKDIKVRLMTDSPDDSQDLMIGAIESNLFADQISWKSDQPVWLNQWPLKQEKLQALQQLVTEQLQLGHLEESNSPWNTPVFVIKKKSGKWRLLQDLRAVNATMHDMGALQPGLPSPVAVPKGWEIIIIDLQDCFFNIKLHPEDCKRFAFSVPSPNFKRPYQRFQWKVLPQGMKNSPTLCQKFVDKAILTVRDKYQDSYIVHYMDDILLAHPSRSIVDEILTSMIQALNKHGLVVSTEKIQKYDNLKYLGTHIQGDSVSYQKLQIRTDKLRTLNDFQKLLGNINWIRPFLKLTTGELKPLFEILNGDSNPISTRKLTPEACKALQLMNERLSTARVKRLDLSQPWSLCILKTEYTPTACLWQDGVVEWIHLPHISPKVITPYDIFCTQLIIKGRHRSKELFSKDPDYIVVPYTKVQFDLLLQEKEDWPISLLGFLGEVHFHLPKDPLLTFTLQTAIIFPHMTSTTPLEKGIVIFTDGSANGRSVTYIQGREPIIKENTQNTAQQAEIVAVITAFEEVSQPFNLYTDSKYVTGLFPEIETATLSPRTKIYTELKHLQRLIHKRQEKFYIGHIRGHTGLPGPLAQGNAYADSLTRILTAAGKRTADGSEFEKRTADGSEFESPKKKAKVE

SEQ ID NO: 6881 - protein, 2086 aa, synthetic construct
MPAAKRVKLDGGDKKYSIGLDIGTNSVGWAVITDEYKVPSKKFKVLGNTDRHSIKKNLIGALLFDSGETAEATRLKRTARRRYTRRKNRICYLQEIFSNEMAKVDDSFFHRLEESFLVEEDKKHERHPIFGNIVDEVAYHEKYPTIYHLRKKLVDSTDKADLRLIYLALAHMIKFRGHFLIEGDLNPDNSDVDKLFIQLVQTYNQLFEENPINASGVDAKAILSARLSKSRRLENLIAQLPGEKKNGLFGNLIALSLGLTPNFKSNFDLAEDAKLQLSKDTYDDDLDNLLAQIGDQYADLFLAAKNLSDAILLSDILRVNTEITKAPLSASMIKRYDEHHQDLTLLKALVRQQLPEKYKEIFFDQSKNGYAGYIDGGASQEEFYKFIKPILEKMDGTEELLVKLNREDLLRKQRTFDNGSIPHQIHLGELHAILRRQEDFYPFLKDNREKIEKILTFRIPYYVGPLARGNSRFAWMTRKSEETITPWNFEEVVDKGASAQSFIERMTNFDKNLPNEKVLPKHSLLYEYFTVYNELTKVKYVTEGMRKPAFLSGEQKKAIVDLLFKTNRKVTVKQLKEDYFKKIECFDSVEISGVEDRFNASLGTYHDLLKIIKDKDFLDNEENEDILEDIVLTLTLFEDREMIEERLKTYAHLFDDKVMKQLKRRRYTGWGRLSRKLINGIRDKQSGKTILDFLKSDGFANRNFMQLIHDDSLTFKEDIQKAQVSGQGDSLHEHIANLAGSPAIKKGILQTVKVVDELVKVMGRHKPENIVIEMARENQTTQKGQKNSRERMKRIEEGIKELGSQILKEHPVENTQLQNEKLYLYYLQNGRDMYVDQELDINRLSDYDVDHIVPQSFLKDDSIDNKVLTRSDKARGKSDNVPSEEVVKKMKNYWRQLLNAKLITQRKFDNLTKAERGGLSELDKAGFIKRQLVETRQITKHVAQILDSRMNTKYDENDKLIREVKVITLKSKLVSDFRKDFQFYKVREINNYHHAHDAYLNAVVGTALIKKYPKLESEFVYGDYKVYDVRKMIAKSEQEIGKATAKYFFYSNIMNFFKTEITLANGEIRKRPLIETNGETGEIVWDKGRDFATVRKVLSMPQVNIVKKTEVQTGGFSKESILPKRNSDKLIARKKDWDPKKYGGFDSPTVAYSVLVVAKVEKGKSKKLKSVKELLGITIMERSSFEKNPIDFLEAKGYKEVKKDLIIKLPKYSLFELENGRKRMLASAGELQKGNELALPSKYVNFLYLASHYEKLKGSPEDNEQKQLFVEQHKHYLDEIIEQISEFSKRVILADANLDKVLSAYNKHRDKPIREQAENIIHLFTLTNLGAPAAFKYFDTTIDRKRYTSTKEVLDATLIHQSITGLYETRIDLSQLGGDGGGSSGGGGGSGGLDDEYRLYSPLVKPDQNIQFWLEQFPQAWAETAGMGLAKQVPPQVIQLKASATPVSVRQYPLSKEAQEGIRPHVQRLIQQGILVPVQSPWNTPLLPVRKPGTNDYRPVQDLREVNKRVQDIHPTVPNPYNLLCALPPQRSWYTVLDLKDAFFCLRLHPTSQPLFAFEWRDPGTGRTGQLTWTRLPQGFKNSPTIFNEALHRDLANFRIQHPQVTLLQYVDDLLLAGATKQDCLEGTKALLLELSDLGYRASAKKAQICRREVTYLGYSLRDGQRWLTEARKKTVVQIPAPTTAKQVREFLGKAGFCRLFIPGFATLAAPLYPLTKPKGEFSWAPEHQKAFDAIKKALLSAPALALPDVTKPFTLYVDERKGVARGVLTQTLGPWRRPVAYLSKKLDPVASGWPVCLKAIAAVAILVKDADKLTLGQNITVIAPHALENIVRQPPDRWMTNARMTHYQSLLLTERVTFAPPAALNPATLLPEETDEPVTHDCHQLLIEETGVRKDLTDIPLTGEVLTWFTDGSSYVVEGKRMAGAAVVDGTRTIWASSLPEGTSAQKAELMALTQALRLAEGKSINIYTDSRYAFATAHVHGAIYKQRGWLTSAGREIKNKEEILSLLEALHLPKRLAIIHCPGHQKAKDPISRGNQMADRVAKQAAQGVNLLPAGKRTADGSEFEKRTADGSEFESPKKKAKVE

SEQ ID NO: 6882 - protein, 2094 aa, synthetic construct
MPAAKRVKLDGGDKKYSIGLDIGTNSVGWAVITDEYKVPSKKFKVLGNTDRHSIKKNLIGALLFDSGETAEATRLKRTARRRYTRRKNRICYLQEIFSNEMAKVDDSFFHRLEESFLVEEDKKHERHPIFGNIVDEVAYHEKYPTIYHLRKKLVDSTDKADLRLIYLALAHMIKFRGHFLIEGDLNPDNSDVDKLFIQLVQTYNQLFEENPINASGVDAKAILSARLSKSRRLENLIAQLPGEKKNGLFGNLIALSLGLTPNFKSNFDLAEDAKLQLSKDTYDDDLDNLLAQIGDQYADLFLAAKNLSDAILLSDILRVNTEITKAPLSASMIKRYDEHHQDLTLLKALVRQQLPEKYKEIFFDQSKNGYAGYIDGGASQEEFYKFIKPILEKMDGTEELLVKLNREDLLRKQRTFDNGSIPHQIHLGELHAILRRQEDFYPFLKDNREKIEKILTFRIPYYVGPLARGNSRFAWMTRKSEETITPWNFEEVVDKGASAQSFIERMTNFDKNLPNEKVLPKHSLLYEYFTVYNELTKVKYVTEGMRKPAFLSGEQKKAIVDLLFKTNRKVTVKQLKEDYFKKIECFDSVEISGVEDRFNASLGTYHDLLKIIKDKDFLDNEENEDILEDIVLTLTLFEDREMIEERLKTYAHLFDDKVMKQLKRRRYTGWGRLSRKLINGIRDKQSGKTILDFLKSDGFANRNFMQLIHDDSLTFKEDIQKAQVSGQGDSLHEHIANLAGSPAIKKGILQTVKVVDELVKVMGRHKPENIVIEMARENQTTQKGQKNSRERMKRIEEGIKELGSQILKEHPVENTQLQNEKLYLYYLQNGRDMYVDQELDINRLSDYDVDHIVPQSFLKDDSIDNKVLTRSDKARGKSDNVPSEEVVKKMKNYWRQLLNAKLITQRKFDNLTKAERGGLSELDKAGFIKRQLVETRQITKHVAQILDSRMNTKYDENDKLIREVKVITLKSKLVSDFRKDFQFYKVREINNYHHAHDAYLNAVVGTALIKKYPKLESEFVYGDYKVYDVRKMIAKSEQEIGKATAKYFFYSNIMNFFKTEITLANGEIRKRPLIETNGETGEIVWDKGRDFATVRKVLSMPQVNIVKKTEVQTGGFSKESILPKRNSDKLIARKKDWDPKKYGGFDSPTVAYSVLVVAKVEKGKSKKLKSVKELLGITIMERSSFEKNPIDFLEAKGYKEVKKDLIIKLPKYSLFELENGRKRMLASAGELQKGNELALPSKYVNFLYLASHYEKLKGSPEDNEQKQLFVEQHKHYLDEIIEQISEFSKRVILADANLDKVLSAYNKHRDKPIREQAENIIHLFTLTNLGAPAAFKYFDTTIDRKRYTSTKEVLDATLIHQSITGLYETRIDLSQLGGDGGGSSGGGGGSGGTLNIEDEYRLHETSKEPDVPLGSTWLSDFPQAWAETGGMGLAVRQAPLIIPLKATSTPVSIKQYPMSQEARLGIKPHIQRLLDQGILVPCQSPWNTPLLPVKKPGTNDYRPVQDLREVNKRVEDIHPTVPNPYNLLSGLPPSHQWYTVLDLKDAFFCLRLHPTSQPLFAFEWRDPEMGISGQLTWTRLPQGFKNSPTLFNEALHRDLADFRIQHPDLILLQYVDDLLLAATSEQDCQRGTRALLQTLGNLGYRASAKKAQICQKQVKYLGYLLKEGQRWLTEARKETVMGQPTPKTPRQLREFLGTAGFCRLWIPGFAEMAAPLYPLTKPGTLFNWGPDQQKAYQEIKQALLTAPALGLPDLTKPFELFVDEKQGYAKGVLTQKLGPWRRPVAYLSKKLDPVAAGWPPCLRMVAAIAVLTKDAGKLTMGQPLVILAPHAVEALVKQPPDRWLSNARMTHYQAMLLDTDRVQFGPVVALNPATLLPLPEKEAPHDCLEILAETHGTRPDLTDQPIPDADYTWYTDGSSFLQEGQRRAGAAVTTETEVIWARALPAGTSAQRAELIALTQALKMAEGKKLNVYTDSRYAFATAHVHGEIYRRRGWLTSEGREIKNKNEILALLKALFLPKRLSIIHCPGHQKGNSAEARGNRMADQAAREAAMKAVLETSTLLAGKRTADGSEFEKRTADGSEFESPKKKAKVE

SEQ ID NO: 6883 - protein, 2094 aa, synthetic construct; identical to SEQ ID NO: 4518

SEQ ID NO: 6884 - protein, 2098 aa, synthetic construct
MPAAKRVKLDGGDKKYSIGLDIGTNSVGWAVITDEYKVPSKKFKVLGNTDRHSIKKNLIGALLFDSGETAEATRLKRTARRRYTRRKNRICYLQEIFSNEMAKVDDSFFHRLEESFLVEEDKKHERHPIFGNIVDEVAYHEKYPTIYHLRKKLVDSTDKADLRLIYLALAHMIKFRGHFLIEGDLNPDNSDVDKLFIQLVQTYNQLFEENPINASGVDAKAILSARLSKSRRLENLIAQLPGEKKNGLFGNLIALSLGLTPNFKSNFDLAEDAKLQLSKDTYDDDLDNLLAQIGDQYADLFLAAKNLSDAILLSDILRVNTEITKAPLSASMIKRYDEHHQDLTLLKALVRQQLPEKYKEIFFDQSKNGYAGYIDGGASQEEFYKFIKPILEKMDGTEELLVKLNREDLLRKQRTFDNGSIPHQIHLGELHAILRRQEDFYPFLKDNREKIEKILTFRIPYYVGPLARGNSRFAWMTRKSEETITPWNFEEVVDKGASAQSFIERMTNFDKNLPNEKVLPKHSLLYEYFTVYNELTKVKYVTEGMRKPAFLSGEQKKAIVDLLFKTNRKVTVKQLKEDYFKKIECFDSVEISGVEDRFNASLGTYHDLLKIIKDKDFLDNEENEDILEDIVLTLTLFEDREMIEERLKTYAHLFDDKVMKQLKRRRYTGWGRLSRKLINGIRDKQSGKTILDFLKSDGFANRNFMQLIHDDSLTFKEDIQKAQVSGQGDSLHEHIANLAGSPAIKKGILQTVKVVDELVKVMGRHKPENIVIEMARENQTTQKGQKNSRERMKRIEEGIKELGSQILKEHPVENTQLQNEKLYLYYLQNGRDMYVDQELDINRLSDYDVDHIVPQSFLKDDSIDNKVLTRSDKARGKSDNVPSEEVVKKMKNYWRQLLNAKLITQRKFDNLTKAERGGLSELDKAGFIKRQLVETRQITKHVAQILDSRMNTKYDENDKLIREVKVITLKSKLVSDFRKDFQFYKVREINNYHHAHDAYLNAVVGTALIKKYPKLESEFVYGDYKVYDVRKMIAKSEQEIGKATAKYFFYSNIMNFFKTEITLANGEIRKRPLIETNGETGEIVWDKGRDFATVRKVLSMPQVNIVKKTEVQTGGFSKESILPKRNSDKLIARKKDWDPKKYGGFDSPTVAYSVLVVAKVEKGKSKKLKSVKELLGITIMERSSFEKNPIDFLEAKGYKEVKKDLIIKLPKYSLFELENGRKRMLASAGELQKGNELALPSKYVNFLYLASHYEKLKGSPEDNEQKQLFVEQHKHYLDEIIEQISEFSKRVILADANLDKVLSAYNKHRDKPIREQAENIIHLFTLTNLGAPAAFKYFDTTIDRKRYTSTKEVLDATLIHQSITGLYETRIDLSQLGGDGGGGSGGGEAAAKGGTAPLEEEYRLFLEAPIQNVTLLEQWKREIPKVWAEINPPGLASTQAPIHVQLLSTALPVRVRQYPITLEAKRSLRETIRKFRAAGILRPVHSPWNTPLLPVRKSGTSEYRMVQDLREVNKRVETIHPTVPNPYTLLSLLPPDRIWYSVLDLKDAFFCIPLAPESQLIFAFEWADAEEGESGQLTWTRLPQGFKNSPTLFDEALNRDLQGFRLDHPSVSLLQYVDDLLIAADTQAACLSATRDLLMTLAELGYRVSGKKAQLCQEEVTYLGFKIHKGSRSLSNSRTQAILQIPVPKTKRQVREFLGTIGYCRLWIPGFAELAQPLYAATRGGNDPLVWGEKEEEAFQSLKLALTQPPALALPSLDKPFQLFVEETSGAAKGVLTQALGPWKRPVAYLSKRLDPVAAGWPRCLRAIAAAALLTREASKLTFGQDIEITSSHNLESLLRSPPDKWLTNARITQYQVLLLDPPRVRFKQTAALNPATLLPETDDTLPIHHCLDTLDSLTSTRPDLTDQPLAQAEATLFTDGSSYIRDGKRYAGAAVVTLDSVIWAEPLPIGTSAQKAELIALTKALEWSKDKSVNIYTDSRYAFATLHVHGMIYRERGLLTAGGKAIKNAPEILALLTAVWLPKRVAVMHCKGHQKDDAPTSTGNRRADEVAREVAIRPLSTQATISAGKRTADGSEFEKRTADGSEFESPKKKAKVE

SEQ ID NO: 6885 - protein, 2098 aa, synthetic construct
MPAAKRVKLDGGDKKYSIGLDIGTNSVGWAVITDEYKVPSKKFKVLGNTDRHSIKKNLIGALLFDSGETAEATRLKRTARRRYTRRKNRICYLQEIFSNEMAKVDDSFFHRLEESFLVEEDKKHERHPIFGNIVDEVAYHEKYPTIYHLRKKLVDSTDKADLRLIYLALAHMIKFRGHFLIEGDLNPDNSDVDKLFIQLVQTYNQLFEENPINASGVDAKAILSARLSKSRRLENLIAQLPGEKKNGLFGNLIALSLGLTPNFKSNFDLAEDAKLQLSKDTYDDDLDNLLAQIGDQYADLFLAAKNLSDAILLSDILRVNTEITKAPLSASMIKRYDEHHQDLTLLKALVRQQLPEKYKEIFFDQSKNGYAGYIDGGASQEEFYKFIKPILEKMDGTEELLVKLNREDLLRKQRTFDNGSIPHQIHLGELHAILRRQEDFYPFLKDNREKIEKILTFRIPYYVGPLARGNSRFAWMTRKSEETITPWNFEEVVDKGASAQSFIERMTNFDKNLPNEKVLPKHSLLYEYFTVYNELTKVKYVTEGMRKPAFLSGEQKKAIVDLLFKTNRKVTVKQLKEDYFKKIECFDSVEISGVEDRFNASLGTYHDLLKIIKDKDFLDNEENEDILEDIVLTLTLFEDREMIEERLKTYAHLFDDKVMKQLKRRRYTGWGRLSRKLINGIRDKQSGKTILDFLKSDGFANRNFMQLIHDDSLTFKEDIQKAQVSGQGDSLHEHIANLAGSPAIKKGILQTVKVVDELVKVMGRHKPENIVIEMARENQTTQKGQKNSRERMKRIEEGIKELGSQILKEHPVENTQLQNEKLYLYYLQNGRDMYVDQELDINRLSDYDVDHIVPQSFLKDDSIDNKVLTRSDKARGKSDNVPSEEVVKKMKNYWRQLLNAKLITQRKFDNLTKAERGGLSELDKAGFIKRQLVETRQITKHVAQILDSRMNTKYDENDKLIREVKVITLKSKLVSDFRKDFQFYKVREINNYHHAHDAYLNAVVGTALIKKYPKLESEFVYGDYKVYDVRKMIAKSEQEIGKATAKYFFYSNIMNFFKTEITLANGEIRKRPLIETNGETGEIVWDKGRDFATVRKVLSMPQVNIVKKTEVQTGGFSKESILPKRNSDKLIARKKDWDPKKYGGFDSPTVAYSVLVVAKVEKGKSKKLKSVKELLGITIMERSSFEKNPIDFLEAKGYKEVKKDLIIKLPKYSLFELENGRKRMLASAGELQKGNELALPSKYVNFLYLASHYEKLKGSPEDNEQKQLFVEQHKHYLDEIIEQISEFSKRVILADANLDKVLSAYNKHRDKPIREQAENIIHLFTLTNLGAPAAFKYFDTTIDRKRYTSTKEVLDATLIHQSITGLYETRIDLSQLGGDGGGGSGGGEAAAKGGTAPLEEEYRLFLEAPIQNVTLLEQWKREIPKVWAEINPPGLASTQAPIHVQLLSTALPVRVRQYPITLEAKRSLRETIRKFRAAGILRPVHSPWNTPLLPVRKSGTSEYRMVQDLREVNKRVETIHPTVPNPYTLLSLLPPDRIWYSVLDLKDAFFCIPLAPESQLIFAFEWADAEEGESGQLTWTRLPQGFKNSPTLFNEALNRDLQGFRLDHPSVSLLQYVDDLLIAADTQAACLSATRDLLMTLAELGYRVSGKKAQLCQEEVTYLGFKIHKGSRSLSNSRTQAILQIPVPKTKRQVREFLGTIGYCRLWIPGFAELAQPLYAATRPGNDPLVWGEKEEEAFQSLKLALTQPPALALPSLDKPFQLFVEETSGAAKGVLTQALGPWKRPVAYLSKRLDPVAAGWPRCLRAIAAAALLTREASKLTFGQDIEITSSHNLESLLRSPPDKWLTNARITQYQVLLLDPPRVRFKQTAALNPATLLPETDDTLPIHHCLDTLDSLTSTRPDLTDQPLAQAEATLFTDGSSYIRDGKRYAGAAVVTLDSVIWAEPLPIGTSAQKAELIALTKALEWSKDKSVNIYTDSRYAFATLHVHGMIYRERGWLTAGGKAIKNAPEILALLTAVWLPKRVAVMHCKGHQKDDAPTSTGNRRADEVAREVAIRPLSTQATISAGKRTADGSEFEKRTADGSEFESPKKKAKVE

SEQ ID NO: 6886 - protein, 2102 aa, synthetic construct
MPAAKRVKLDGGDKKYSIGLDIGTNSVGWAVITDEYKVPSKKFKVLGNTDRHSIKKNLIGALLFDSGETAEATRLKRTARRRYTRRKNRICYLQEIFSNEMAKVDDSFFHRLEESFLVEEDKKHERHPIFGNIVDEVAYHEKYPTIYHLRKKLVDSTDKADLRLIYLALAHMIKFRGHFLIEGDLNPDNSDVDKLFIQLVQTYNQLFEENPINASGVDAKAILSARLSKSRRLENLIAQLPGEKKNGLFGNLIALSLGLTPNFKSNFDLAEDAKLQLSKDTYDDDLDNLLAQIGDQYADLFLAAKNLSDAILLSDILRVNTEITKAPLSASMIKRYDEHHQDLTLLKALVRQQLPEKYKEIFFDQSKNGYAGYIDGGASQEEFYKFIKPILEKMDGTEELLVKLNREDLLRKQRTFDNGSIPHQIHLGELHAILRRQEDFYPFLKDNREKIEKILTFRIPYYVGPLARGNSRFAWMTRKSEETITPWNFEEVVDKGASAQSFIERMTNFDKNLPNEKVLPKHSLLYEYFTVYNELTKVKYVTEGMRKPAFLSGEQKKAIVDLLFKTNRKVTVKQLKEDYFKKIECFDSVEISGVEDRFNASLGTYHDLLKIIKDKDFLDNEENEDILEDIVLTLTLFEDREMIEERLKTYAHLFDDKVMKQLKRRRYTGWGRLSRKLINGIRDKQSGKTILDFLKSDGFANRNFMQLIHDDSLTFKEDIQKAQVSGQGDSLHEHIANLAGSPAIKKGILQTVKVVDELVKVMGRHKPENIVIEMARENQTTQKGQKNSRERMKRIEEGIKELGSQILKEHPVENTQLQNEKLYLYYLQNGRDMYVDQELDINRLSDYDVDHIVPQSFLKDDSIDNKVLTRSDKARGKSDNVPSEEVVKKMKNYWRQLLNAKLITQRKFDNLTKAERGGLSELDKAGFIKRQLVETRQITKHVAQILDSRMNTKYDENDKLIREVKVITLKSKLVSDFRKDFQFYKVREINNYHHAHDAYLNAVVGTALIKKYPKLESEFVYGDYKVYDVRKMIAKSEQEIGKATAKYFFYSNIMNFFKTEITLANGEIRKRPLIETNGETGEIVWDKGRDFATVRKVLSMPQVNIVKKTEVQTGGFSKESILPKRNSDKLIARKKDWDPKKYGGFDSPTVAYSVLVVAKVEKGKSKKLKSVKELLGITIMERSSFEKNPIDFLEAKGYKEVKKDLIIKLPKYSLFELENGRKRMLASAGELQKGNELALPSKYVNFLYLASHYEKLKGSPEDNEQKQLFVEQHKHYLDEIIEQISEFSKRVILADANLDKVLSAYNKHRDKPIREQAENIIHLFTLTNLGAPAAFKYFDTTIDRKRYTSTKEVLDATLIHQSITGLYETRIDLSQLGGDGGGGSGGGEAAAKGGTVSLQDEHRLFDIPVTTSLPDVWLQDFPQAWAETGGLGRAKCQAPIIIDLKPTAVPVSIKQYPMSLEAHMGIRQHIIKFLELGVLRPCRSPWNTPLLPVKKPGTQDYRPVQDLREINKRTVDIHPTVPNPYNLLSTLKPDYSWYTVLDLKDAFFCLPLAPQSQELFAFEWKDPERGISGQLTWTRLPQGFKNSPTLFNEALHRDLTDFRTQHPEVTLLQYVDDLLLAAPTKKACTQGTRHLLQELGEKGYRASAKKAQICQTKVTYLGYILSEGKRWLTPGRIETVARIPPPRNPREVREFLGTAGFCRLWIPGFAELAAPLYALTKPSTPFTWQTEHQLAFEALKKALLSAPALGLPDTSKPFTLFLDERQGIAKGVLTQKLGPWKRPVAYLSKKLDPVAAGWPPCLRIMAATAMLVKDSAKLTLGQPLTVITPHTLEAIVRQPPDRWITNARLTHYQALLLDTDRVQFGPPVTLNPATLLPVPENQPSPHDCRQVLAETHGTREDLKDQELPDADHTWYTDGSSYLDSGTRRAGAAVVDGHNTIWAQSLPPGTSAQKAELIALTKALELSKGKKANIYTDSRYAFATAHTHGSIYERRGWLTSEGKEIKNKAEIIALLKALFLPQEVAIIHCPGHQKGQDPVAVGNRQADRVARQAAMAEVLTLATEPDNTSHITAGKRTADGSEFEKRTADGSEFESPKKKAKVE

SEQ ID NO: 6887 - protein, 2173 aa, synthetic construct
MPAAKRVKLDGGDKKYSIGLDIGTNSVGWAVITDEYKVPSKKFKVLGNTDRHSIKKNLIGALLFDSGETAEATRLKRTARRRYTRRKNRICYLQEIFSNEMAKVDDSFFHRLEESFLVEEDKKHERHPIFGNIVDEVAYHEKYPTIYHLRKKLVDSTDKADLRLIYLALAHMIKFRGHFLIEGDLNPDNSDVDKLFIQLVQTYNQLFEENPINASGVDAKAILSARLSKSRRLENLIAQLPGEKKNGLFGNLIALSLGLTPNFKSNFDLAEDAKLQLSKDTYDDDLDNLLAQIGDQYADLFLAAKNLSDAILLSDILRVNTEITKAPLSASMIKRYDEHHQDLTLLKALVRQQLPEKYKEIFFDQSKNGYAGYIDGGASQEEFYKFIKPILEKMDGTEELLVKLNREDLLRKQRTFDNGSIPHQIHLGELHAILRRQEDFYPFLKDNREKIEKILTFRIPYYVGPLARGNSRFAWMTRKSEETITPWNFEEVVDKGASAQSFIERMTNFDKNLPNEKVLPKHSLLYEYFTVYNELTKVKYVTEGMRKPAFLSGEQKKAIVDLLFKTNRKVTVKQLKEDYFKKIECFDSVEISGVEDRFNASLGTYHDLLKIIKDKDFLDNEENEDILEDIVLTLTLFEDREMIEERLKTYAHLFDDKVMKQLKRRRYTGWGRLSRKLINGIRDKQSGKTILDFLKSDGFANRNFMQLIHDDSLTFKEDIQKAQVSGQGDSLHEHIANLAGSPAIKKGILQTVKVVDELVKVMGRHKPENIVIEMARENQTTQKGQKNSRERMKRIEEGIKELGSQILKEHPVENTQLQNEKLYLYYLQNGRDMYVDQELDINRLSDYDVDHIVPQSFLKDDSIDNKVLTRSDKARGKSDNVPSEEVVKKMKNYWRQLLNAKLITQRKFDNLTKAERGGLSELDKAGFIKRQLVETRQITKHVAQILDSRMNTKYDENDKLIREVKVITLKSKLVSDFRKDFQFYKVREINNYHHAHDAYLNAVVGTALIKKYPKLESEFVYGDYKVYDVRKMIAKSEQEIGKATAKYFFYSNIMNFFKTEITLANGEIRKRPLIETNGETGEIVWDKGRDFATVRKVLSMPQVNIVKKTEVQTGGFSKESILPKRNSDKLIARKKDWDPKKYGGFDSPTVAYSVLVVAKVEKGKSKKLKSVKELLGITIMERSSFEKNPIDFLEAKGYKEVKKDLIIKLPKYSLFELENGRKRMLASAGELQKGNELALPSKYVNFLYLASHYEKLKGSPEDNEQKQLFVEQHKHYLDEIIEQISEFSKRVILADANLDKVLSAYNKHRDKPIREQAENIIHLFTLTNLGAPAAFKYFDTTIDRKRYTSTKEVLDATLIHQSITGLYETRIDLSQLGGDGGGGSGGGEAAAKGGMDLLKPLTVERKGVKIKGYWNSQADITCVPKDLLQGEEPVRQQNVTTIHGTQEGDVYYVNLKIDGRRINTEVIGTTLDYAIITPGDVPWILKKPLELTIKLDLEEQQGTLLNNSILSKKGKEELKQLFEKYSALWQSWENQVGHRRIRPHKIATGTVKPTPQKQYHINPKAKPDIQIVINDLLKQGVLIQKESTMNTPVYPVPKPNGRWRMVLDYRAVNKVTPLIAVQNQHSYGILGSLFKGRYKTTIDLSNGFWAHPIVPEDYWITAFTWQGKQYCWTVLPQGFLNSPGLFTGDVVDLLQGIPNVEVYVDDVYISHDSEKEHLEYLDILFNRLKEAGYIISLKKSNIANSIVDFLGFQITNEGRGLTDTFKEKLENITAPTTLKQLQSILGLLNFARNFIPDFTELIAPLYALIPKSTKNYVPWQIEHSTTLETLITKLNGAEYLQGRKGDKTLIMKVNASYTTGYIRYYNEGEKKPISYVSIVFSKTELKFTELEKLLTTVHKGLLKALDLSMGQNIHVYSPIVSMQNIQKTPQTAKKALASRWLSWLSYLEDPRIRFFYDPQMPALKDLPAVDTGKDNKKHPSNFQHIFYTDGSAITSPTKEGHLNAGMGIVYFINKDGNLQKQQEWSISLGNHTAQFAEIAAFEFALKKCLPLGGNILVVTDSNYVAKAYNEELDVWASNGFVNNRKKPLKHISKWKSVADLKRLRPDVVVTHEPGHQKLDSSPHAYGNNLADQLATQASFKVHAGKRTADGSEFEKRTADGSEFESPKKKAKVE

SEQ ID NO: 6888 - protein, 2173 aa, synthetic construct
MPAAKRVKLDGGDKKYSIGLDIGTNSVGWAVITDEYKVPSKKFKVLGNTDRHSIKKNLIGALLFDSGETAEATRLKRTARRRYTRRKNRICYLQEIFSNEMAKVDDSFFHRLEESFLVEEDKKHERHPIFGNIVDEVAYHEKYPTIYHLRKKLVDSTDKADLRLIYLALAHMIKFRGHFLIEGDLNPDNSDVDKLFIQLVQTYNQLFEENPINASGVDAKAILSARLSKSRRLENLIAQLPGEKKNGLFGNLIALSLGLTPNFKSNFDLAEDAKLQLSKDTYDDDLDNLLAQIGDQYADLFLAAKNLSDAILLSDILRVNTEITKAPLSASMIKRYDEHHQDLTLLKALVRQQLPEKYKEIFFDQSKNGYAGYIDGGASQEEFYKFIKPILEKMDGTEELLVKLNREDLLRKQRTFDNGSIPHQIHLGELHAILRRQEDFYPFLKDNREKIEKILTFRIPYYVGPLARGNSRFAWMTRKSEETITPWNFEEVVDKGASAQSFIERMTNFDKNLPNEKVLPKHSLLYEYFTVYNELTKVKYVTEGMRKPAFLSGEQKKAIVDLLFKTNRKVTVKQLKEDYFKKIECFDSVEISGVEDRFNASLGTYHDLLKIIKDKDFLDNEENEDILEDIVLTLTLFEDREMIEERLKTYAHLFDDKVMKQLKRRRYTGWGRLSRKLINGIRDKQSGKTILDFLKSDGFANRNFMQLIHDDSLTFKEDIQKAQVSGQGDSLHEHIANLAGSPAIKKGILQTVKVVDELVKVMGRHKPENIVIEMARENQTTQKGQKNSRERMKRIEEGIKELGSQILKEHPVENTQLQNEKLYLYYLQNGRDMYVDQELDINRLSDYDVDHIVPQSFLKDDSIDNKVLTRSDKARGKSDNVPSEEVVKKMKNYWRQLLNAKLITQRKFDNLTKAERGGLSELDKAGFIKRQLVETRQITKHVAQILDSRMNTKYDENDKLIREVKVITLKSKLVSDFRKDFQFYKVREINNYHHAHDAYLNAVVGTALIKKYPKLESEFVYGDYKVYDVRKMIAKSEQEIGKATAKYFFYSNIMNFFKTEITLANGEIRKRPLIETNGETGEIVWDKGRDFATVRKVLSMPQVNIVKKTEVQTGGFSKESILPKRNSDKLIARKKDWDPKKYGGFDSPTVAYSVLVVAKVEKGKSKKLKSVKELLGITIMERSSFEKNPIDFLEAKGYKEVKKDLIIKLPKYSLFELENGRKRMLASAGELQKGNELALPSKYVNFLYLASHYEKLKGSPEDNEQKQLFVEQHKHYLDEIIEQISEFSKRVILADANLDKVLSAYNKHRDKPIREQAENIIHLFTLTNLGAPAAFKYFDTTIDRKRYTSTKEVLDATLIHQSITGLYETRIDLSQLGGDGGGGSGGGEAAAKGGMDLLKPLTVERKGVKIKGYWNSQADITCVPKDLLQGEEPVRQQNVTTIHGTQEGDVYYVNLKIDGRRINTEVIGTTLDYAIITPGDVPWILKKPLELTIKLDLEEQQGTLLNNSILSKKGKEELKQLFEKYSALWQSWENQVGHRRIRPHKIATGTVKPTPQKQYHINPKAKPDIQIVINDLLKQGVLIQKESTMNTPVYPVPKPNGRWRMVLDYRAVNKVTPLIAVQNQHSYGILGSLFKGRYKTTIDLSNGFWAHPIVPEDYWITAFTWQGKQYCWTVLPQGFLNSPGLFNGDVVDLLQGIPNVEVYVDDVYISHDSEKEHLEYLDILFNRLKEAGYIISLKKSNIANSIVDFLGFQITNEGRGLTDTFKEKLENITAPTTLKQLQSILGLLNFARNFIPDFTELIAPLYALIPKSPKNYVPWQIEHSTTLETLITKLNGAEYLQGRKGDKTLIMKVNASYTTGYIRYYNEGEKKPISYVSIVFSKTELKFTELEKLLTTVHKGLLKALDLSMGQNIHVYSPIVSMQNIQKTPQTAKKALASRWLSWLSYLEDPRIRFFYDPQMPALKDLPAVDTGKDNKKHPSNFQHIFYTDGSAITSPTKEGHLNAGMGIVYFINKDGNLQKQQEWSISLGNHTAQFAEIAAFEFALKKCLPLGGNILVVTDSNYVAKAYNEELDVWASNGFVNNRKKPLKHISKWKSVADLKRLRPDVVVTHEPGHQKLDSSPHAYGNNLADQLATQASFKVHAGKRTADGSEFEKRTADGSEFESPKKKAKVE

SEQ ID NO: 6889 - protein, 2095 aa, synthetic construct
MPAAKRVKLDGGDKKYSIGLDIGTNSVGWAVITDEYKVPSKKFKVLGNTDRHSIKKNLIGALLFDSGETAEATRLKRTARRRYTRRKNRICYLQEIFSNEMAKVDDSFFHRLEESFLVEEDKKHERHPIFGNIVDEVAYHEKYPTIYHLRKKLVDSTDKADLRLIYLALAHMIKFRGHFLIEGDLNPDNSDVDKLFIQLVQTYNQLFEENPINASGVDAKAILSARLSKSRRLENLIAQLPGEKKNGLFGNLIALSLGLTPNFKSNFDLAEDAKLQLSKDTYDDDLDNLLAQIGDQYADLFLAAKNLSDAILLSDILRVNTEITKAPLSASMIKRYDEHHQDLTLLKALVRQQLPEKYKEIFFDQSKNGYAGYIDGGASQEEFYKFIKPILEKMDGTEELLVKLNREDLLRKQRTFDNGSIPHQIHLGELHAILRRQEDFYPFLKDNREKIEKILTFRIPYYVGPLARGNSRFAWMTRKSEETITPWNFEEVVDKGASAQSFIERMTNFDKNLPNEKVLPKHSLLYEYFTVYNELTKVKYVTEGMRKPAFLSGEQKKAIVDLLFKTNRKVTVKQLKEDYFKKIECFDSVEISGVEDRFNASLGTYHDLLKIIKDKDFLDNEENEDILEDIVLTLTLFEDREMIEERLKTYAHLFDDKVMKQLKRRRYTGWGRLSRKLINGIRDKQSGKTILDFLKSDGFANRNFMQLIHDDSLTFKEDIQKAQVSGQGDSLHEHIANLAGSPAIKKGILQTVKVVDELVKVMGRHKPENIVIEMARENQTTQKGQKNSRERMKRIEEGIKELGSQILKEHPVENTQLQNEKLYLYYLQNGRDMYVDQELDINRLSDYDVDHIVPQSFLKDDSIDNKVLTRSDKARGKSDNVPSEEVVKKMKNYWRQLLNAKLITQRKFDNLTKAERGGLSELDKAGFIKRQLVETRQITKHVAQILDSRMNTKYDENDKLIREVKVITLKSKLVSDFRKDFQFYKVREINNYHHAHDAYLNAVVGTALIKKYPKLESEFVYGDYKVYDVRKMIAKSEQEIGKATAKYFFYSNIMNFFKTEITLANGEIRKRPLIETNGETGEIVWDKGRDFATVRKVLSMPQVNIVKKTEVQTGGFSKESILPKRNSDKLIARKKDWDPKKYGGFDSPTVAYSVLVVAKVEKGKSKKLKSVKELLGITIMERSSFEKNPIDFLEAKGYKEVKKDLIIKLPKYSLFELENGRKRMLASAGELQKGNELALPSKYVNFLYLASHYEKLKGSPEDNEQKQLFVEQHKHYLDEIIEQISEFSKRVILADANLDKVLSAYNKHRDKPIREQAENIIHLFTLTNLGAPAAFKYFDTTIDRKRYTSTKEVLDATLIHQSITGLYETRIDLSQLGGDGGGGSGGGEAAAKGGTLQLEEEYRLFEPESTQKQEMDIWLKNFPQAWAETGGMGTAHCQAPVLIQLKATATPISIRQYPMPHEAYQGIKPHIRRMLDQGILKPCQSPWNTPLLPVKKPGTEDYRPVQDLREVNKRVEDIHPTVPNPYNLLSTLPPSHPWYTVLDLKDAFFCLRLHSESQLLFAFEWRDPEIGLSGQLTWTRLPQGFKNSPTLFNEALHSDLADFRVRYPALVLLQYVDDLLLAAATRTECLEGTKALLETLGNKGYRASAKKAQICLQEVTYLGYSLKDGQRWLTKARKEAILSIPVPKNSRQVREFLGTAGYCRLWIPGFAELAAPLYPLTRPGTLFQWGTEQQLAFEDIKKALLSSPALGLPDITKPFELFIDENSGFAKGVLVQKLGPWKRPVAYLSKKLDTVASGWPPCLRMVAAIAILVKDAGKLTLGQPLTILTSHPVEALVRQPPNKWLSNARMTHYQAMLLDAERVHFGPTVSLNPATLLPLPSGGNHHDCLQILAETHGTRPDLTDQPLPDADLTWYTDGSSFIRNGEREAGAAVTTESEVIWAAPLPPGTSAQRAELIALTQALKMAEGKKLTVYTDSRYAFATTHVHGEIYRRRGWLTSEGKEIKNKNEILALLEALFLPKRLSIIHCPGHQKGDSPQAKGNRLADDTAKKAATETHSSLTVLPAGKRTADGSEFEKRTADGSEFESPKKKAKVE

SEQ ID NO: 6890 - protein, 2127 aa, synthetic construct
MPAAKRVKLDGGDKKYSIGLDIGTNSVGWAVITDEYKVPSKKFKVLGNTDRHSIKKNLIGALLFDSGETAEATRLKRTARRRYTRRKNRICYLQEIFSNEMAKVDDSFFHRLEESFLVEEDKKHERHPIFGNIVDEVAYHEKYPTIYHLRKKLVDSTDKADLRLIYLALAHMIKFRGHFLIEGDLNPDNSDVDKLFIQLVQTYNQLFEENPINASGVDAKAILSARLSKSRRLENLIAQLPGEKKNGLFGNLIALSLGLTPNFKSNFDLAEDAKLQLSKDTYDDDLDNLLAQIGDQYADLFLAAKNLSDAILLSDILRVNTEITKAPLSASMIKRYDEHHQDLTLLKALVRQQLPEKYKEIFFDQSKNGYAGYIDGGASQEEFYKFIKPILEKMDGTEELLVKLNREDLLRKQRTFDNGSIPHQIHLGELHAILRRQEDFYPFLKDNREKIEKILTFRIPYYVGPLARGNSRFAWMTRKSEETITPWNFEEVVDKGASAQSFIERMTNFDKNLPNEKVLPKHSLLYEYFTVYNELTKVKYVTEGMRKPAFLSGEQKKAIVDLLFKTNRKVTVKQLKEDYFKKIECFDSVEISGVEDRFNASLGTYHDLLKIIKDKDFLDNEENEDILEDIVLTLTLFEDREMIEERLKTYAHLFDDKVMKQLKRRRYTGWGRLSRKLINGIRDKQSGKTILDFLKSDGFANRNFMQLIHDDSLTFKEDIQKAQVSGQGDSLHEHIANLAGSPAIKKGILQTVKVVDELVKVMGRHKPENIVIEMARENQTTQKGQKNSRERMKRIEEGIKELGSQILKEHPVENTQLQNEKLYLYYLQNGRDMYVDQELDINRLSDYDVDHIVPQSFLKDDSIDNKVLTRSDKARGKSDNVPSEEVVKKMKNYWRQLLNAKLITQRKFDNLTKAERGGLSELDKAGFIKRQLVETRQITKHVAQILDSRMNTKYDENDKLIREVKVITLKSKLVSDFRKDFQFYKVREINNYHHAHDAYLNAVVGTALIKKYPKLESEFVYGDYKVYDVRKMIAKSEQEIGKATAKYFFYSNIMNFFKTEITLANGEIRKRPLIETNGETGEIVWDKGRDFATVRKVLSMPQVNIVKKTEVQTGGFSKESILPKRNSDKLIARKKDWDPKKYGGFDSPTVAYSVLVVAKVEKGKSKKLKSVKELLGITIMERSSFEKNPIDFLEAKGYKEVKKDLIIKLPKYSLFELENGRKRMLASAGELQKGNELALPSKYVNFLYLASHYEKLKGSPEDNEQKQLFVEQHKHYLDEIIEQISEFSKRVILADANLDKVLSAYNKHRDKPIREQAENIIHLFTLTNLGAPAAFKYFDTTIDRKRYTSTKEVLDATLIHQSITGLYETRIDLSQLGGDGGGGSGGGEAAAKGGLLGRDLLTKLKAQIQFSTEGPQVTWEDRPAMCLVLNLEEEYRLHEKPVPPSIDPSWLQLFPMVWAEKAGMGLANQVPPVVVELKSDASPVAVRQYPMSKEAREGIRPHIQRFLDLGILVPCQSPWNTPLLPVKKPGTNDYRPVQDLREVNKRVQDIHPTVPNPYNLLSSLPPSHTWYSVLDLKDAFFCLKLHPNSQPLFAFEWRDPEKGNTGQLTWTRLPQGFKNSPTLFDEALHRDLASFRALNPQVVMLQYVDDLLVAAPTYRDCKEGTRRLLQELSKLGYRVSAKKAQLCREEVTYLGYLLKGGKRWLTPARKATVMKIPTPTTPRQVREFLGTAGFCRLWIPGFASLAAPLYPLTREKVPFTWTEAHQEAFGRIKEALLSAPALALPDLTKPFALYVDEKEGVARGVLTQTLGPWRRPVAYLSKKLDPVASGWPTCLKAIAAVALLLKDADKLTLGQNVLVIAPHNLESIVRQPPDRWMTNARMTHYQSLLLNERVSFAPPAILNPATLLPVESDDTPIHICSEILAEETGTRPDLRDQPLPGVPAWYTDGSSFIMDGRRQAGAAIVDNKRTVWASNLPEGTSAQKAELIALTQALRLAEGKSINIYTDSRYAFATAHVHGAIYKQRGLLTSAGKDIKNKEEILALLEAIHLPKRVAIIHCPGHQRGTDPVATGNRKADEAAKQAAQSTRILTETTKNAGKRTADGSEFEKRTADGSEFESPKKKAKVE

SEQ ID NO: 6891 - protein, 2218 aa, synthetic construct
MPAAKRVKLDGGDKKYSIGLDIGTNSVGWAVITDEYKVPSKKFKVLGNTDRHSIKKNLIGALLFDSGETAEATRLKRTARRRYTRRKNRICYLQEIFSNEMAKVDDSFFHRLEESFLVEEDKKHERHPIFGNIVDEVAYHEKYPTIYHLRKKLVDSTDKADLRLIYLALAHMIKFRGHFLIEGDLNPDNSDVDKLFIQLVQTYNQLFEENPINASGVDAKAILSARLSKSRRLENLIAQLPGEKKNGLFGNLIALSLGLTPNFKSNFDLAEDAKLQLSKDTYDDDLDNLLAQIGDQYADLFLAAKNLSDAILLSDILRVNTEITKAPLSASMIKRYDEHHQDLTLLKALVRQQLPEKYKEIFFDQSKNGYAGYIDGGASQEEFYKFIKPILEKMDGTEELLVKLNREDLLRKQRTFDNGSIPHQIHLGELHAILRRQEDFYPFLKDNREKIEKILTFRIPYYVGPLARGNSRFAWMTRKSEETITPWNFEEVVDKGASAQSFIERMTNFDKNLPNEKVLPKHSLLYEYFTVYNELTKVKYVTEGMRKPAFLSGEQKKAIVDLLFKTNRKVTVKQLKEDYFKKIECFDSVEISGVEDRFNASLGTYHDLLKIIKDKDFLDNEENEDILEDIVLTLTLFEDREMIEERLKTYAHLFDDKVMKQLKRRRYTGWGRLSRKLINGIRDKQSGKTILDFLKSDGFANRNFMQLIHDDSLTFKEDIQKAQVSGQGDSLHEHIANLAGSPAIKKGILQTVKVVDELVKVMGRHKPENIVIEMARENQTTQKGQKNSRERMKRIEEGIKELGSQILKEHPVENTQLQNEKLYLYYLQNGRDMYVDQELDINRLSDYDVDHIVPQSFLKDDSIDNKVLTRSDKARGKSDNVPSEEVVKKMKNYWRQLLNAKLITQRKFDNLTKAERGGLSELDKAGFIKRQLVETRQITKHVAQILDSRMNTKYDENDKLIREVKVITLKSKLVSDFRKDFQFYKVREINNYHHAHDAYLNAVVGTALIKKYPKLESEFVYGDYKVYDVRKMIAKSEQEIGKATAKYFFYSNIMNFFKTEITLANGEIRKRPLIETNGETGEIVWDKGRDFATVRKVLSMPQVNIVKKTEVQTGGFSKESILPKRNSDKLIARKKDWDPKKYGGFDSPTVAYSVLVVAKVEKGKSKKLKSVKELLGITIMERSSFEKNPIDFLEAKGYKEVKKDLIIKLPKYSLFELENGRKRMLASAGELQKGNELALPSKYVNFLYLASHYEKLKGSPEDNEQKQLFVEQHKHYLDEIIEQISEFSKRVILADANLDKVLSAYNKHRDKPIREQAENIIHLFTLTNLGAPAAFKYFDTTIDRKRYTSTKEVLDATLIHQSITGLYETRIDLSQLGGDGGGGSGGGEAAAKGGTLGDQGSRGSDPLPEPRVTLTVEGIPTEFLVNTGAEHSVLTKPMGKMGSKRTVVAGATGSKVYPWTTKRLLKIGQKQVTHSFLVIPECPAPLLGRDLLTKLKAQIQFSTEGPQVTWEDRPAMCLVLNLEEEYRLHEKPVPPSIDPSWLQLFPMVWAEKAGMGLANQVPPVVVELKSDASPVAVRQYPMSKEAREGIRPHIQRFLDLGILVPCQSPWNTPLLPVKKPGTNDYRPVQDLREVNKRVQDIHPTVPNPYNLLSSLPPSHTWYSVLDLKDAFFCLKLHPNSQPLFAFEWRDPEKGNTGQLTWTRLPQGFKNSPTLFNEALHRDLASFRALNPQVVMLQYVDDLLVAAPTYRDCKEGTRRLLQELSKLGYRVSAKKAQLCREEVTYLGYLLKGGKRWLTPARKATVMKIPTPTTPRQVREFLGKAGFCRLFIPGFASLAAPLYPLTRPKVPFTWTEAHQEAFGRIKEALLSAPALALPDLTKPFALYVDEKEGVARGVLTQTLGPWRRPVAYLSKKLDPVASGWPTCLKAIAAVALLLKDADKLTLGQNVLVIAPHNLESIVRQPPDRWMTNARMTHYQSLLLNERVSFAPPAILNPATLLPVESDDTPIHICSEILAEETGTRPDLRDQPLPGVPAWYTDGSSFIMDGRRQAGAAIVDNKRTVWASNLPEGTSAQKAELIALTQALRLAEGKSINIYTDSRYAFATAHVHGAIYKQRGWLTSAGKDIKNKEEILALLEAIHLPKRVAIIHCPGHQRGTDPVATGNRKADEAAKQAAQSTRILTETTKNAGKRTADGSEFEKRTADGSEFESPKKKAKVE

SEQ ID NO: 6892 - protein, 2096 aa, synthetic construct
MPAAKRVKLDGGDKKYSIGLDIGTNSVGWAVITDEYKVPSKKFKVLGNTDRHSIKKNLIGALLFDSGETAEATRLKRTARRRYTRRKNRICYLQEIFSNEMAKVDDSFFHRLEESFLVEEDKKHERHPIFGNIVDEVAYHEKYPTIYHLRKKLVDSTDKADLRLIYLALAHMIKFRGHFLIEGDLNPDNSDVDKLFIQLVQTYNQLFEENPINASGVDAKAILSARLSKSRRLENLIAQLPGEKKNGLFGNLIALSLGLTPNFKSNFDLAEDAKLQLSKDTYDDDLDNLLAQIGDQYADLFLAAKNLSDAILLSDILRVNTEITKAPLSASMIKRYDEHHQDLTLLKALVRQQLPEKYKEIFFDQSKNGYAGYIDGGASQEEFYKFIKPILEKMDGTEELLVKLNREDLLRKQRTFDNGSIPHQIHLGELHAILRRQEDFYPFLKDNREKIEKILTFRIPYYVGPLARGNSRFAWMTRKSEETITPWNFEEVVDKGASAQSFIERMTNFDKNLPNEKVLPKHSLLYEYFTVYNELTKVKYVTEGMRKPAFLSGEQKKAIVDLLFKTNRKVTVKQLKEDYFKKIECFDSVEISGVEDRFNASLGTYHDLLKIIKDKDFLDNEENEDILEDIVLTLTLFEDREMIEERLKTYAHLFDDKVMKQLKRRRYTGWGRLSRKLINGIRDKQSGKTILDFLKSDGFANRNFMQLIHDDSLTFKEDIQKAQVSGQGDSLHEHIANLAGSPAIKKGILQTVKVVDELVKVMGRHKPENIVIEMARENQTTQKGQKNSRERMKRIEEGIKELGSQILKEHPVENTQLQNEKLYLYYLQNGRDMYVDQELDINRLSDYDVDHIVPQSFLKDDSIDNKVLTRSDKARGKSDNVPSEEVVKKMKNYWRQLLNAKLITQRKFDNLTKAERGGLSELDKAGFIKRQLVETRQITKHVAQILDSRMNTKYDENDKLIREVKVITLKSKLVSDFRKDFQFYKVREINNYHHAHDAYLNAVVGTALIKKYPKLESEFVYGDYKVYDVRKMIAKSEQEIGKATAKYFFYSNIMNFFKTEITLANGEIRKRPLIETNGETGEIVWDKGRDFATVRKVLSMPQVNIVKKTEVQTGGFSKESILPKRNSDKLIARKKDWDPKKYGGFDSPTVAYSVLVVAKVEKGKSKKLKSVKELLGITIMERSSFEKNPIDFLEAKGYKEVKKDLIIKLPKYSLFELENGRKRMLASAGELQKGNELALPSKYVNFLYLASHYEKLKGSPEDNEQKQLFVEQHKHYLDEIIEQISEFSKRVILADANLDKVLSAYNKHRDKPIREQAENIIHLFTLTNLGAPAAFKYFDTTIDRKRYTSTKEVLDATLIHQSITGLYETRIDLSQLGGDGGGGSGGGEAAAKGGTLNLEDEYRLYETSAEPEVSPGSTWLSDFPQAWAETGGMGLAVRQAPLIIPLKATSTPVSIKQYPMSQEAKLGIKPHIQRLLDQGILVPCQSPWNTPLLPVKKPGTNDYRPVQDLREVNKRVEDIHPTVPNPYNLLSGLPPSHRWYTVLDLKDAFFCLRLHPTSQPLFAFEWRDPGMGISGQLTWTRLPQGFKNSPTLFNEALHRDLADFRIQHPDLILLQYVDDILLAATSELDCQQGTRALLLTLGNLGYRASAKKAQLCQKQVKYLGYLLKEGQRWLTEARKETVMGQPTPKTPRQLREFLGKAGFCRLFIPGFAEMAAPLYPLTKPGTLFNWGPDQQKAYQEIKQALLTAPALGLPDLTKPFELFVDEKQGYAKGVLTQKLGPWRRPVAYLSKKLDPVAAGWPPCLRMVAAIAVLRKDAGKLTMGQPLVILAPHAVEALVKQPPDRWLSNARMTHYQAMLLDTDRVQFGPVVALNPATLLPLPEEGAPHDCLEILAETHGTRPDLTDQPIPDADHTWYTDGSSFLQEGQRKAGAAVTTETEVIWARALPAGTSAQRAELIALTQALKMAEGKRLNVYTDSRYAFATAHIHGEIYRRRGWLTSEGREIKNKSEILALLKALFLPKRLSIIHCLGHQKGDSAEARGNRLADQAAREAAIKTPPDTSTLLAGKRTADGSEFEKRTADGSEFESPKKKAKVE

SEQ ID NO: 6893 - protein, 2096 aa, synthetic construct
MPAAKRVKLDGGDKKYSIGLDIGTNSVGWAVITDEYKVPSKKFKVLGNTDRHSIKKNLIGALLFDSGETAEATRLKRTARRRYTRRKNRICYLQEIFSNEMAKVDDSFFHRLEESFLVEEDKKHERHPIFGNIVDEVAYHEKYPTIYHLRKKLVDSTDKADLRLIYLALAHMIKFRGHFLIEGDLNPDNSDVDKLFIQLVQTYNQLFEENPINASGVDAKAILSARLSKSRRLENLIAQLPGEKKNGLFGNLIALSLGLTPNFKSNFDLAEDAKLQLSKDTYDDDLDNLLAQIGDQYADLFLAAKNLSDAILLSDILRVNTEITKAPLSASMIKRYDEHHQDLTLLKALVRQQLPEKYKEIFFDQSKNGYAGYIDGGASQEEFYKFIKPILEKMDGTEELLVKLNREDLLRKQRTFDNGSIPHQIHLGELHAILRRQEDFYPFLKDNREKIEKILTFRIPYYVGPLARGNSRFAWMTRKSEETITPWNFEEVVDKGASAQSFIERMTNFDKNLPNEKVLPKHSLLYEYFTVYNELTKVKYVTEGMRKPAFLSGEQKKAIVDLLFKTNRKVTVKQLKEDYFKKIECFDSVEISGVEDRFNASLGTYHDLLKIIKDKDFLDNEENEDILEDIVLTLTLFEDREMIEERLKTYAHLFDDKVMKQLKRRRYTGWGRLSRKLINGIRDKQSGKTILDFLKSDGFANRNFMQLIHDDSLTFKEDIQKAQVSGQGDSLHEHIANLAGSPAIKKGILQTVKVVDELVKVMGRHKPENIVIEMARENQTTQKGQKNSRERMKRIEEGIKELGSQILKEHPVENTQLQNEKLYLYYLQNGRDMYVDQELDINRLSDYDVDHIVPQSFLKDDSIDNKVLTRSDKARGKSDNVPSEEVVKKMKNYWRQLLNAKLITQRKFDNLTKAERGGLSELDKAGFIKRQLVETRQITKHVAQILDSRMNTKYDENDKLIREVKVITLKSKLVSDFRKDFQFYKVREINNYHHAHDAYLNAVVGTALIKKYPKLESEFVYGDYKVYDVRKMIAKSEQEIGKATAKYFFYSNIMNFFKTEITLANGEIRKRPLIETNGETGEIVWDKGRDFATVRKVLSMPQVNIVKKTEVQTGGFSKESILPKRNSDKLIARKKDWDPKKYGGFDSPTVAYSVLVVAKVEKGKSKKLKSVKELLGITIMERSSFEKNPIDFLEAKGYKEVKKDLIIKLPKYSLFELENGRKRMLASAGELQKGNELALPSKYVNFLYLASHYEKLKGSPEDNEQKQLFVEQHKHYLDEIIEQISEFSKRVILADANLDKVLSAYNKHRDKPIREQAENIIHLFTLTNLGAPAAFKYFDTTIDRKRYTSTKEVLDATLIHQSITGLYETRIDLSQLGGDGGGGSGGGEAAAKGGTLNIEDEYRLHEISTEPDVSPGSTWLSDFPQAWAETGGMGLAVRQAPLIIPLKATSTPVSIKQYPMSQEAKLGIKPHIQRLLDQGILVPCQSPWNTPLLPVKKPGTNDYRPVQGLREVNKRVEDIHPTVPNPYNLLSGLPTSHRWYTVLDLKDAFFCLRLHPTSQPLFASEWRDPGMGISGQLTWTRLPQGFKNSPTLFNEALHRGLADFRIQHPDLILLQYVDDLLLAATSELDCQQGTRALLKTLGNLGYRASAKKAQICQKQVKYLGYLLREGQRWLTEARKETVMGQPTPKTPRQLREFLGTAGFCRLWIPRFAEMAAPLYPLTKPGTLFNWGPDQQKAYHEIKQALLTAPALGLPDLTKPFELFVDEKQGYAKGVLTQKLGPWRRPVAYLSKKLDPVAAGWPPCLRMVAAIAVLTKDAGKLTMGQPLVILAPHAVEALVKQPPDRWLSNARMTHYQAMLLDTDRVQFGPVVALNPATLLPLPEEGAPHDCLEILAETHGTEPDLTDQPIPDADHTWYTDGSSFLQEGQRKAGAAVTTETEVIWARALPAGTSAQRAELIALTQALKMAEGKRLNVYTDSRYAFATAHIHGEIYKRRGWLTSEGREIKNKSEILALLKALFLPKRLSIIHCLGHQKGDSAEARGNRLADQAAREAAIKTPPDTSTLLAGKRTADGSEFEKRTADGSEFESPKKKAKVE
